United States Patent Application Publication US 2006/0134663 A1 - sequence listing, part 13

SEQ ID NO: 24395 - DNA, 2352 bp, Homo Sapiens
ccagaatgagatacagccaatttggctttgatgacccagctgagagggaaatttagatacaattcaggaatatcatgcccaaaaatagtggtcccagcaaccaggacacagagggaagacctggatattgtcagtgattggtggagggggacatcttggaccctcctaggcctggtgtcacatctcccatctctcagaccccacagaggccaaggggccttggctctgacccaggttaaagagagccaccagcccccaggctcagggagctgaaaccacccatccgcagaaatctaagggcaaggagaaatagaaattgtctgttccttcccttcaaagtgtaaggcctcttccaggagcaactggagccaccacagcttctcagtgacattgggagggcttcgggcccaggaaaaacccaagccttttgtcctgagagccgagccacagcggatgcagtggcgtcagcatcccagagcggcagcttctctcctgcctgtcactggggactggttgctctccacccatccaggaggaaggggttaggtcccagtcttacactcttatagggtctcatggacataggcctatgcctgttctgatatctataattttttaaactcaaaaggaccaaaacactcctgaaccctcatctatacggcctgcactgggcttggtgtttcctcctggcccaggcagctccatctcttctgccattcctcctggacgaaagtggcaggaccccacctctaccacttccccacagggtcactgcacagcggcttcaaagacacgccctgttgaaggggaaacatcctccccccatcacactccaactcgtcaccccaaaagggaagtcaaagcacaggtccgtggggcctatggtttgtagacactgacacagtggttttcaaaccaggtgctgcggaacccctgatattccacagagctttgtcaggggatgctaaagtgggaagatgggagtggaggcaaaggataggtttccagccctcctcccatttccgccgccaccagaataactctgcttttatctgtcttgcctactgagatttcattttcaagctttctttgaagaagaacttcaaaccaccatctcgaggtttgatcttagaccagccagcacaggttctattcttgctgttcatgttggaatggctccagcgttccagtacaaagtgtctttgtgttggaacttgggtcacagacccaggcacaagcatttatacacacacacacacacacacacacacacacacacacacgtacatagttgatggtttttctagccaacccaccctgaagctctggccaaggtttgatttggacagggacctggtgctcagtggggatgggtcgtgaccctgatattggcccatgaagcatggggagctctggagcaaggaaacaggctcaatcccccactgaggacttgtgtctgcacccctatctggcaccccactttcctggcctaggcccaagggacacagcaggagaagcagtgtgataggagagaggctagggttaaattcatctttacacagcgccggatggatggaaatcttggctcacataaaagacagactcagggaggattttatgacaaaagtccctcctttgagggcaggattcccccaggaatcctggacactttagtgagaactggaccagcccttggcacaaaaccctgcctgccctgtcccccactcccaccccccagggaattctaggtgaaaatgtgaagctcagggcacagcaagcgcatgacacgggtgtattacattcggtccgagtgtgtccttagtttccctgtgtgcaaaatggggctagtccaggctcttcccacctcactgggacaattgcaagggtcataggagaggtgggtatgataggtggtcatatgaggtggtgagtatgagaggtgggtgcctcacaaactcggggtatggtcctgacctgcatggcagatgagcagagcacttgggaacgagcataggaagtgccatcttcccgggcatctctgctcagtgttaaggtctagccacagacactgtgggacctgcctcttcctatggaatgggggcctgcatgggttgtgtcctggggcaggagtgagggatggctgggaagaatctccaggtctgtggcccttgtgttgagtgattattttgtgacactctcattcctggaccacctgccaggtttatctgttatacctgtggcattcttattatgtcagacaagttattatagttcattcaactctaacaaatgaacaaaagaacaataaataggaggccattaaaggtcttttgtggaaaaaaaaaaaaaaaa

SEQ ID NO: 24396 - DNA, 944 bp, Homo Sapiens
gtagttccatttgtgaagattgtgactttttgtttattagctataatttctacacttgtaaggcttaaaaacaagttaaaaagaaaattgcaaataacatttgtccctttcagtcttcacctagttgtgtaattattttaattcactttgcctttgcagaaatttgggtattttctttgtagtgctattgagtctcatctggaaagattatataaattgcattctccttgcttatgtgggtagaatgggaaaagaaggcaagacaaagtatacttaaattctatgcatatttctgttatgctttctgttttttttagttgattctgaaatgaatatgccctattcttttgaaagaatggccttttagttgtatagccaaagacatttagtattttccggttccttaaggtattactgtaccattttgtaaaaggaatattattattattatttttaattatttggtaaatattttgtcatatgaccttctgaagcagccacaacttagataatgtcagaactaaggtgattttttttttttaattttgaaagcccagccaaaatgaggtgtgaatttgtcatactgttacattgaaattggtaacaaaatatatcccctcccatttggacttttagggtaaatgaaaattttattgtattttaaagtagtttctaagtgttagcaagactgactataattccagtttctgttttctatggacagacctgataaactggagaccctaaagcaggaatacccaaattatagtgtcaggattttagctgtaccagaggcctttatgtgctacacataatttgtataaaattttatatgtgcagattgggtacataaacagttctccatttttctaagggaatgcaataaatgtagcatcgtgaataaatataacttttataatccgtaaaaaaaaaaaaaaaaaaaa

SEQ ID NO: 24397 - DNA, 2220 bp, Homo Sapiens
tctgtttgatgctgtctcaccagtttcttaggctgtgttctcttttgttcctcagacttgattattgcagttgcccttctttttatttttttcaagtttgttgattcttctccctgttcagatcaactgttgaactcctctagtgaatttatttcagttactgtacttttcagctccaagatttatctttggttcctttttataacgtctgtgtctttattgatattctcattttgttcatatgtctctttcttcctttagttctttgtccatgttttcctttagctctttgggcttatttaagacaattgtttaaagtctttgcatagtaagtccaatgtctgtgtttcttcagggatggttttcattattttgttttcaatgagccatactttcctgtgtctttgtatgctgtctttttgttgttgaaaactgtatgtttgaacattataacgtggtggccctgaaaatcagatattccccccttcctgagagttagttttatttttattattgaagattgtagcagtctattgctacatgtgcagtcatttccaaactatttttgcaaagactgtattccttctgtgtgtcatcactgaagtctctgttccttagtttgtgtttaatagtttgacatagatttccttgaaaggagttaaaactagcagaaaaatctctctcccagtctttccagtctttgcagattggttctgtgctgggcttttccattaatacttagccaggcttgtactgagcctaacaatcaggcccaaaagcgtagggtctttgcagatcttgtctgagcatgcttcttgctgtgtatgcacgtagttttctaaatctccctgtatgtgctgttgaatattctaatttcccaaagaaactcctttgcagctttttctcacagaacatagatggttttttggatatcttgaccatagtctttcgacccaggtgtttgcagttgttagttcaccttacacttttttcaagcattgcctactgcttacgatgagtgctctgtcactcctttaagtagccccagacaggctaccagagacttaaacaagaatttgtaagttctgctcagcttcctctagaaatggggatcagggtccaagacagaatgcagttgctgatttcaagactgctgcaacaccagggagcttgtgggggaagggcaagcagaaatgtcacaaagctttcttgccattttaaagttgcctgttcttgactcagcatttgcttcattgctataaactttttactgtttttcagagttctgataaaattggctatgcctgttcctgctttaaaaaatatatatatattttttagggattggggtctcactatactgaccaggctggtcttgaacttctggcctcaagccatcctctcatttcagcttcccaaagtgctgcaattacacgcgtgaaccaccacacccagcccctgcttgtttttcaatgtgcctactccaccatgttgctcaagtatgtatattttctaaactaccttgtagtgttgtgatgggaaataaatccctgagccttttgaataactcagagagatcaaaaacttagtttatcctattcgaaggattagaaaaatgatatatctttcactttttcagggataggctcctcattagaaggctcctatgtgccgatgctgtacaagacatttcatttctcttaatgtttacaacaagcttgttgccaaggctgatcttgaactcctggcctcaaacgatcctcccagctcagtctcacaaagtgttgggatgtctggccaactaatgactatcttaactcttgtgtttcaatgtttatgccttcttttatcttgactgattgtatgactatgtcttctagaacaatgttgaacagaaatggtgagagcagacatccttgctttaatatttcaccattatatatgatgttaggtatagatttttctcacagatgccttttatcagattgaggaatttatattcctactttgccgaaaggtttttgtagtatgagggggtgctgaattttgtcaaacactttttcggtaataattgagatgattggttctgcagtcatcgagatgtggattttctcctttattctgttcgtgagtgattacactggttgactaatgttaaaacaaccttactttccaggaataaaccctattatcttttttatacaaaaaaaaaaaaaaaaa

SEQ ID NO: 24398 - DNA, 4926 bp, Homo Sapiens
cggagaaatagggagatgcaggaagtgggggcccatggggcccccaagaagcggactctccaaggggtacccccaccccgctaccttccccacggacgggcccctcctggagcccataccctcctgtgaggccattccagtgtcttctagaaagactcgcttgccaggagtgcgttctttgttgaaaaatgccctgaagcgaaaagatgcaggtttatatggaacccccaccccctcccccactctcccactctgttcgttctgaatgtcttcacgagcgtgcatcagggcgcctggctcccccacctcagccagtgagtcagacacgggtttcgcagccatgtttcctggctccgaggacacgggtggcaggcccgttgcagcccagagccactggtccctacagggcgccgccacaccagcaggaaggaggatggctgtgtccggagcctggcggggaggcggcctccccagtatgtgagtgcagggatctgccagaaccacctggccctctgtagggcgtttaactggaaataccctcactgccaagtggagactggggcgtgtgccacattgccagccaccaggaaagcttttctttttcttttttttttttttttttaaacaccaagagcacgtatagcatgggggaaagaacctaaatgtctctctgtcctgtgagctggtgaaaaacccagcatgagaacgcagtgtcaggtgtgggactccttctgcccctgcagtgggtgttacgggcggtgtgccctggcgagcaagctttgattcttggttctttgagctcgtttcagaggctgagtccccacatcagctttagttcttggacttccctgtattaagcaagaattaggagaatggctgtccctgcaggcgcctcccgtaaatcctgagctctctggcgcaatctgaaacttctcttctgttttctttggctgtatcagccgaaccaggagaggcctgggctgcgactaaggagaaagaaatcgggggtttctgagagcagatggtgcctttgtgggtgcagggcttttgtggaaattgtcagcctctacgggcagagtccggcatcccctccccagactgcctgctgtcaaaccacggagcagctggagcctgccctgtccacggcccgtttccacccgggcatgttcgtctctcatgacttcggcagaggcccctggtggccttcagtttcagtttctcatccaggaaggtaaccttgggcattggcagtgggtttccctatggcttggatccagattagaattgatctttgttttcactttccatagttaataacatgcaaaataatgagaagaatttattttaaggtgacagctatactggtccaacatcgcctgcttattgtcagggtacagaagtttaatactttcttaatccagtttttcaaacttctccctgtagaccgtaaggatgaattccacaataggatcctttttaaaatcgattttaaattgttgcctagtcctgccaaggttattatgtgcatctgttatttttccaatacatgtaaacagttgcagcatgatgctttgtttaatgtcctgttcttaagctcgttagagccagttttgaaacgtttggtcttaccgtgaacggaggctggcttggcttagccacgctgatgagtaagtgagggatgtctccatcttgagatcaccaggcaagagagttgcctgcaccaggtaagaggctaaagcccctggggtaacagtccccaccgctacccgaggtaaaacaataaaagctatgtggttgagctcaggcctctcgtgcctggtgtcagagaaggcagagcccacagtaggtgcagggtgcaaggccctgggagggcactggccagggaaggtggtatagatggccctcagattgcggggccccgagcagctccccactctgcccgtccaccttccctggctccagcctcattctctctttagtttaactatgcaaagagaggaggttgagagtgttctggcagctggagctcttttccttgtccttcctgccctccgatggggccacctgtgtcggggcagcagtgtccatgtttatggagatcagaggtgtccccactgtgtggctggactgtactctgctgcccgggtagccaggagtctctccctctctcccctgccgcctgcctggtctcatgggcctccttcacacacccctccctgtggatcgcctgcctgggcccagagcaggggaactggagtttgtgagtgagcagagcaggttatgtgcagacagggaaacgagaactttggacctggctttctgagtccaggtgagagctgtgtggccccccgatgccactctgcccgccggagggatgtgcctgctgagccttttccttccacgccgcctctcactgccaggccagcggcttccgctgagactcgctggagaggcggctcccgtgtccgtccaccgagcactcagatggatgctgatcaccagggccgagggggctcccagaaggaccccaggccctggggagggtggctgtgggaggccaagtccactgcccggaagtcttgtcagccctaagccagggaagcctggagcgtggcctggcgggtctgggtggacaccgtccccactccggactcccagcacaggggagagcctgtatggccctgtagccctgggcagagctgggcctgtcgtgtgttcctgcctggcaggtgcaggtgctggccatctgcaggtggaaggaggtgggaatcttggattttttgtttttttttgtcttttttttttgagatgaagtctcgctctgacacccaggctggcgtgcagtggtgtgatctcggctcactgcaaactccgcttcctgggttcaagtggttctcctgccccagcctcccaagtagctgggattacaggcatgcgccaccacgctcagctgatttttgtatttttagtagagatggggtttcaccatgttggccaagctggtctcaaactcctgacctcaagtgatctgcccgcctcggcctcccagagtgctgggattacaggcgtgagccagtgcacccggcggaatcttggaatttttatagacggcacctcagtttctgactccagccgcacacctcctgcctctaccagcaggggttgccgccagaccagagccagggccaggtccctgcgtccatcccccccggtaggatggacgtgagccatccttctaggggacttttttcagtgtgcgactcgtctctgttaggtggtaggagccagtttgtgtggcctgtgccacgctccacagtgcgtggctgggctctgtgtgtggcctgtgtcccctgtccctgcaggacccagcaggcatcgtggcgtgacagctgtgtccaagccactgcccgggcatcccatcacccaccagggtgcacggtctctcctgctgggggctttctgtcgcatgtgtgtctcctgtcgactctgcagtttgttctcagagcagaatgtttcctgttctcagtgcacaaagacactggttttcaatcggcgtctaaaaccacgttcctgcctttcattgcaacacggtgtgttcatttgtttaaaacagtttaatgagtaagtttagatgactggtcaatatcttaaaaatgtatattagtaagaagttcttcctggaatttttctttcgattctggcagaataaacaggtgtttttagttttcccactgtctgagccaagcaggaccctgtcccagagcaagagatgtccccttccatctctgacccttgcctgggacaagctttgatggggggccccagcttcaaggctgtggtgggaacagcacccccaaatgccagcctctcctttcttcccatccaccagtatactgcggggccatttctggtctttgtccaacaggaaacccatttctggtgggatatgccttccagtgccacagggccactcaccccatgcatctctgtcctgcccgtcagtgctgggacggacagcaagggcaagcccagtgtctggcagataggtgggtgggaacagagaggggagaatgccgtcctaagcttctgcttggggatcccccacacgacctgggtactgcctgggaaacctgtcctaagtaaaactatggacctcgcctcgcccaccggcctgcgaagccagcatctccgtgaaggtggatggaagcgcctttgtcctcactttgagctgcaagctgggtcagcggctctgaagccctcgagtgactttctaacccaagacccagcccctggcaggaggagggtgggtgcagggctggtgggacaaaaagaggcctcagcaggcctggaagacccttccagtacatcccacagcgtgtcgagcagctgggagaacctgtgtcaagctcgagccgtcataggtccccatgaggtgtctgaagccccttcttggtgatgggaggcagaggtgctgacgttctggagcatggacgtgagtcctcagctggctccgcgtgggcccttggagggtgccaggtgtgtggtgaccttctggatgcctttaacttcatggctgcgtcattcctgatttagaactttaaccggagcttcatctagtgattgcaaaactggaccaatgggaggacggcggcgcagcccgctccctccgtggaatggagctcagctcttcggaggcatcaaagcacctgtcgcctccgtggtccccctgccgagggagtgcggcctctgcaaggttcgggggtggcttcgtttgcctggagtggccggccctgcttgtgccatgtggatgtttgtgagcctcggtcctacagcactgtgtaggctgcatctgtttcgtgctggtcctgttgacttgtatgatatccacaaataaatattttcatggtaaaaaaaaaaaaaaaaaaa

SEQ ID NO: 24399 - DNA, 4542 bp, Homo Sapiens
gttcgggtgtgtttacccacttagggctttctttcccagtcaacgctaacacattttgttaaatgatccctttccctgctcacattgtgtgtcatttctcatcatcagtagtcctccagcctgggcagctgtccccaccctttttcatgtaggtgcaggaagttaaatctcatttccaggatgcatgtgaacatttacaaagttgaactttgagtgcattctgctcatatgaattattgggattgttgatatatattgtattatgctaccaaagaaatattggttttattagaaggaaatggtcatcctctggaccatggagactagctcagaatacgctgatttccctctcctgactttgccaagcctttggctgcttttgcctgataaagggcagggccatctgaagacacttcccccagtcggctttggagtcacgggagctagtgcctgctcacacatttttcaaaagggcagtgcactcagaacttcactgtacctgggatttttaattcctcttgcagtgttgaccagcagagagacttgaggctactttaagcctccactatgtgtttgtagataaaattctccattcaaacattttaaaggactttgaacattatctgcttatggaagttgtgcccttcacttggttagtaaccacctcagccataatacttaccatcataggtttcttaaaatgcttttttttttccctaaacttgagtttccttagtgatttcaaaatgaagtataagaatatcagatccagttagcaaaagcctaggacttgtttctccaaacattgtactaacattcaacttgttttaaaattatgactcaagaattttaaaaaaattattctggacatgaattaaaacttttttataatataagtatttttctgattgaaaaaaggatataattgacttcactctaattgtcatgtatatttccataagtaaatggattttgaagtatttttattttttgaactttatttaaagcatttgtgatgacatgttcaacttttgcatgtatgtagcctttgaagtaaaaataaataggaatgttaggctcacgttaatatttctagtttctgtttatgatcatggaacatgactagcacacaaagtagatttttgccccagtgaacttctgcaactgtttctgaccctttagaaaataccaactgtgagaaggatttaatttgcctaatgttaaaaacctatcatctaaattactttcagagaggattttgtcagattttggtttggaaattgttttaattgaatatttaatcataatagactttgtatgaactaagctgatttaatcagtttaaaaacctctcattaccttcttagattaaagaagctaatactgttttgagatagaaggaaatattttgtggggcatgtgacttttgtgttaaggcagtttacccatcttggctgatgtggggaaagtgcaaacttccagtagaatcccggtcttttcatccaagtgcttgcaggggcagccttgtagtctgcaaagaaccatgcagaaaccaaagagcttgcttttttgtctttgtaattccttagggtctgtgatatatgccaggaaatctgattgaaactaatatgctttttattctcccattattccctaaattgttatatcacaggcacttgcctacattgggaaagtaaggacaaataatacccatttaaagtaacttgcctatattttgactgtctttcgtaagcacttgctgaactgctgacttaactcagttttaagatttcctctttccccccaacttttccacatttcttaaatgagggtgtaatttactgcaaacatgtacatttaatataatattgctgttagattcgtggtacactttatgaagcaaaaacatgaaaaggaaaccacaactctaataaactttaaattaaagattaagatgactctttctcacccctcttcttgagtttagcccatgtctacaccatgcacacagtcacaagactttatagcttagaaactttaggtataattgggtcctatagacataatatacaatccaccaactgagccttggccgaacttgtcccttgttaaagacgtagggctagccagccacagagctgggtattgaagtcggcaagttgtatcccggtgcaggcgtccttaaatggagagtactcagaatctgccagccttaacctgcccactagccaccctaatcaagcattaaatatctgatccaatctggccactggtgtaactccgtaatcagacatcctgtttgtaaacagctcctccttctctccctctccctctcagagacagaagtggtgctggggtttggagtttgaaaataaccttcctatgacaggaagtgggcttttgctattagttgcccaactcttagaggatcccagcttgtgtctttagacaaaactgacagcctttggaacgatcgcatggtggcgctgccttccagccaacagttctggctcagcagcagaatttatccagctatgtttgtagaatttttttaagatcctactgcattttgctcttaagcttttataaaaatttgacgagaaaatgtaaaaatgatacttggcaataagacatttagttttcatgcacctaataaaaatgtgtcaaagctagatcgctccagatgtgcttaaaatatctcaaatcctaggctctcattggccttataagtgattgggaagaaaaagaataaaataaactcacatataggagatatggaaaatatttcatcaaatattatgcccaaagagagaaaattaggagttgattttttgtagcactctgaatatggaacttccttttaaaaatgtaattctacccttcacctttcctacattgtatgtttctgtgagattttactcattacaagtgaaagtagaggactgcctgtgaattgtttacttctgaaaagaatatattgagatcagttaaaattactcaagagtttggtgactcaggattgtaaaaagcctggatctcaacagctgggaggagtcagagggtgaagtgggaaaaaatagggactgagaggcaacgaaaagtccctttgaacctgtggtcatttatagcaattagagtgggttgcccctctacttctcccaagaagaaatcccaaatagattcctttcatgtcagattatactgttctgattttattttctattatttttacatatacatccaaatctaagaatacttattcagattggcccactcaggccaaaagtcactgtcttgtgttctagaaattctttcatgttgctgacataaatccatttttaaaagaacattcagggactcttagaattttagagtggaagggacctttgagatcatctaccagtgcttctcaccccttagcatgcagcaaaatcactcagatacttacttattattcacatttcttgaccccagcactagaaatctgggaggatatctgcatttttaacaagtgccctagtgattctaatgctgatggtgctcagatcgctcttggagaacccctgattttatccaactcccacatatgacaaatgaggaaagcctcccaaccctaagctctgtcaggtgacctgattccaatgtatgataccaacaatcttatgaaggctggagaaaaccattaatactgagacttgagtagatgatgctcgtgaataagaactttatggctgggaccacagcagtcatgggagcccatccctggaagtccataatataaagcctttaatacagagtggtggtttttctcttttctaaataccatttcagtctgttaagagaaaagaaattagtgttcagaaaagtagttactccatatgtgcagtaactacttttctataatgtcttatggcatctggggttcagcatcattgaacaagattaaatgaacgttatagagctataaaattgcatgtaaaataacacaaaactgttcaaatgactatcaaagtagcctgggaatgaatttccactaaaattaattgtcactttcaaaacgtagcttagcaaagctgttactaaactggagagatcctttaatacatagaaatgtcaaaaaaatcaaataagtattccctaaacgatgtgagtgataagcaaaagtcattgcaaagtcagtatttttttgttcatcattgctactgaaattcagagttccattgtatatgtgtgtcttgagtgtaccttattagaatatccaatacaatagcttttggatattctatgcttttgtgtccttcagaaatcatgagattgaaggaatctgtgttaaatgtttttgttttggttgctgcctgaaaaaagttaccaactcatttagtgaaatgcaagatttctttatgaaaatttcaatttctaatatcgaagtcagataatttttcttgaacttttattttggaacagatgtttatttcggatctattaaagtgtcaactttgcattatagaactgaacatgaaaaaaaaaaaaaaaaagaaaaaa

SEQ ID NO: 24400 - DNA, 2416 bp, Homo Sapiens
cacagaaacatgatgtggaagtgctggaacggaacttccagaccatcctgtgtgagtttgagaccctctacaaagctttctcaaactgcagcctcccgcaaggatggaaaatgaacagcacccccagcggggagtggttcaccttttacttggtcaatcagggggtttgtgttcccaggaactgtaggaagtgcccacggacgtaccgcttgctcggaagccttcggacctgtattgggaacaatgtttttgggaacgcgtgcatctctgtgctgagccctgggactgtgataacggagcactatggacccaccaacatccgcatccgatgccatttaggtctgaaaactccaaatggctgtgagctggtggtggggggagagccccagtgctgggcagaagggcgctgccttctctttgatgactctttcctgcatgctgcgttccatgaaggttcagcagaggatggcccacgggtggttttcatggtggatttgtggcatccaaacgtcgcagcggccgaacggcaggctcttgatttcatctttgctccgggacgatgagagtatttcccatgctggagtcggcgagaagggccgaggcggggcctgggcagactgtggtccggtccagtccctaccggtgttgtttccatgctcagaaacctgcctcagcggaaagctcttatttgggattttatatcatgtcgggtccctctttcccttggttattgtaaatggaaacttttcggcttgtatttccttagattttttttttttccttccaatcatttgcttcagagactcctttctggcctaacagcgcattcctttgattggtccttgagtgaccagagacttagtgcccttgtaagtctgtcttctgttgctacttgtttttttcagtgctctgaaatagagtaactaaatggttatttgtctgaatataataatgtaaaacttcttgtggtcatcttaaaaaaaaaaaaaaaaaaaaaactaaaaactgcaaaccagagagctagagaacttggcctctgatgctggcacactggggacccttcagccacctgacggcagggggacagtctgcagcccccacacctgactggcttcagtagccaggtggaggggctgccagacacagtcagggtggcacacagtgtccaggcccagggatactgtcaccatcgctcacctcattctaaaccttgtcaggtccctgatggcaaaagcattgggccagtaggactggaggctactctttaaacatggctttcctgcaaagctgaagctggtgtcccccagcaccaagctgcggctcacacagatcagccacggaacgtgtgatccgcttacctcactgcctacagaagccctactgccaaactgggcctggaaaattcccagttttaggtgttttgagtccacagtgatgaacgttaaggccaccaggttggctgataggagctgtagggggataggaccgcgctcacccagcgacatttggggaaagcctttctctggcaaaactggaataatagatctgaccaaagtttctgttttgctttggagttctgttgcctatgtttttttttttttcatttatttgtctgtacataaatgttcaaacactagacttggagatagtggaagagttggccctgtgtctttgtcatggcacaaaggtgtgcactgcgtgacaatgacccaagccagtgtgtgctagtgaggagacagagaagacctacatgcccagaggacccgtggccgttgtgctggttttctggtctcctgtgaagaacatgtggatctcttcccgaaggaaaaggtcccaggagaccagtttgaggcactcactctagaaatagcctgtgttagctgatgtgtgaaagcgtagccggccagccacactagagatgccttttctgaataatgtattatgagcagtgtcagatttataaagccgaggagtggtttggaatatacagctggtcgcaggtgcaggtccagtgtttagatccaaatggaaaacagcagcttctaagaggtacaactgttggaagaaaacacagttgaaatgcaccaggcaggtactagcaagtgtgcaaagagcacgtctacatttgagtaaaatgtctacacagatatttgtcagtgatgagaatgcaggaaaaggcagacatttcaaacatacctgaagtctttttactcattatcttgttaaagaatcactgaggtgcatgatttctacacatcgtgactgctctgctctgcgtttacaaaaccaacagcccgcgcaggtacctagctacctgcattcatgtgacatgtctggggaacagaagataaataaaggatcttgctgaaaaccagaaaaaaaaaaaaaaaaaaaagaaaaaaaaaaaaaaaaaaag

SEQ ID NO: 24401 - DNA, 3005 bp, Homo Sapiens
cggacgcgtgggctggaaatggcagagtaaaggccagggagtcaaggtggctgtccacagcagtgattcttatctggggtggggggtgggtttcacccgagggagggctgggggcatggacccccaggcaggcctatccaatcatctgaagggtgagcagtgttcagctcagaaaaagtaaggggaaaaaaaagcaatctctaaaaggaacatagacaatagcaaaagaagaaaccgagcccaaaagatgcttctgataggccgccttggggtcctgcatcctcgggtgagaatcactggtggacacgggaggatggagagccgggcagacatgtggagtgagaggggaagatgcatgtgtggcagggctgatggaggcatcagggtcaagactgtcaggtgttagaacacagttcctgacagaccaggacaaggatgacagcgaacaaatggatgtagctgaaaaggcaatgggaccacggtggtgcagctggggtttccaacgcctcggtcccagactcaaggactcaggtggaggagtgaggcccagagaagggcccagtgactcagaggaagtgggctgtgcgggtgagagcagagagcaggggatctgttgtcacggggaggaaaggcgcaaaggggaatggagacagcgtggaagaagagcgtcttgaagacatcggtgctaaggagggaggaggcaggaggagggtgggactgacaggaggacccaggaggagcggaggagccgggtttcaggcagggcgggagagtcaggttgagactgggtgcgtttgtacccgtgggatgtgggggaagagggtgggcaggtggagtggggacagcagtgagcgctgatgacaaaagtgctgtggtgacaggaagaaggtaggaaattcacaggcgcatgttccccagagtgttttcacaagaatgtgaaagaaaggatgcaaagggaattgagaaggttttggggagtcagggttgtggggtgctggaaggtacccatagcctggaccactgggatgtggacactgatagctgggcagagcaggtggattcagtgcagtacgtgtgatgcagagatgactgcatctggcggagcagcgggtgcggggccaggtcaagaagggaggaggtacctgagatcacgaattaggccagtgggagaatcacagatcgtgctgagagaatgcaggagggtgcaggtgggacagtaccgtgctatgcagtagaggaggaaagcaggagaaacgaccaacctgcgccccaggggctgactgctgggacatcaggggatgagtttgcaacacatgggagaggaggacagaggagaggtgttccctaatgggcaagaagaatgagtcggagcaggcaatggagcccagcagctaagagaggagagcttgttgagagcaggagggatgcgctgcagtaaaggaggcatgccaggcgccaagagggagggagcggatgcagagaatccagggactttaccccagatggggcaaagtgtgtgacgcagttcatggatgacaaagcatagtgtgggtaagataagcaaggaatgaaggacaggagggaggatggcaatagacaaggaggatgtagaagatgctggcaccttggaaaagctgggcaccacagtgtcaatgaagggcatgggaactgatgaaatgtcaggtggattgactttgagacaggaaacaattgtctccagcatagtagaaccaaaaatgtaggacggttaagggtgccttaagatagcagatggatccaatgctgcatattgtggataaaaaggatggcaatgttggcagcagcaagggcagggcaggaagggagctgacatcaaggaaatgactgcagagtgcagtcattgacttagaaagtggcagaggagggagtggatgctgaagatgaagctgagggtctctggaaaataacagtagggggatgtgcagtacatattaactagaaaaacagaaactgctctaaagtcctcaaggcatgatgtcagactcaagatgggtccaggaagttgatggacataaaaaaggacagaaggtgcatgatagggggagaatctcatgaatttgagggtctcaacattggtaaaggggccaagtgaatagaggggaggcagaattcagagtcccaaactgaggtgtccgcagatctcaggatacgttggtggtatgcctggtattaagaccagaccacagaggcagaatgaagcaatagctccagcagcctttaggagaaagtgggttaagggccaaagtgattggttaaacaaaggaagctggtcagcactgcacactaacatggcacctgcataaaaaccacagacaggtaactttagggacttcacagtggactcaagcagactgatcccagattgtaggtagaagtgtgtttgcaaaggccagaggagctgttaggacataatgcgatggagacaatttgcaacaatcactgaatccacgtttctgctgtttaagggtggctgaaaggatggaggtatagcttgtaatgcaaaatatacgcagaggttcatagtgaagctgaggaggagggccttcaaaagttaagtgggagatgtttaggtcagtagcaaatgggcccagtgggagagagtatgcccagagtttggagagggtcagggtgtcgggtgctgggatgagggcttcatgtttggaagacgcaaggtagagagcaagagaggaggaaaggtagaacaggatggagggcaagacctgtgtaagaagaagtcttaaactgtaaacatgggtgtagtgagggtagtgtggctaagaggaaatggatccagatgggcttgatggggagcagatgggcaggcacgatggcaggggtgcatcggctcactggggctgcatctgaggtaaatggaaataaaggaggtgaggaaatgaggaagagaaggaagtggcgggactggctgtggagttttgtgggagccttcttgatggaacaaaaaaaaa

SEQ ID NO: 24402 - DNA, 2545 bp, Homo Sapiens
ctggaatgtgagaaactcgccagtgagaagacagagatgcagcggcattatgtcatgtattatgaaatgtcctatgggttgaatatagaaatgcacaagcaggcagagattgtcaagaggctgaatgctatctgtgcacaagtcattcctttcctgtcccaagagcaccagcaacaagtggtgcaggctgtggaacgggccaagcaggtgaccatggcagaactgaacgccatcattgggcagcaacaactccaggcccagcatttatcacatggacatggtctccccgtacctctgactccacacccttcagggctccagccccctgccattccacccatcggtagcagtgccgggcttctggccctctccagtgctctaggaggtcagtcccatcttccaattaaagatgagaagaagcaccatgacaatgatcaccaaagagacagagactccatcaagagctcttcagtatccccatcagccagtttccgaggtgctgagaagcacagaaactccgcagactactcctcagagagcaaaaagcagaaaactgaagaaaaggaaattgcagctcgttatgacagcgatggtgagaaaagtgatgacaacttggtggttgacgtttccaatgaggatccatcttcccctcgagggagcccagcacattcccccagagagaatggcctagacaagacacgcctgctcaagaaagatgccccgattagtccagcctctattgcatcttccagcagtactccctcctccaaatccaaagaacttagccttaatgaaaaatctactactcccgtctcaaagtccaatacccctactccacgaactgatgcgcccaccccaggcagtaactctactcccggattgaggcctgtacctggaaaaccaccaggagttgaccctttggcctcaagcctaaggaccccaatggcagtaccttgtccatatccaactccatttgggattgtgccccatgctggaatgaacggagagctgaccagccccggagcggcctacgctgggctccacaacatctcccctcagatgagcgcagctgctgccgccgccgctgctgctgctgcctatgggagatcaccagtggtgggatttgatccacaccatcacatgcgtgtgccagcaatacctccaaacctgacaggcattccaggaggaaaaccagcatactccttccatgttagcgcagatggtcagatgcagcctgtcccttttccacccgacgccctcatcggacctggaatcccccggcatgctcgccagatcaacaccctcaaccacggggaggtggtgtgcgcggtgaccatcagcaaccccacgagacacgtgtacacgggtgggaagggctgcgtcaaggtctgggacatcagccacccaggcaataagagtcctgtctcccagctcgactgtctgaacagggataactacatccgttcctgcagattgctccctgatggtcgcaccctaattgttggaggggaagccagtactttgtccatttgggacctggcggctccaaccccacgcatcaaggcagagctgacatcctcggcccccgcctgctatgccctggccatcagccccgattccaaggtctgcttctcatgctgcagcgacggcaacatcgctgtgtgggatctgcacaaccagaccttggtgaggcaattccagggccacacagatggagccagctgtattgacatttctaatgatggcaccaagctctggacaggtggtttggacaacacggtcaggtcctgggacctgcgcgaggggcggcagctgcagcagcacgacttcacctcccagatcttttctctgggctactgcccaactggagagtggcttgcagtggggatggagaacagcaatgtggaagttttgcatgtcaccaagccagacaaataccaactacatcttcatgagagctgtgtgctgtcgctcaagtttgcccattgtggcaaatggtttgtaagcactggaaaggacaaccttctgaatgcctggagaacaccttatggggccagtatattccagtccaaagaatcctcatcggtgcttagctgtgacatctccgtggacgacaaatacattgtcactggctctggggataagaaggccacagtttatgaagttatttattaaagacaaatcttcatgcagactggacttctcctcctggtagcactttgctctgtcatcctttttgttcacccccatccccgcatctaaaaccaaggatttcagatactcattgcagttgtggagtttaatcccctttcttaacctcacttcccacttgctattgaattgtgaatagtcattaaaaacctgtgataccaaatcttcagctgtctacttggaagaacatggaataagcatacttaacagtgaaaagaatctttaattatgtattatatctgtaatatatttattttgtttaaagaaggctttctaacaatgactgactaaataaagctgtctgctcctgcattgacaaaaaaaaaaaaaaaaa

SEQ ID NO: 24403 - DNA, 855 bp, Homo Sapiens
gcagaagtcaaaagttttgcaaggaaaccgatgaggttgctgacctgagctgggcagggttgaacaggcgagtgccaagatcaaggtctctgattgtctctccttgaaaggtaagcagagaactagggctatcccataaattaagtgggagattggaaaggggtgcggacttctgtattggggagaaggtcttggatgaactggggcagagaactgccagagagagtacctaggaatacgttgttagcaggagaaagaccaagttcagatgcagacttgggaaagtaggtaacttgaccaaaggtagcaaaattagactacccaactggattgtgaatgcagtttatgaaatggatcaggacaggaacaaaaatagattttctagaaactgcagactcctgtgattggagcagtatacaaagtacagcaacatcagactagatctcacctgaggtgctgggtgagaaatcttagggaccagatggaagagggcctgtgtataaagacattaggaaggaggtttgggaaggtttgggagggcagcctgacttgtctccagagaaagttagaactggttgacttagcaaccaagggacactgggtcaaagacgaggaatcaggacgtcggtgcctagtgactgagcgccagcccagcccatttctctacattgccatgggctaaacccagtgtgctgtaaactcttcagttcctttggttatggattttgtatcttttctgtgtttcttaataaagttcttttgaaaaatgggaacctttctcagatgggaattttgtatctttcctctgtttcttaataaagttcttttgaaaaattggaaaaaaaaaaaaaaaaa

SEQ ID NO: 24404 - DNA, 2886 bp, Homo Sapiens
tgtttggtatatttaaagcagtgactgagtgtgtttgagtgagtggctgagtgcagtgtcttttgtttaaacacactgcctcgtgtctttgtagctgattcagagagtttgaattgtggggtgggagactaacttcagctccaggctgcagtaatgtgttggtagttacacttgaggcatttttttgttgttgttaattaactctatagtctcaaactatttttgcaaatatatcatttttcctaattggttcttgacgtgcagtggactggctctgtgaatgattggcagggtcttagttttgcgagagcatttccttctaagaattattgtgatctgcagaaacagccatttgattcaaaaatcatgtagaaaaggagtaggagaagcaaaacgtttcatttttgggccttaaccatttgaaatgtttggactttaaacataaagccatggagtttataaagccaagtaaccatttgatatggataataatatctactctagagagagtatatatatgcacattgatttttaatgctgttaagatacttttgtaaaactgtaggaacaagagtaattagaccaaattgaagcttaggggacagtaaagtggttgctttccatttagggtaaccatgcatgtggttagtcctctcctcctgagattcagaaccagttgactgtccccttaggtgtataaggagaaaagttgacatgtctgggacctctgacatgtgtacacatgcttgcacacatgcacacacagtgaatgttttaagttatacaaacataagaccttaagatgcaaagagccagaatattctaaagaggtgatgaacagagggggtggaaactgcatcacagatgttttccaagggccagggtggaatctgagctctagtgtctgactttgagatgcattatatttttaacacataaatgaggggatccatatcacattctttcttgtggaccaccaaattgaaggctttcttgtaattcacaagcagcagctctccagcatctctccgtagcctgggtgaagtcccagaagctggtgtgcatcattttccaaggtggcagagctgcttgctctgcagatcattcctttgagagaggagtacaagtgaagaaacaaggaggcacttcctgtaggagcactgatgtgccttgtccacactcccctctgagctttactggtaagagagctccgactgaacatgctgagcagttgagcacttttccatcagcaacaacagcgaggatggaaatggaaaggaaccgaactaaaatgcatttccctttgcagggcagagagctaagctcttaggaatagtgttatagaaataagcaccctaacttcaattcctgaaaatgttggttaatggagagaattttggagtttcacttaatattttcccatcggtcgccataaataagtcttcaggcgctcctagaagagtcccagcccaaggctcgattaaggaccacactgcaggtctgaggctcactgctctgagtcctgaacaccagagccctgcagagagtggtgataacacatcatctctgcaaagaggaacctctcccccggccgccacttcactcaggcttctactgagcagcaaggacagcctgggtttcaaatgccacttcccctgctttagggatccaggtgtcctgatagcgtgaccctgctgaggcaaggtatcaactccgagagtgactgagtcactgagcgtggcacatgaacaaacgtcatgacaaagattctctgagtgaagttaacaccacgtattttacctttgcaaaaaacaaactggcaccctgagttctaactacggacggacgatatctttgcctccacacccagattcctggaaatggctaacgtttcctttctaggggaagggtcgaggaatactcaagtgctagcttagcagctttgttcagtccagatcagagctgttaggtaaaggcctaaccacctccctgcagtctcttatatctcaagctttaggaacccatttctaaatgtacactagcggagaatttatattgtcagccttgattaccataggacaggcagaaaggcgataatttgtatcttttaatataaaagaagcttttaacttttccagcctattataataactgagttatattcactgtggctcaaactaattggcattgtggaacatttctttaccttcaaagttttctccaccaatcatttcagttctattgcagtcctggtgccatatgtcccctgcaaattgtgaaagtaattagtgacaaaatagcagcctgctccttttcaatggcgaaactgtcggcattagcagttttgggtaagctggcggtactataacacgtactggaaacctgttcctcatcaccacctaccagattctggaaatgccgtcttctagaaaacgatggcgtttgtggtggtcttcttttgaaaggaacagtaatttgtgtggatattgttaaagtgtttaaagaatattttgacaattaagtttacattttacaattgctttattttttattaaaatagttgtatataaatattaccctatttcactgttgttcaagtaaatctaaaccttgtagacaagtgagtcatctgatatgtatagaagctgtgatatatagagtacatttattgtgtaaatgtttatgaatataattgttcctgtgtttttataagttggggatattttgttgttttacggcaacaaaatttattgcatttaaatggtttttatgtaatagaaatcacgcaaaatagtgaaggatttaaaatatgtatatgatacatgtaaatgtacaaactttagaaagaaataaatccaacaaatttcaaaaaaaaaaaaaaaaaaa

SEQ ID NO: 24405 - DNA, 5960 bp, Homo Sapiens
cccagatgaagcaggaactgcagtacaaagaaaagggggtggagaccctgcaagagattgatcggaagatgtcaagtactcacaccagctacaaactggatgaggcgcaggctatcatgagtgagctccggaccatcaagaaggccatttgcacaggcgagaaggagaggcgggacctgatgcatagcctggccaagctgaccgatagcttcaagaacagctgctccgttaccgactctctagtggacttccctcaccatgtaggcgtgcctggcgatgctggtgtaccccagcagttctgcgatgccggctcccagactgatatcatcggggagtttgtctttgatgataaaacaagacttgtagaccgagtcagacttaattggcaatatgaagaagccagaaagagagtcgccaacatccagcagcagctggcccggcttgacaatgagtcctggccaagcacggccgaggctgacagggaccggctgcagctcatcaaggagaaggaggccctgctgcaggagcttcagctcatcattgcacagcgccgctctgcgggagatgtggcccggctggaggaggagcgggagcgcctagaggaggagctgcggcgtgcacgggccacctccgcacagggcgccacggagaggattctgcttcaggaaaaaaggaattgtctacttatgcagctggaagaagccacccgcttaacatcctacctccagtcccagttaaaaagcctgtgtgccagcaccctgacggtgtcctcggggagcagccgcgggtccctagcctccagccgtgggtctctggcctccagccggggctccctgagctcggtcagcttcacggacatctacggcctcccgcagtacgagaagcccgacgctgagggcagccagcttctacgcttcgacctcattcccttcgactctctggggcgagatgctcccttttcagagcccccaggcccctcgggcttccacaagcagaggcggtccctggacacgccccagtccctggcatcgctgtcctcccgctcctcgctgtcctcgctgtcgcccccaagctcgcccctggacacgcccttcctccctgcctcacgggactcgccgctggcgcagctggcggacagctgtgaggggccaggcctgggcgccctagacagactgcgggcacacgcctcggctatgggggacgaagacttaccaggcatggcggcccttcagccacacggggtccccggggacggggaagggccgcacgagcgaggacccccaccagccagcgctcccgtgggtggaaaagtgctcactcagtgactcttcgagaagacagtgccaagaggttggagaggagggcacgccgcatctccgcatgtctgtcggattattcgctagccagcgacagtggggtgtttgaacctctaaccaaaaggaacgaagatgccgaggagcctgcctacggagacacggccagtaacggagatccccagatccacgtgggactcctgcgcgacagtggcagcgagtgtctcctcgtgcacgtgctgcagctgaagaacccggcggggctggcggtgaaggaagactgcaaagtccacatccgagtctatttgcccccactggactcgggcacgcccaacacttactgctccaaggctctggagttccaagtgccgctggtgtttaacgaagtgttcagaatccccgtgcattccagcgcgttgacactgaagtcacttcagttatacgtgtgttcagtgactccgcagctgcaggaagaactgctgggcattgctcagattaacctggctgactatgacagtttgagtgagatgcagctgcgctggcattccgtgcaggtgttcaccagctctgaaccatcaaggacgcgggaggctgggtgtgcaggagagagctccgcccgggaccctgcacacaccatctccatctccggcaagacggatgcggtgacggtgctcctggccagaaccacggcacagctgcaggcggtggagagggaactggccgaggagcgggccaagctggagtacacggaggaggaggtcctggagatggagcgcaaggaggagcaggccgaggccatatccgagcggagttggcaagcggactcggtggatagcggctgtatcaactgcacccagaccagccctccgtacccagagccctgttgcatgggtatcgactccatcctgggccacccatttgctgctcaggcagggccttacagccccgagaaatttcagccctcgcctcttaaggttgataaggaaaccaacacggaagatctctttctggaagaagcagccagcctcgtgaaggagcggcccagccgccgggcccgagggtcgccttttgttcggagtggcacgattgtccgttcccagacattctcgcctggagcacgaagccagtatgtttgcagactttatcgtagtgacagcgacagttcaacgctgccccggaagtccccctttgtccgaaatactttggaaagacgaacccttcgctataagcagtcatgcaggtcttccctggctgagctcatggcccgcacctccctggacttggagctggatctccaggcgtcgagaacacggcagaggcagctgaatgaggagctctgcgccctccgtgagctgcggcagcggttggaggacgcccagctccgtggccagactgacctcccaccctgggtgcttcgggacgagcggctccgtggcctgctgcgggaggccgagcggcagacaagacagaccaaacttgactaccgtcatgagcaggcggctgagaagatgctgaagaaggcctccaaggagatctaccagctgcgtgggcagagccacaaagagcccatccaagtgcagacctttagggagaagatagcattcttcacaaggccaaggatcaacatacctcctctcccagccgacgacgtctgatggagtgcattgtgcacatgaagtatttatccacctgttttattttcatgaagttcttagactagctgaatttgtctttaaaatatttgtgcaaagctattaatatacacattttgtaaaaaaaaaaaaaaaaacacgtatatctatacatatatattttataatagtgacggcaacagggcttggtttttccttgttgtgaaatcgacatctctgaagacaggttattttataaaagatcaactatcatgttaagaatgtacagtttttatgctgttttatttgacttaaaggctggaagacagaaacgaagtgagttcaggcaaattcactgtattgtaatttatttatagtacttttttttccttgaaggaaaatactgactttaagatgtattttaagactgaaattttgttctttagtacttttcatgcagtagaacggaacttggggctggtttggtttttgacacctgaaatgcgaacgctatgtgctaaatttgtcaccgtatcatatgtgcatttaccatgtatattgtacacattcactcccttgatgtcatgttaaaatgtcccctgcagtggttcaatcgtgactcggaagcatgtgtgtgttgcagaggtcagtctctggcgtgggccgcacgccaaccgctcatttctgtgttgcctttggaagcatctttctgtgctcagcgtgagtctgaagcaggcgccagggcctctggtgtacggggcttcagcctgcttgcttgtggtggctgtctgtggggcttcagcctgactgtccgtggtggctgtccatgctgcccgcctccccccaccccgccctgtccgactgtaacagaccaggagggtggcggaggaactcctgccacgccactgtgtcatgaaggaaagtgaaagggaacgaggaagtaggaatgcccacgctcgttgactccgtgggtgaatacagcagttaggacatacacaccatcacctttgaaagtgcttgtttgggggagggaaggacatacgggtaactagaactacccagcgagtcgtccagaggagaggatcaggtttgagtcaggaggctccctgtactggagtcgtcccactattcctcaagaaatcttagaaccagcttgtgaggaaaaacattttttaatgtaataaaaatatgccattattctttgaaatgccaaatgatataaatattttgcctaatacatatttattgtagatgaaatgcactcttctcgatgaggcctcgatttgaatcaatggggtgggccacaggaaatgtcagaggaaccagaactcagaactcttcctcctggacctttcttcccttcccttggaggtatccctttgaatcaggcctctctcttctcatcagtctgtagcttccccccttgtataacctgctttcctttttacatttatcaaaagtggattttgtaaaagcatttcattgacacgcgacctatcacagacaatggaattcgtcagtggtggtaagactgaaatcctgatgcttttcacacttcttgtctcttgctatgtatttctgcctctagccttgccatgttttgcctttttttttctttttggccaattcctttttatatgtgcccacaacagaggtggggagacacggagcaccctgggtccttcccagcgctgctgggcaggccccgtctccaggccccagctgttgaaactttgaagggcaacaaacaaccatccacactgccggaccctaggctgttcagggaggcagctcatttccaccccggccccaggacacccagcctgtgccccacaaggatctctctaaatgggagggattgaggctacttttctgccaagccctattaagtagtaatgtggggaaacccactgtgtcagtgcaggaagccctagacaaatgttttcaaataaatttcactgcccagcctgcacagatttccatttgaagtacttcccatccaccctgacacccaaaggggtttttttgttttgttttgtttttgagacagggtcttgctttgttgcccaggctggagtgcagtgacgtggtcatagctcactgcagcctcaacctcctgggctcaagtgaccctcctgcctcagcctcccaaagttctgagatgataggcatgagccattgtgcctagcctattttgatttttttcttagagtcaaggtcttgctctgttgcccaggctgatcttggacttgcgagccaccatgcctggctgggttttttaaaaatagaatctcactgatagcctgcaagaaacagatgcagtgcctgcttccgtatcagtccaaggagccctcgtgtttgccacctttacctttgaacctccccctgcctccctgcctgtgtccgcttttgcagctcaatgcagccatgacaaggaaagaaaagacaaaggaaggccagagagccgcgcagttctctgcaggtgcagatgcaggcagtggaggtggcctgagcaggcagaaggacaccaagcgccctatgttgcttgtcattcatgacgtggtcttggagcttctgactagttcagactgccacgccaaccccagaaaataccccacatgccagaaaagtgaagtcctaggtgtttccatctatgtttcaatctgtccatctaccaggcctcgcgataaaaacaaaacaaaaaaacgctgccaggttttagaagcagttctggtctcaaaaccatcaggatcctgccaccagggttcttttgaaatagtaccacatgtaaaagggaatttggctttcacttcatctaatcactgaattgtcaggctttgattgataattgtagaaataagtagccttctgttgtgggaataagttataatcagtattcatctctttgttttttgtcactcttttctctctaattgtgtcatttgtactgtttgaaaaatatttcttctataaaattaaactaacctgccttaaaagaaaaaaaaaaaaaaaaaaa

SEQ ID NO: 24406 - DNA, 4156 bp, Homo Sapiens
gatggcggcgcgtccgtcgcgagcgaccgggccgaggggaggccagcgaagccgagtaaaaccgccgcccgggagaagactgaaggagcagttgccgccgttggcggcgccccgagcagttttcgctgctgctacggctgttgccatgaggcgaggctagggaggacctcacttccccggggtgtaataatgttaactgaggccagtctatccatatggggatggggaagccttggcattgtcctttttctgataacctttggaccctttgtaatattttatttgacattttatatcctctgctttgtgggtgggggtttagtggttactctcctgtttggaaaaacaaactcagagaagtacctagaacagtgtgaacactcatttcttcctccaacatcacctggggttcctaagtgcttagaagaaatgaaacgggaagccaggactattaagattgatagaagattgacgggtgccaatataattgatgaacctctccagcaagttatccagttttccttgagggattatgtccagtattggtattatacactaagcgatgatgaatcttttcttcttgaaattaggcagactcttcaaaacgcactcattcagtttgctactagagtctcgccctgtcgcccaggctggagtacaatggcgcaatctcggctcactgcaacctccgcttcctggaaccctgttttgtttaacaaaaccttggtctcactgtgtctcctagaatatgtaatttaaattctggctctgaaattacagggaattgtggtagtgatttgagaaccctttcagttctaaaatagtaagattctctggtcaggttgttactaatcttgatttcttttcaatcatgtttcctcccaaaacacacactaacatactccatcacactccacattttgaataccatttggggagttatttttttttaagtatataggattgctaattagagttaatttactttgggattaaagtactcttcatatctattgttttattagtaggggtcttatagtaggataacaaaatttatttaaaccttttaatatatttctaaatgatcagaaagaatgcttgattctaaacataaaatacatttactaatctcttctcgatgattaaaacccttgtatcaatgaaataaaaagtttttgtacaaccagactattgctgttctttatagaatgctgaaaacaataaatctgtagtgttatgagtttgattttttttaagttttctgaagtgtaagttctcccaccacgttcagttttaagctatcagcatgaagtcactgaacatggaaataggaagagatgtacacaattgtttgcctactccagctcacagttggagaggatacagctaagtgaagagggggcagaggcagatttgtaaacctgaagtaatgagttgtatttccttgtgtggttgctaatttagctcctatgaaagaattccccgtatatttttgaggactatggtagggggtactcatacattaactttaagttcaggaatgtttgtgaagaaggtcaaattagtttcattattttaatcaatactgacaactaaatccttaaagtggatgataaaaggagactctggagagatggttatggtaacatgtagtatttatgactgaattgacgtaggggggattgatttagtggattcaaaatgaagcttacaattctgtgcctttacaattttacccaaattcaatttcagcctgtgtttttgacaccgttcacaaggtagttcttcaaggactctgaaggatggaaacaagtaaaggattatgtatttagagtgaagagtagtatatcctttctaatagtgaattaagagggggacttagtatctgattcagagactcaggagaaggaatttttttctttcacagataagccactcagttgctttctctcaacaaaaaaaagtctgagtcagttgatcaaaaggccttctaatggagtaaaacttttctcaaaatctactcaaagttacttgtcaaaaatctacccaagaaaactaggaattctattttaatgatttttcaaaaatttctatttttttacatagaagataaagaccttttgttgaagattaatacatattattataattttatgtgattggttattatattgatcttattaacatacctttaaaaaggccaactcttaacgtgcgtgtgtgtgtgtgtgtttgtgtatgtgtatatgtatataccttttcccttgagattcctttcagttctaaaatactaagattctatggacctctgtgtgtgtgtgtgtgtgtgtgtgttgtacatatagtgtctatgtatacctacacattatgcagtatatagtatactctaccattcttactgtttttaaaaaaggtcttcgtagtcatttctctgaaaaactaatgtggcatcaggagcataacatttattataggattgttttctgtggaaaaagcagcttttacttttatcattttgacataaggcaccttttccaggaaaatattctgccatgaatgtgaagatcgcctttactgccaagcgatcaccctctcctctagtcaggcaagtctacaagatgacccttgcatatatatttatcatgctcatccccctcttctgctcattcctgtgtcctttcttctcccatataaatactgctctttcatcaagatttaagtgtagcctctttaatgaagcctctttaaattatgacatattccttaatctatagtctttgtgtgtgtggttctcgtcaacaaaattttaagctgattttgaaatggttcctattctgtgctattgcagtgaaagttctcttaactgatgtttggttagccagtgctctccattccctttgtatgctgtactgactgataaccttagcattaagactaggctctattacatctatccacttctgtttccacccttggagttgtatgcttatcaaaagtcagttgtgtgatacctggaccccacctccagaaaatctgatacaattagtctgtagtgtgacctgaatattggtgatttagaggagacagataatcaaacacgttgaaataaaagttgtatttgtttttgagcctaaatatcccagttacactttttatgataatcaggtcgtttaattaacagtcaacttagattgaagaaatatgaatatgacaaggtagtttctatgaaaaccaagtcacttgctttggaattactcgcagctggttgaagagtgtaattgaattaagtgagcgaaaggcagctatgaaatttgaaagtcttcaaggactctgcatgcagatttgttcacaaatgtctttattgccatgccattttaaagaaactggaaaccataggttttgcagtgtaggaacagttcatagttttttcaagacccaggtcatgttaataccactcagcagagccttaaccaaagaaaaagtcttattcctacacaggaagatttatataattgaacttaaagtgaaatatattcatggctccctcttttgatcgaatgtttaaatttacctactgcccaattaccagttttttatacactccatccctgtgtatgtatatgtgtggttttatgtagctaatataatcatagactcaaagatgtaatgagtgttgttagagaaaacaaactttgggaaatgatgtgacttgctgaatttcatagactggcactgatgcctttgatttgagtaaaagacccatcatttgggggagtcttttgttagaatcaaaggcatctgtgtcagtccagtgcgttttccagaaatacttgattttggtagtgttttgtgctactgatgatgagctgtacactgcttagaatagatggaacaagtgaggcaatttacaatcctaaactcaaccacatatttgggcctttacttgcctttttaagggattggcattaagtagccatgggacaaaaagagcttctcagtacatattctactttaacactttaaggagtaaggaagcaattgttgtttgtgcctcctgttgccattgtccaaacacccattgtaaacagtgctccgaccctgaaaaaggaatcaataaatcaatatgcattgagtgcctctaaaaaagaaaaaaaaa

SEQ ID NO: 24407 - DNA, 3563 bp, Homo Sapiens
atcgagcttcagattgtttactatttaagatgtacttttacaaaggaacaaagaagggaaaaggtatttttgtttttgttgtttggtctgttatcatcaataacctgttcatatgccaattcagagaggtggactccaggttcaggagggagaagagcaaagccgcttcctctctgtgctttgaaacttcacaccctcacggtggcagctgtgtatggaccagtgccctccgcagacagctcacaaaaccagttgaggtgcactaaagggacatgaggtagaatggatgcttccatcacagtaccatcattcagaataactcttccaatttctgctttcagacatgctgcaggtcctcatctgaactgttgggttcgtttttttttttttttttcctgctccaagaaagtgacttcaaaaataactgatcaggatagattattttattttactttttaacactccttctccccttttcccactgaaccaaaaagaaatcccatccctaaaacctgccttctccttttatgcaaaactgaaaatggcaatacattattatagccataatggtatagatagtgattgcgtttggctatgtgttgttttctttttttttaaattatgaatatgtgtaaaatctgaggtaacttgctaacgtgaatggtcatataactttaaagatatatttataattatttaatgacatttggacccttgaaacatttcttagtgtattgatatgttgacttcggtctctaaagtgctctttattaaataacaaatttcttcagtggtctagagccatatctgaaatattgctaagcaatttcagttcatccaggcacaatgtgattttaaaaatacttccatctccaatatttagatatagattgttttgtgatgtatgaggaatgtatgttagtcttccagatctttgaatgcctctaacacagctttgccttctaaagcggtaattagggatttaaaaaacaacctttagccctttatcagcatgaaatgcttgagtgatgtggttttctaatttctttggggtaattatgactcttgtcatattaaaaagacaagcacaagtaaatcattgaactacagaaaaatgttctgtggtttcatagttaagcaaaactctaaatcgccaggcttcatagcaaagacatagtcagctaaaagccgcacatgtggatagagggttcaattatgagacacctagtacaggagagcaaaattgcaccagagattcttaaccaaccagccttaccaaacaacacaacaggggaaccccaatctgccttacccaaggccccactggcagctttccacagaatttgcatttagaggagcagaatgacatcactgtcctttgggagtaggtcctctgaaaaggcagcaggttccagcaggtagctgagctgagaggacatatggcccacggggacctacagacagcctttgacatttgtatttcttacaatggagggccaaggagggcaaggggctgtggagtttggtgtctactagtgtgtatgaatttgagctagagtccttctgtggcatgcactttgaccactcctggcagtcacatggcagatttccaagtgcaaatccttaatccaaacaaggatcatctaatgacaccaccaggccaatccctgctctcctccccgaaaagtcagggtcccttcattggaatcctccacccacccaagcagaatttagcagagatttgccttcaaaccctaacggcccccttgttctctggtccttctcaaacccacctttgtaggccacccagcattgcaggacagcgtgtggggcagctggacctgtgcttcctgcctgggagtctcccttggaattcatcctgactccttctaataaaaatggatgggaaagcaaaacactttgccttctaaaggccgtataccaagtatgcttagataaataagccacttttctattacttaagtaagaaggaagtagtaattgatactatttattgtttgtgtgtggtagcttgaagcacaccactgtccatttatttgtaagtgtaaaatatgtgtgtttgtttcagcagcacttaaaaaagccagtgtctggttacacatttcaattttaattaattgacataaaaatgctaccgccagtgccagctgcatcctatttaattaaaaaggtactatatttgtacattattttttaatgttaaaagggcttttttaagtttacagtacacataccgagtgactttagggatgcttttgtgttgaaatgttactatagtggctgcaggcagcaacccagaaacactttagaagctttttttccttgggaaaaattcaagcacttcttccctccaccctcactccaaccaccccaatgggggtaattcacatttcttagaacaaattctgcccttttttggtctagggattaaaattttgtttttctttctttctttttttttttttttcactgaacccttaatttgcactgggtcatgtgtttgatttgtgatttcaagaccaaagcaaagtcttactactactgtggaaccatgtactagttcctgggaattaaaatagcgtggttctctttgtagcacaaacattgctggaatttgcagtcttttcaatgcagccacatttttatccatttcagttgtctcacaaattttaacccatatcagagttccagaacaggtaccacagctttggttttagattagtggaataacattcagcccagaactgagaaactcaacagattaactatcgtttgctctttagacggtctcactgcctctcacttgccagagccctttcaaaatgagcagagaagtccacaccattagggaccatctgtgataaattcagaagggaggagatgtgtgtacagctttaaggattccctcaattccgaggaaagggactggcccagaatccaggttaatacatggaaacacgaagcattagcaaaagtaataattatacctatggtatttgaaagaacaataataaaagacacttcttccaaaccttgaatttgttgtttttagaaaacgaatgcatttaaaaatattttctatgtgagaattttttagatgtgtgtttacttcatgtttacaaataactgtttgctttttaatgcagtactttgaaatatatcagccaaaaccataacttacaataatttcttaggtattctgaataaaattccatttcttttggatatgctttaccattcttaggtttctgtggaacaaaaatatttgtagcattttgtgtaaatacaagctttcatttttattttttccaattgctattgcccaagaattgctttccatgcacatattgtaaaaattccgctttgtgccacaggtcatgattgtggatgagtttactcttaacttcaaagggactatttgtattgtatgttgcaactgtaaattgaattatttggcatttttctcatgattgtaatattaatttgaagtttgaatttaattttcaataaaatggcttttttggttttgaaaaaaaaaaaaa

SEQ ID NO: 24408 - DNA, 1814 bp, Homo Sapiens
agcctgtggagtacctcaacaaccccatcatcacccagttcttccccaccctgctgctgtggtgcttctcggccctccttcccaccatcgtctactactcagccttctttgaagcccactggacacgctctggggagaacaggacaaccatgcacaagtgctacactttcctcatcttcatggtgctgctcctaccctcgctgggactgagcagcctggacctcttcttccgctggctctttgataagaaattcttggctgaggcagctattcggtttgagtgtgtgttcctgcccgacaacggcgccttcttcgtgaactacgtcattgcctcagcctttatcggcaacgccatggacctgctgcgcatcccaggcctgctcatgtacatgatccggctctgcctggcgcgctcggccgccgagaggcgcaacgtgaagcggcatcaggcctacgagttccagtttggcgcagcctacgcctggatgatgtgcgtcttcacggtggtcatgacctacagtatcacctgccccatcatcgtgcccttcgggctcatgtacatgctgctgaagcacctggtagacaggtacaatctctactacgcctacctgccggccaagctggacaagaagatccactcgggggctgtgaaccaggtggtggccgcgcccatcctctgcctcttctggctgctcttcttttccaccatgcgcacggggttcctagctcccacgtctatgttcacatttgtggtcctggtcatcaccatcgtcatctgtctctgccacgtctgctttggacacttcaaatacctcagtgcccacaactacaagattgagcacacggagacagatactgtggaccccagaagcaatggacggccccccactgctgctgctgtccccaaatctgcgaaatacatcgctcaggtgctgcaggactcagaggtggacggggatggggatggggctcctgggagctcaggggatgagcccccatcatcctcatcccaagatgaggagttgctgatgccacccgacgccctcacggacacagacttccagtcttgcgaggacagcctcatagagaatgagattcaccagtaaggggagggaggggccctggaggccacatcctgccccaccccacccccactcccacggacactaaaacgctaataatttattagatctaaagccccttcctccccagcccctgctttcattaaggtatttaaacttgggggtttcactgctctcccccatgatggagggagggagccccccaacctcagtgaggagagccccgagccggccccggggcaaagaggggtgcagagggagttcccccagatcagtaccccccacccctccccagctagtagcatgaccaggagagggttaatgagagccaagaggagtacctggtgcacctggtgccggtggctggagacctggggggcaggtggatctggggctgttcccccccctccgttttttccaccccacagttcctcctgggatctggccctccagggaagtggagcctccagcccctaggggatgcatgaggggggagggggtgctgagtgggaggaagagtcaggctcacagctggggtggcctgggggtgggggtgggcaaggctgacactggaaaatgggtttttgcactgttttttttttggtttttttgttcttttttgttttttttcctttaaaataaaaacaaagaaaagctcaaaaaaaaaaaaaaaaaaaaaaaaaaaaaaaaaaaaaaaaaaaaaaaaaaaaaaaaaaaaaaaaaaaaaaaaag

SEQ ID NO: 24409 - DNA, 2305 bp, Homo Sapiens
gttgcctaggtagtcacaagagatcagagggagtcactgtcttttccatgctgagcactcatgtgcccctccctgccctcggtcacatattggaagagtggaagaggcagccactgtggttctaactctgcggctttatctttttggactgtctgaaactcttattcagcatgagttttactgtctcttgtttctgtcactgagggaggtggcatgccatccagcccttcctggcatccagtggctctctcatactgcttgatgtggcttgtctgggagccatggggtttcttctgcctacctaagtaggaaagcttctggccacactatgtccacttgacatgaaggatttccctagataaggccttcccaacctgtgtttacagggacttaacacaaaaacatgtgaaagtaattattctgtgagaaaaaaatatctcttgaaagagtaacttttccgctgcattttgttagctggtgagactgcaaggtatctgaaccgtgtgccctggtacccacccctgtctctggacttctttatgaacactgagtatttgactccccacccttcatggtcagctccttttaacaccctagatatcattgctgtccttttcattgacatgctagagacatttccaattttcatgggagtcagtaagatagagatgatgaaaattcagagtgttcaaagaaagaggaggcctcatcagttgatagaatatacaacagattgtctaatctcagttttcttcacttttctacccattacagtggaaaaaagaacccttaaggaagccagtgcttctcaacattggttacaaaaccatcagtgccagcacttaatttaaaatcttctgaaaatccatcagttggttttcatgtctcactctaaactcagctccaaccaggctgcttcctagattcttgtctgtgtgtgtttctgttttggctctttgttacttccttctgtaaacttaagtaaactcagtttgttgacctagtgaattgattctttccattttctatactattcaccagcatatcaaagatgcttcttcctaactctgatttccagagtaactgtgctatcagcttttcatactaagaactaggtttttaccttttcacatttcttgcctcctacccagttcgtaagccaaattagactcctactcttgtgaagtgccctttagatactagtgtaaaatatactgcgtaattctccattgccctacatatattaaccctttaagaaaatatatcaccagtctattttatcttcgcagaacttgcccaggtatgagccagcatttattaccactcattctagaaggtgccagttaggtagctatccaggtttacattttaaggcagtcgagaccttattcacgtggtatataaacaaccacatttctcttttatatggaacaagacttttcatttgcggctggccttctcactagcttatgctttttttttttaagacctttcttagcactcgctgaactcctccccctcacaatcaatctcagcaactcagcagagtcgcttcagttcacagctcttaatccttcactccagactaaagctaatcttatgtcctcaaacagctacaactcactgttatcacagttccgactgcagagactccatttaagaggaaatttaaaaaataaacaatgctctatttctgtccacatcaaaggtacctctaacagaaacttgtctttgcttctgtctctctgctactggactctcagctcaaggtaatgtaagatgatctcatagatgcactttagcctcttgatgttagcagttgagtcctccctgcgcacaaaatacatttgtggtaatgaatgcccagaatctcactggcacacccaagagtagttaaactaaaattgctactaacacaacattgtagaattcgttgccttaatggatgtgatcttctaggcttactgtgtcttaacaagcagtcttatatatatttatcttgcccagaaagtacacttgtagaatttaacatttgctcctttctccaaacagattaaaggttatgcagctgattgattctgtgtcccattttaaaggtccaggctatcccctagatttagattagttcctaaaaaatcttccagtctgaatcctgacaaatggatagctaaattaatttccactcctcttctctcttgcactgtttggtacattacagccaccattagccttaaaagctgcagcagccaaattcggtgacagtaacataaagcctgagcttaaaaaagaaaaaaaaaaaaaaaaa

SEQ ID NO: 24410 - DNA, 2522 bp, Homo Sapiens
gcagagcggagggctgctggtggtcagcaaaggtgggtcgagggaggggcctcggccactgcctcaaggagggccttgctgaacttggtggcccagcccaggccctctctctggcttgtcagtctcatcacagcccctccgccgcaatgtggcctggttctgcgtgtctgctgggctgagtggggctgtggcagaacagctcactcatctgggtagccgggtgggggatatggctggccagggctgccctaccctccctcctcctggtacgtggctgtgaggtgcaggcggcctccggggtgccgtgactgcctgcccgctgctacaggtggtgataaagtgctcctgcatttcgtccagaagtccccaggcgactacgtccccaaggagcacatcctgcaggtcctgggcatctctgcggaggtctgtgccagcgacccgcctcagtgtgacagagaggtgtgagggaggcgaaggccctggcctccgaggatctgggtggcgtctgctgccctaggtgtgctggaagtccacttggaagaactgttccggaggcgctgggtcgggatgccgaacctctcctgatccgccggcagcaacgagccattaaaactgcagttcctgaccacgcactgcttcgcaggctccgagccctgcatcctccacagcccccgccttgctcactgttgggccctcagggcgggcagggtggctgtgagtcccaggtgtcatcttcctgctctgcgactttctctggagaccttgggcctttggcctgtggggcactggggatggtaacctcactgccccgtcactcccttcaaaggcgacagacccaagcccacgtcaggagaggagcgtggggtcagctccagcagggtcggggtcagtgcctgtgtctggtgggggccactcaggagagttgggttttcagggcagagatgggcttgattccacctggtggggtgggtggaccctggagactctcaggtgatgggccagcctgccccaaggctctttactgatgtcagaatcattgtttgcacctgctgggtatggcctttggggcggccggcccgggagggtcttagtctaattaggtgtgtccagcttcttggccacctttccctggggaccctaacaggcccagagcagagccccttacctcccaggtcagactacctgctcaggccctcccctcccatgcaggccgatgacaactgcagccctctctgcactccctagtccagacctggggaccactgtgggttcctgtgggtctcccggctcccttcctgcccccaatgccacccttgcagtggccatttaaaaatgcatagcaggtgacccactgcgtccctttgcgttcagcccctcctctggctttcagttacaccaagctaaaatttcaggttcccagctgcagctctctgggtcccccggtgccccagtggggctccccgcatctgaatgtgtggtccctgggggtgggcacttgggggcatcctggtcactgctggccctagcattggaccctaggagacctgactggaactggctccctccccatcagctcccagctgtcactctctcccacccccgggcagctgttttgcccaagaccactgctacctgtttacccaccctggtccctcccagacaagcaaggcctctgatttctttgaagcatttacttagctcaagtctgaagctgtagatactggaagacaatgcaccttggagggtgggcaggacacagttgattgtctctacagagctgtgacgggggcactgagccccgcgggtgtctgtggagggggctccggtccaggtactgcactggacactgctcatccctgggtgtcaggcaggtggctgcaccctaggccaggcgcagaggcctggcaggcaggcttggcatggttggccggggcgggacgtacactgggtcgccgctagctgcaccttcgcacagatgcctccgagcagcgggtgggcgtgggccgcacagcgcggcagggccttggctaccacacgcggcatcgctccttggggtgcatgggggtgccccgggcacagtggaacgtgtctgcgaaggcggccaggttctgcagcgaccccagtaccctgtgggtgggtgggtgtgacagcaggagcattgccatcttggacaaacatggccattttaagttctccgtgattaaaaaccagcccaaaacatcagcctaatggctcatgtcagtatgagcagaaacatttcaaccatgagataaacccccatctgaccagaaacatgccaatcctgagaataacctcccctccagccagagatattccaactctgcaataaaactctccttcacacagaaacattcgcagcctgcggtaggctcccccttcctaaacccttaaatgcccttagtctgtaagagaatgtccctgaccgaaatcggccagaagcccctctcaggtttattcccaaaataaacctgtctctgttgagccaaaaaaaaaaaaaaaaa

SEQ ID NO: 24411 - DNA, 2278 bp, Homo Sapiens
ggggaagatggagtatcccgcgccggccacggtgcaggccgcggacggcggagcggccgggccttacagcagctcggagttgctggagggccaggagccggacggggtgcgctttgaccgcgagagggcgcgccgcctgtgggaagccgtgtccggtgcccagccggtgggtagagaggaagtggagcacatgatccagaagaaccaatgtctcttcaccaacacccagtgtaaggtttgctgcgccttgcttatttctgagtcccagaagctggcacattaccagagcaaaaaacatgccaacaaagtgaagagatacctagcaatccatggaatggagacattaaagggggaaacgaagaagctagactcagatcagaagagcagcagaagcaaagacaagaaccagtgctgccccatctgtaacatgaccttttcctcccctgtcgtggcccagtcgtactacctggggaagacccacgcaaagaacttaaagctgaagcagcagtccactaaggtggaagccttgcaccagaatagagagatgatagacccagacaagttctgcagcctctgccatgcaactttcaacgaccctgtcatggctcaacaacattatgtgggcaagaaacacagaaaacaggagaccaagctcaaactaatggcacgctatgggcggctggcggaccctgctgtcactgactttccagctggaaagggctacccctgcaaaacatgtaagatagtgctgaactccatagaacagtaccaagctcatgtcagcggcttcaaacacaagaaccagtcaccaaaaacagtggcatcatccctgggccagattccaatgcaaaggcaacccattcagaaagactcaaccaccttggaagactagaggtgattctgcccagcatcccatattgggccagccatgagccagcttcccgtgactgctcagcccttggctccctcttgctcgttgttctcaccaggaaagtacacgggcctgaggcaggattgggccacagacagcctctcattggtccgggctaattcactcctgctgctcccctttggcaggggtcctgtaggtcatgacaggggaggcaagggtattgagagactcggggtctcgcggggtggtagtttggagggtggctttccccatttcccaacccctctgggccttaggtgctgaggcccctgccacctgtctttcctctaaaggtcagttttgggccagttcttgcaactaaagagcagagatctctctgggccctagacatttccagcaaaacctggaactttcatgccaaacctggggcagggcaggaaacagaggaaatggctgcaacatgggagcttggagctaatacgacactctgccttcccccagaaggtgcaggctttcctgagtcttagaccagatatggccagttgcgcaggtttctgccaactgtgaagtatcctcctggagcagtgacacaatcttggcggagcattgctacccccgctgccccctccacagttcctgaatggtgctaaggatctgcagcagttggcaacgagctggggctgggggcggcctccatgtccactgagatcataggacactccaatggggatgggacctttcccctcctccatcagaggtgctctgaccctaggttacacgggaaagtgccccacatgcaagtctccctgagggttctgcccctaaaggcagactgcctcatgcccgctagctgtgaggttcattgctaccctcggccctactagccctctcttcccccttgtgcagcggaccacttgcccagtttgctgtggtgctagccttccccatcatccaccgggtgatttctgggtcccagggaaagaaagagagagctgatgcaggtttctacagtgaggaacaggcgtttcccaggccccacacccagatttctctatctttgctgtgttttatggcctgggactgagtccacacggatagatttttccttgtaaccttgagacgagaattccaaggagtgtcaccatcagaggcttctcttcattgtgtcaaagaagcccctagctgctctcgtggcctccttcccccactccctatcccttcacctgtgaaatgcctttgctttgcatattgtgtgtggatgtgtgtgtgtgtgtgtgtgtgtttgtgtgtatgtgtgtgcttctgtgtgtgcctaatgctctgtctcttggtcactgaagcatccaaataaagaatttccctcatgggccaaaaaaaaaaaaaaaa

SEQ ID NO: 24412 - DNA, 2976 bp, Homo Sapiens
agcagcccaggggccttcctgcctggacgcaggaccacggagacctgcatgtgcagggaggcctggcagcctgccgatgggggtccccgagccccggagtctcctcgaaacccctgctgtgggtcacagcatggaccagcaggggtcaccatcctgagtacccccgacatccctgccccttgacctgtggcagatgctcctgccctggcctccaggaagtcagctcttttgcaaagggcttgtgtgagaggtcggagaaagccctgggcctccagggagatgcagctggcaggaggtgggctgagctgctccggggctaggggtggcccattgctggcagaatttaaggaaagagcaggttgtaggcacagaggatgggcagccaggcctgggccttccccttactgtcccagggcagcagagctagggtcctcttttaccctccctaaggtcacccccttcccatctacacgtccctccccaagttcaagcacatagtcaatcatgaccactcaggagctcagtgagctggggccatgtccctgtggcctccagcccatccgcaggagggtcccttgcagtgacagcacaaagagtcccccacaggaagcccctgagggccagcatggaccttgagagccaggagggaatgggcctggtgccactctgttcccactcccacctaagattcctacccctgtgttctagcaggtgactcttgatctggccagcccacaacaaatacttgaactaggcagcatggggtggtggaggcctgcagaggccctgggcccaggaactgagactagggctttctcatgaggcctgatcaagctcccgcaggtatgacctggcctcctcgcctcgggctgccttaaagcaccgctaacccacgccaaggggctaggcagggcttcgcggggcctggcccaaggtctccagcagagcaataacatcttcccaggttgggttgccacagacaccctgccctggagcccccagcccatcccatctggtgctaccctgtctgcctggcagcctagcctcacccctcctgtccggtcatctgggggtccttggtaaggatgcagccacatggggccggtttatgcacctgggcgagaacctgactggggcaggggatgctcaggggcctgcaggtctcccacagagctgcttttctgcccgcctcaccctgtgggtttgtatttcttgccgggtcaaaataggcagtgactcgtgccttccctcctcagggccggcggcagggtgtggacccagctggccgctggaccgtccccttcctcattctccaagctcatcaacaggtctcagaggaacatttccataaaaggtgtggcctggcatgcagtgctgtctgcacgctgtcgcttcccccacagcaacctgccggtcagccttaactggtgtggaggtcgaggtggggagggggaggcgggcttccctccctggtgtctggcctctttttgctcagccctcagcacagccttcagcgtggagagcgagaccctgcgtgtcactggggcttggctgaggtctccctgcaggataacagtgacttcaggaacccagaccccagtctgggcggctctaccttcccggctggcccagcccccacaccacagttccctgccacctccaggcacaaaagcctctgaggccacagcccagctatgaagctgagtggctttgtgcggtctcctagggaaggggcagtgatgccatgcatgagatccgctgtgccataagaagttgcttcctttagaatttctggtccaatgcagggaggtgaggcccagcctcatgataacacatgcccatcaaggaaaagctgtggctaatgcttccaaaacaagtgaaaatcttgcaccaggcccagggccatatctcattccgccccagctactgagggaggggacagactgctggaggacaatttctcctagttaccactaggggttacatggctactcagaatgaaagataaattgccaggcctgttgcaatcttttttttgagatgggagtcttgctctgtcgcccaggctggagtgcagaggtgcgatctcagctcactgcaacctccacctcccgggtcaagcaattctcctgcctcagcttcccgagtagctggaattacaggtgcccaccaccatgcctggctaatttttgtatttttagtagagacggggtttcaccatgttggccaggctggtcttgaacacctgacctcaaatgatccgcccacctcggcctcccaaagtgttgggattacaggcgtgagccacctcaccaggccccgttgcaatcttactccacttcgttttcacagcagtcccgggacatgcccattattaggcctatttgatagatgatactgaggctcagagtcgggggtcacaagccaaagccacaccgctagaagggctcaggacccagcccagctcccgtcctcttggtggcatcaagcttgtgtgatatgaggtcttatgtctgctcatgacagccttaaaagcaataaacagatacaacttccagcaacttcccactcagctgcaaggctgcggggggtcctgcctcgagccataaggtgagcagctagccagtgccgggccagtgtggagaaggctgaattgcctgtgaagctggggttgcaggcaggaatattcatggagcccctgaccatgtactcacactgctcttcctcagttcagggttcttggatttgctcaagtccacccaaatatccctttacgattctcagggtcccactccttccagatccaatgccctaaactttacataagagttccggcaaggctgtgacttcaacttgtgttgtaactgcaacctgcagaatcaaatttagggttatgttttcagttgtatcagtcttacggctacaagatattaaagagattcttttctggttaaaaaaaaaaaaaaaagggcggcc

SEQ ID NO: 24413 - DNA, 3064 bp, Homo Sapiens
gatgggatggtgcatccttacaaaggggaccgggccgagtactgcaaggcagccaataagagggtcatggatgtgatcaactcagccaggacccgccagcagatgctgcatgcccagaccttccacagcaactctcttttgacccaggaagatgcagcagctgctggggatcgcagaccagcccctgacacctggatttatccgctgattcagatgaagcccttcgagattcaaatcgatgagattgtcactgagaccctgttgactgaggcggagcgcggggcaaaggtctacctcaccactggctatttcaacctgacccaggcctacatggacctggtcttgggcactcgggctgagtaccagatcctgctggcctcaccagaggtgaatggcttctttggggccaagggggtggccggcgccatcccagcggcctatgtgcacatcgagcgacagttcttcagtgaggtgtgcagcctgggacagcaggagcgggtccagcttcaggagtactggcggaggggctggacgttccacgccaaaggcctctggctgtacctggcagggagcagcctgccctgtctcacgctgattggctctcctaattttgggtacaggtcagttcaccgggacctggaggcccagattgcgatcgtgacggagaaccaggccctgcagcagcagcttcaccaggagcaagagcagctctacctgaggtcaggtgtggtgtcctctgccaccttcgagcagccgagtcgccaggtgaagctgtgggtgaagatggtgactccactgatcaagaacttcttctgaggacagacaggtgctgtctctagcatcacctctcagcacgattttcccgagagttcacaggtggggcaggtggttgttctgactcaaccagagcttccagagggctctttgatccctttctcagttaaacacagagcagcatcttcaggggtatggcagctgtcctcaaagttagaagctggatgctaaattaggcagtctgttcactttccatctggtacccactccactaagtcccaaggcgcctgtgctggggtcggcagtggcagcctgtagtccccttctgctctcccttcccggggggtcctgaagaagccctggggcaagggctcagggatgagggggcagaaaggcagattgagcccctccaagctgagcacactggtgcaggagatgtagacgtgggaggaggggagcacgtttgctcgtgagagtggctctggcttgctgccctggccggctgtagtgcacagggtggggcgtcggtagagccagaccgtgggctgctgcctggacgcctcgctgacatccctgtgctgcggttacagagctgcgcccttctagactctggaagttgagtaacaggacctgctctgcccacccaggaggggcctgccgcttcaccagaggcaccagtggggtcccacagtcacctgaggtacccctggactgtcttgacgcctagaggtccgggcagggggtggctgccattaaaggtggggtctttgctgagtgaccttttgtgtcctggatccctcagggcctggactgcactccgggtggggtcaggctcccgaggcccctgctctctggttctggatgttgtgggtagttctgttgctttggatggctgggcctttggatggtggcttgtggggaagggacggtgaggagtcaaagatgagccaggacccatgtggccggcacatgcgctagtgccggcatctcatgtgtgcagcgtgggctcccttagtgcctggcaccttagtgctctgctaagtctcattgtttaaaaatgtgtagtttatctgcagcttttcctagttattttaattacttttcattttatttgaatagtatgtgcaaatgtagagagtaaaacaatactgcggccatttcctgccctcccttcccccaggcagccactcttggcttgtttcttctgatgtgcacacgtgtccgtatttctaaataacgtgcatatcctgctgtcttcccccaaaatgtgtacttaaccaaaacagcaccagtgtcactcctgaaacaaaaattaccaagaatgtcttagtatcatcaaatacctaaatggtgttcacaattccacttgccttaaaattaattttttcgattatttgacttgaagtccaattaaggactacaccttgtgattgttttttccctagcaatttattttttgaagaatgaactttatttttattggatctacttaaaacatttttgtgtcacctagtagcaggggattttgaatacatgtcatgtgtgtttataaagccagctctccatatcccccagtgtctccaggagctgcttttgtgacctcactgcctgatctctttatcatcttcaggtgcttgacccttgcacagagaagcttcctgggctacagggcatggcagcctgtcctttcggggagtgagattagatttagtccctgcactttgcctctctagaagcagcttctcgcctttccctcccgagggctggcaggagtcactgtcagtcacccttcatggggtctgaaaggttgcatgggctcacctggtcttagacaaggacagttgcagcttccgcaccaggcagacctgcagtttgagtggctggggataggtggagcggcggcctggccacagtgccctggacagcagcacatcacatcagttaacactgtttgccttccaactagttattacggtgtcctgtgggacaattagactggaggagccaaaggaatgtgcaggggcactgggtttctgtttggagagaggctctcggtaaacagagttcgcattcctccagattctgtgggaccagagtaaatatcattatgccacagccaggcttaagcaatctatctgcagtgccgttcccgcagcgcacactgctccctctgtctctgctgatgaccttcgaggctgtcctaggcaggttctccctgaggagctccccacaccaagcctccctaactctgcaaagcagccggagcaacagagagcagcgggcggcgggc

SEQ ID NO: 24414 - DNA, 1857 bp, Homo Sapiens
gtgaccctggagcccaacaaggacctgcggccaggggacacggtgaccatcacgtgctccagctaccggggctaccctgaggctgaggtgttctggcaggatgggcagggtgtgcccctgactggcaacgtgaccacgtcgcagatggccaacgagcagggcttgtttgatgtgcacagcgtcctgcgggtggtgctgggtgcgaatggcacctacagctgcctggtgcgcaaccccgtgctgcagcaggatgcgcacggctctgtcaccatcacagggcagcctatgacattccccccagaggccctgtgggtgaccgtggggctgtctgtctgtctcattgcactgctggtggccctggctttcgtgtgctggagaaagatcaaacagagctgtgaggaggagaatgcaggagctgaggaccaggatggggagggagaaggctccaagacagccctgcagcctctgaaacactctgacagcaaagaagatgatggacaagaaatagcctgaccatgaggaccagggagctgctacccctccctacagctcctaccctctggctgcaatggggctgcactgtgagccctgcccccaacagatgcatcctgctctgacagtgctgcgtggaccatctggctgccttttttctccaaaagatgcaatattcagactgactgaccccctgccttatttcaccaaagacacgatgcatagtcaccccggccttgtttctccaatggccgtgatacactagtgatcatgttcagccctgcttccacctgcatagaatcttttcttctcagacagggacagtgcggcctcaacatctcctggagtctagaagctgtttcctttcccctccttcctcctcttgctctagccttaatactggccttttccctccctgccccaagtgaagacagggcactctgcgcccaccacatgcacagctgtgcatggagacctgcaggtgcacgtgctggaacacgtgtggttcccccctggcccagcctcctctgcagtgcccctctcccctgcccatcctccccacggaagcatgtgctggtcacactggttctccaggggtctgtgatggggcccctgggggtcagcttctgtccctctgccttctcacctctttgttcctttcttttcatgtatccattcagttgatgtttattgagcaactacagatgtcagcactgtgttaggtgctgggggccctgcgtgggaagataaagttcctccctcaaggactccccatccagctgggagacagacaactaactacactgcaccctgcggtttgcagggggctcctgcctggctccctgctccacacctcctctgtggctcaaggcttcctggatacctcacccccatcccacccataattcttacccagagcatggggttggggcggaaacctggagagagggacatagcccctcgccacggctagagaatctggtggtgtccaaaatgtctgtccaggtgtgggcaggtgggcaggcaccaaggccctctggacctttcatagcagcagaaaaggcagagcctggggcagggcagggccaggaatgctttggggacaccgaggggactgccccccacccccaccatggtgctattctggggctggggcagtcttttcctggcttgcctctggccagctcctggcctctggtagagtgagacttcagacgttctgatgccttccggatgtcatctctccctgccccaggaatggaagatgtgaggacttctaatttaaatgtgggactcggagggattttgtaaactgggggtatattttggggaaaataaatgtctttgtaaaaaaaaaaaaaaaaa

SEQ ID NO: 24415 - DNA, 1870 bp, Homo Sapiens
gacccgttagggtgtttttaggcttggaactagtacctactttaaaagatggcctcttggtgggacagacatttgtataagtcacaggccatgtcatactgtgcttaagttcttgttcatgtgagcatttaacaacctgtgatgtgggcagagatgaggccaagaacggagaagggaggagcatgaagagttgtatgtttttggagtgctggagtgacttgtgaatttctgaatattttcccttcatctaacattgattgaacatctcttatgtgcatagtgggagcttagtatttgctgaatgaataaaaattgaaaggaaaaaatttaaaaagacccaatcgcactgatcattgaacaccagtatacaataactttagggtcatatggatcattggtttcacgattacagtaggtctggtgcatggcactctcagatctagtagaggctctgatgtcagtagcaggatggaggagagctgggcttacagcctctcaacttgttggcccttataccatcactgcactcatgtccttgctctgtgcagaagtagaatcagaaaagcatcaggcaccttcatggtataaattgtgtctatgggtgcagtgaataagcaaaaatcagaagcagaccggagggacttataaaaataggtacagggtcacaatgggtgcctatatgtagcctgtgacagataagaagctgacagtgagacaaacaaaaaactgaggctagagcctcattcctctgactcctaatccagtgttctctccatgctctcccactgtcttcagaattgagtagaaatgtgatcccctcctgaatcctgttttttgcctcttactctcccataatttggaaatttccttgtccagtggtttatattcttttctagaaaaactaaaactgggtggagtgtggtggctcacacctataatcccagcactttgggaggctgaagcggaaggattgcttgaggccaggagttcaagaccagcctgggcaatgtagtgagactccttctctacaacaaagtgttaaaaaattagccaggcatggtggagtatgcctgtagtcccagatactctggaggctgaagcaggaggatcacttgagcccaggagttcaaggctgcagtgagcttccaccgcactccagcccgggtgatagagcaagaccctgtgtcttaaaaaaaaattaagacagtatttagacttatcagttagattgttttatttaaatccttctaacaatttaggcaattctacattaattttcatcaaaatttatccagtcaaaaaaatttcatgaatactccagatgtaagagagtcacaattttctacgataaatcagacatcttatttctagggtgattgagggaggtggaaagcgcaggaggaagccagtgaagaggacaatggaatgctgagtcaatgacattgacttgtgttcctatctgccatcttgggtgtgggtctttatatgtggttacagatcctttagtttgagggaggtgaggtagagaaataggatgccagcaggtaggaggccgatgtcagtcctcccagcaaagctgtgtcatttatctgaatggaaatgagaaaataaatatgtactcaataagtcacatttcccagaaatgtgattgagattctcaaaaaatagactcagattcttggctgtctgtttaaccaatcacgatatgggatttgagaaataaaatttagggaattttaagagacatgaaagctactaggtcagggaaaataaaaagcttaaataactatttttattgtccagatcctctactgtaatagattaactatgttcaataaatttctagaccaaaaaaaaaaaaaaaaaaaaa

SEQ ID NO: 24416 - DNA, 2043 bp, Homo Sapiens
gcacgagccggagtggacaggtgaggaggggaggacttgcctcgccgaggccgctgcgaggagcgtgcccaagggcgaaggtccagggaacccggctcccgcgcaccgaagacggccgccatgccggcccgttgtgtggccgcccactgcggcaacaccaccaagtctgggaagtcgctgttccgctttcccaaggaccgggccgtgcggctgctctgggaccgcttcgtgcggggttgccgcgccgactggtacggaggcaatgaccgctcggtcatctgctctgaccactttgccccagcctgttttgacgtctcttcggttatccagaagaacctgcgcttctcccagcgcctgaggctggtggcaggcgccgtgcccaccctgcaccgggtgcccgccccggcacctaagaggggagaggagggagaccaagcaggccgcctggacacgcgaggagagctccaggcagccaggcattctgaggctgccccaggtccagtctcctgtacacgcccccgagctgggaagcaggctgcagcttcacagattacgtgtgaaaatgaacttgtgcaaacccaaccccatgctgataatccatctaatactgtcacttcagtacctactcactgtgaagaaggcccagtgcataaaagtacacaaatttctttgaaaaggccccgtcaccgtagtgtgggtattcaagccaaagtgaaagcgtttggaaaaagactgtgtaatgcaactactcagacagaggaattgtggtctagaacttcctctctctttgacatttactccagtgattcagaaacagatacagactgggatatcaagagtgaacagagtgatttgtcttatatggctgtacaggtgaaagaagaaacatgttaaaaactcaacatcaaatgctctgatgtgctatagattttcaaatctttactcacataattatctctttgctattgtaaatctttcacttcaagataatttgacagttgagtatcagcataatttgtttagctctaaggcaaaagtttgcttgcttgccaacacaatgaagataatacctacccacaaacatccctattctctactttcacctttttttttcttttaatccttttggtagaaatcaggttacaaagcaaaaccacaatatcagcaacacttcctaatcaaaattaagcattgaatatttgtttaagcttagttcagaagcaacgctcctacaggacttgacatttgctagttagaatatccctactcttctaaataatttgaaagtatagagcagtaacacagtaacagtgagcacagccaagcctgacactactaaatgatttggtagtgaagccaggacatctacccttgactattttttatgttatttatttattagtttgtccatttgtaacatgtatagatctgtcctgtgagcatttctgatgaatctatggttcttacagaaatttttcaaaggaatcaatttagagatagagttttcatatacttacattaacttattaatgaaatctgtttgcatcagtgcttactgcgacacattaattagcttgattaatttagattagaatcattaacatcatgaaaaataaaagtactacatttctaacgtattcccattgcaggtgttaggtattttttctgtcaacacctctcttttgaattctacatttgagaaataagcatggaaatattagctgccccgtctgccattcaccaggaaaaatttctatggcaattttgtaccatgaagtaaactgttacaatagtttctgagaagcatactataactctgatcttccattgagaataacaaaaataaatatcaattttacacctcatatgtcttcttagttctgaatgattagaagaacttgcatgtatttttatcctagaaggtttaaataatacatcaaagttattttcttccaaatgtaattttatgtctgctttaaggaaaataaaataaaatattaatagggaaaaaaaaaaaaaaaaaaaaaaaaaaaaaaaaaaaaa

SEQ ID NO: 24417 - DNA, 3583 bp, Homo Sapiens
gtcccgaaaccagagggatggggccggctgtgcagtagaacggggatcgaaaagaggaaaacaagggcacgaagaccagcgagaaagaagaggacacctgggaaaggcggaagcagaagacggggaagggaaaagaaacccatagcaggtggaaaccagatctagagcaacaccgtcaggttcacagtttgtttttctagaagagaagaaagtacctgaggattgctcttttttcctaccgttaatgaaaactacttttgtcttcatcataaaagaaaaaactaaggggaggtaaaggcagtctcctgttttattagggggagaggtgaagggaaatccaggctcactttctgaataagccactgcctggtgcacagagcagaaccatcctggtttctgaagacacatccctttcagcagaattccagccggagtcgctggcacagttctatttttatatttaaatgtatgtctcccctggcctttttttttttttttttttttttttagcaacacttttcttgtttgtaaacgcgagtgaccagaaagtgtgaatgcggagtaggaatatttttcgtgttctcttttatctgcttgccttttttagagagtagcagtggttcctatttcggaaaaggacgttctaattcaaagctctctcccaatatatttacacgaatacgcatttagaaagggaggcagcttttgaggttgcaatcctactgagaaggatggaagaaggagccaggcaccgaaacaacaccgaaaagaaacacccaggtgggggcgagtcggacgccagccccgaggctggttccggagggggcggagtagccctgaagaaagagattggattggtcagtgcctgtggtatcatcgtagggaacatcatcggctctggaatctttgtctcgccaaagggagtgctggagaatgctggttctgtgggccttgctctcatcgtctggattgtgacgggcttcatcacagttgtgggagccctctgctatgctgaactcggggtcaccatccccaaatctggaggtgactactcctatgtcaaggacatcttcggaggactggctgggttcctgaggctgtggattgctgtgctggtgatctaccccaccaaccaggctgtcatcgccctcaccttctccaactacgtgctgcagccgctcttccccacctgcttccccccagagtctggccttcggctcctggctgccatctgcttattgctcctcacatgggtcaactgttccagtgtgcggtgggccacccgggttcaagacatcttcacagctgggaagctcctggccttggccctgattatcatcatggggattgtacagatatgcaaaggagagtacttctggctggagccaaagaatgcatttgagaatttccaggaacctgacatcggcctcgtcgcactggctttccttcagggctcctttgcctatggaggctggaactttctgaattacgtgactgaggagcttgttgatccctacaaagctgctaaccctggtgagccagaagatgtgtgtggtcgtgtaccccgaggtggagcggggctcagggacagaggaggctaatgaggacatggaggagcagcagcagcccatgtaccaacccactcccacgaaggacaaggacgtggcggggcagccccagccctgaggaccaccattccctggctactctctccttcctcccccttttatcctacctccctgccttggtcctgccaacacatgcgagtacacacacacccctctctctgcttttgtcaggcagtggtaggactttggtgtgggtggtgagaaattgtaaacaaaaactgacattcatacccaaagaaccagcctctcaccccagggtccatgtcccaggccccactccagtgctgcccacactcccagctgctggaggagaggggagatgccaaggtgccctgcaggacctccctccgggccacaccctcagctgcctcttcaggaaccggagctcattactgccttccctcccagggaggccccttcagagaggagaggccacaggagctgcattgtggggggacaggctcaagcaattctgtccccatcaaggggtcagctggagagacccaagaccctatctgttcaccagggacccaaaatccaaggggatgcttccctctgccctctttcctgcccctccccatcatacctgcacccaccccagccagggctccctgtccagaattcggttctcctcaggacgccaactcccagagctaaggaccaaggagaagaacagcctctccacccccaagccagcggttgaggaacatattgagaaaggttcagattgcagaaacccagccctgcccctgcctcctgcatccagcccccaacatggtgccaaagcttccagaagccaaaaagcttctgatttttaaggtagtgggcatctctctcctaatgacgaagctgctcagcaactccacctgcccgcgcaggaaggagcagtcccctgctatccctgcagccactcccagcacacccgcacacagccagcaccaccgcccccaccgtgcacttctcctctctgggccttggcttgggaccaggtacgaaggatccccaagcccttcaggcctgagatcagagccagatcagccttaagtcacctcccatccaagaacttggcctaaaaatactcccctatttctaaccctcaggacggatctgatattaaatgccttccctgggaggaagggtgctttccccctccctagaggtgcccattccataccctgggagactgaggagagcattggctgaagcccagttcctttcccatccatccccaactccaataatcccccactcctcgcaggtctcagtgtcatgctgtcttggggcagggtgaaagggtagtggcagcagggcgcccactctggagatcctcaaaaaaggccctcctctgtggctggcagcctctgacctttccctgggcttcaaaggaaggctatggagtttgctgtgggccctgcaaccttcccagccactcctgctgcactaaggacttaggatccttttatcacaaatcgggattctctcccccaccccgaattctgtctgcttaaactggaatacacaggagcccttcctggcctggatggtgtctcccagcttccccgcccagcttgcccaccccatagttggtgagatgccaagtttggtctgagttgtgaccccttcagagtagatgcccggcaggctggggttggcccctggagggtcaggggaccatcttcttattccctcttttctcattcctccaacttcctcccctccttcaattatttttttgtaaagttgatgccttactttttggataaatatttttgaagctggtatttctatttcttttggattttttttaatgtaaggttgttttgggggatggagttagaaccttaatgataatttctttcgtttggtgtaggttttagagatttgttttgtggagaggtttttttcttttgatgtaataaaatttaaaatggaaaaaaaaaaaaaaaaaaaaaaaa

SEQ ID NO: 24418 - DNA, 1992 bp, Homo Sapiens
cgtgggcttgaggacctggagagagtagatcctgaagaactttttcagtctgctgaagagcttggaagactggagacagaaggcagagtctcaggctctgaaggtataaggagtgtgagttcctgtgagaaacactcatttgattgtgaaaagacttgaattctatgctaagcagggttccaagtagctaaatgaatgatctcagcaagtctctcttgctgctgctgctactcgtttacatttattgattacttacgatgattcaggtactgttgtaagtgctttacatgctgttatacgagactcttgggagaaatcactttaatgaagcttgagacacatggcattgccatgcaatgatttttcccccctcttcacgggatcagagggaactaatagaatgtgacaatgattctttagcagggactgctgaggcttctggttcctttttaagatctgcagtgaaagaagatgagaaacatggatatgcccttcttttggtccccctcttcctttatttgatctctacttccttctataaatatattagggctacattgtccctttgtatttcaaacaaggcaaaaagaggttgtaattacactttactgcaatcctcagtttctccagggaacaggaatgcaaaggctttgaaggcctctctatttgctgacatggtcagctgggtgccatgggccaagtccttctgttgccctcctctgtcaccaagtaagctaggtcctttctgaggctcaggtttgctgtgatgatgatcacttttaggcagaaggttagaggcctcatgagtgctatatggactttattaggctttagatttgatggggaataagggatgtgatttgtcttttgggaactcatctttgattcatcattgtctcttggtatcttggaatttccatgtcattacagtctacagaatgaaagagtaacctgtcccagaggagaggcaggtgaaagactccacagcatgctcattctcattctgtcttctcagtgacaccgaggtttactgagtgcccactatgtgccaagcactgtgctcagggctttctttgtatgcatgatctcagtgaatctcaccaagcctcatctggaaaacggggacaaattaacaacaggatggcaaattgaaaaacacgtaaccatgttctacagatggaaaggggtgcttggttattatgaaggccccctcgcaagcgtgtgggacatgggtgtgttctctgggttgtactgatcagatcaaggacctcccccacccttctcacactctgcccacttccgccctttgcttatcagacccttagccagtgactcattccagaaccagaaccttggtgaaatctcaaccgacaccagagatcggtgtcttcagtcctagactgatggagaaaatccagaatatatactagaagctccaaatgctctgggtttcagctcctctgtgctgtggacactgactttggctcagaactccgatttagtacaaaaggctcatttttatttcaggggcactcttcctaaagcaaacctaataaatgaaatatggaattcacagatacacacacacattaaaaaattaacctagtgtatctgtgaggagtaggcagaaattcactgtataaaagaatgcttcatttcatagagaatttgtgttaagattccattagatagtacatttctcaaagatttttgaggttgtatttgctttaccaaaacttggtttatgtaagtggaaaaagcatgttgcaaaataacttggtgtctatgattcagtttatgtaaaataataaatgtatgtaggaatacgtgtgttgaaagatgtacatcaatttgctaacaatggttatctctgacgtggtgggatttgagatgtgtttttctttttggttgtatttttctctattgtttgacttaacacagaacatgtttggttacaacaataaagttattgaagacaaaaaaaaaaaaaaa

SEQ ID NO: 24419 - DNA, 2640 bp, Homo Sapiens
tgaaaatgtaggagccacacgtcttaaagcaggcccacaggaacccagcaacatcaatgaagagcaggccggtgagggctggggcagatgccactcatcttccagtgataaaacagattgtctagttgttcatgaggagccagaaatctaaatttttatgagaaatctcatatttgcatggtcaaagatttaaaaaaatttaaataccagtaggcaatcaaaatgtatctgtgggctttccttagcccaggtgctggtaacccctgacttctgctacaaagagggattattctgtctatatacgaggctgagaagtgagttagggcaacatagtaggtaactggggtggattcatggttaagagcaggaagagcaggaagccaccactgttctccccagagtcaggctgtggactgaaggagatttcaaggttggattctggttcagacaggaaagctgcctggagaagactttgcctttatgggtcactgagtggggaccctgtgtgggagccctgcccaggtgaggtaaaaccttgaaagatccttctgtgaggttagctcccttttctcttgagggagctagtagcttgagagagctagtttgtctggcttctgtggaaggctgtgcattaaacagcaacaacaacaagaaaaaacatttacagttcttcctgagtttaagaaaagccagtatgcccataacagaagggctgggaacatgtaaggaataagagtcatctgaacaccagcacagttattcagtatagtgccttctagtcataactagatggtattaataccattttaattcttgcctttttctcacttgatatttgattgatggtgtttcttgtgtgtgctgatttgtttgtgactactgcctgctggagagagcctttgttgggtgttcccctgtgggctggaagtcactggtatgcacacccttgccttttctttcccctggccattcatctagctactctccttttctcttgtcccactgtcaaagtgcttcttttttttggccaagtaatcagtctcgatggaagccaaccaagctccccttttattttgctcatttcttggggtttcctcctgccatgccagggtaggaaggtcaaggtcatctagatctccaaagagcagctgggctgaggaggggtactgaggccagcagcctggcctgcgtgtgaggtattaagacacggcagacacacagagtggctgcggttatccttgcttccccttttccctgttgagaggtctccatgtaataatgcctcctttcttctcttgcagggcgatggctgggtatacttcaatcccctctggaaagcacactgatggggtggaggtgcagagctttccagtatagccctgtttttgtaggaatattaaagtagtagagtatcagggttttgttggcattcactgagaccttgtattagcatccaagaaatgatgagagagagagaaattatatactatgaaaagtgcacccccacactctgctagaggaatgaatttattcaagagccattcggggcacgtgtgtgtacacaccgtatacgttcacacacatgcactatgtaaacatctgagtatgattacacatttaaatactgcactcaccaaggttaaagtgggtaatcataagctcctttttatcaatgaagtttgaagtttttctatttttcactttgccaaaaatgttttacactcacaaagatattctcacttagtcaactcctgtcaaaatgaaggtgaactggcatggcccgatcactgtccataagggagaaagtggctcattcctggtagaagtatgggtggttatcatttcaaaattattgtgattctcacctccctccccacctcagtgttttgtctgtccgcgcccaagaaagataagcaagtatttcctgctggatgggggttggcaggaagctgttaaagatttatgccagagccttgcaggatggagcacctctgggacaactaagagccaaggcccaccaaggagttttccacccgtctctcatggtcacagcgctagtcattcatttttgagaagttgcttcttttacatcagaaaaccagtcaatcatatggagacttcttttgtgatgaaaaagggctttagaagttaaatacatgcatgcacatgaaaacatgcacaaccacagcctcaatcttgtatttagtttggggaaagagaagagaatttcctgtggattattttttcctcaagtgcacctctctggttaacccaaactctgcaagaaagcactgtgactaaaacatacataacgcctgcataaatattccatggtttcagttaaatttcagtttttagcctttacacatgaggtcaaaggagtgacgaaaatacaaagcaaggaaaaaatgaaatatctggtttttgctgaatgcttaatttattttttactgtgccactccaatatttatcaaatccaaatagcatgaatgcttctctgtagtaatactaattttgtgccttttgtctgctttcttaagaccagttgttcacactttgtagatattagacaaatatatttcgattgaataccaaaaaaaaaaaaaaaaaaaaaaaaaaaaaaaaaaaaaaaaaaaaaaa

SEQ ID NO: 24420 - DNA, 2881 bp, Homo Sapiens
ccagcgaggatgcagacgagttgcacaaaattttactggagaaaaaggatgcctgaacacgcaaagtcggctgcagaattattgccaagttgctgctgcttccaccgccccttagtcagtttttcttctcttctttgacattctaagaacttatagataacttaaaacttttgtgaggaagattaatgtggccaataaaacctttaaatgttaagtgtcaagaaactgcactctcccttcttaagaactgcctaaagtgtaaaatacatttgaatgcaatttttggaagattttttaatgttcgtttattaaactaaccctaagtgatttcttcaaggactgcaatcagggtatcaatttgctttcccaaaggctcttccaacccgtgggttttggggtccaccgccaccaccagagaggcttttgaacaggtgcctggctgtgttcagaaggaagctggcctgtgtgcttctctccggtgggctcagccgacgtgtgagacttgttctgttaccaaatgaaccgggctgccacgctgtgacaggcgtttgtcctctgctttatttttactttgaagctcaaatgcgagtactaagtgttcacctcagcgttcgaatcattggcctgtaaccctgtgggctgcttcacgagaattcaggacctgcattttcattctaaaaagaaatgaacagcttgtgaaggagttttttggcttcatagtttctattcatgaggtagtgttacttctttatccccctaaagacaaaatgaagataaagggggattgccaggaatgggtttaaaagcacaaatgtggtagcttatcatctacaccatggagagtgaacccttacgaaatgaaagtcaaatgagaccatccgagaaaaagatgcgcataggcatttgtaccatgatcaaccccacgcacatgaaaactgtgaccaagtgacgtgcctgggagctttgacacacgagccgtgtgaattcactaggaaacatgtaataaagtcatggaagagaaaatcgtgtgtaaattttgcctttaactttagaccgcagtatattataatacatttgatatctgaaatatctttacttttttaagagtaagattccatatgtctgtctggaagggagccatggttattcacacgaatatccctgtcacttctccagaggtgtcaggtaactaacacgagcattctttgaagactctgggcacatgaatgatacacagaattgaatgtttaaatttccactttgagtcctcatgaatcatttgagactagtaccagctgatcttgtgtacaggctcagggtcagtgcccaagggctcccgcgtgtgtgttctgatcttcagtgcgtagcacattctccatttagaaaagagtggtcagaataattgtggacggtacagtggctttttaaaactacagtctttaggtgtaaggtttggcgccgggagcaattttatgatcaaatatgatgaactcctaagtcactgaggtgtgattgggccaatgttggcatgaggttcttgctctacttccagtgttttgattccactgggagaatttggcctagtgtgtggctttggatgaatccgtgtagagagaggtgagcttgtcctgttacagatgctgtcagacatagcgatagtaggcacctagggaggaagtggccgttagttttacactgactttttaagaatggagaatgcacgtgggtttctgttgcggatgattcatagtaagcaagcggttgatgctgttaataccggccccacccgattgacattaagtttattcagcttttaaaaagatgaagaactaaggggaacaaatttaagtttgttgcaacttagccacacatgcttccctggtaccagctggaatcagcagctcacaggcatcttcaggacacttcagtgtatatgacacagtactttgttagcgtctgcgtgtgtatggaaagttgacaaaaaatggcatgaaaagatcatgattggattttcttttaaacctgcccttctgtaaaaaatagtttatatatttttaaattagtaggtatgtgtggcttccttttttcctaacattcccagcaaatttttgctgctaagactatcactgttaaagtgaaaattacagggaaaaatgtgatgaatataccgtaactcaaaatgtgatattttcttaaaatcactcttttatgctttaggaactggttggtctccactttgattattagtgtaaagagcctgagtatacgtggatttcattgtaaaatttaactccttgtcttttacttggggcacggggcccctggagggcttccctactttccccactatgttaacaggtaattctgatttatgcgtttagtttgacttatttttaacaaaatattagaagttatgctttaaaatgtttaatgtggactgaaattttcatcttttgtttgagaatctatgaagtgtatcatatacgtggcctaaagcaaggtgtgtattttgttattctgaaattgttttgcatctggacaaatactaaatatcccagtggccttttttttttttttttttaaacctgtgtatccatctcatccttttgcgcattcctagtaagcaaaaaaatttgttatgccatcttcattattcgaattacagactgaaaaaatatggccagtttttaaagaagtttagattatgttttccatggaaggacaagtctgactgttcataggctgattttctttaagaggattattctgttttacaatttcaattctagatcacattttatatatgctgcatgccaaaaaaaaaaaaaaaaaaaaaaaaaaaaaaaaaaaaaaaaaaaaaaaaaaaaaaaaaaaaaaaaaa

SEQ ID NO: 24421 - DNA, 4764 bp, Homo Sapiens
atagacatttgccagccattcaggtagagagcattctagttagagctaatagcatatgccaaggcacaaagatgtgagaacatatggggtgtctgggaaacttcaagaagttcaatgtgctttggacaataaagcaaacaggtagaggagtagaaggaacagataaagtctggcaagtaagcagtagccagaccttgagctttttgtgctcaacgaaacttagattttgttctgcaaacactatcaagatactgcagataattaagagcaactaatatttattgggagcttattattctgctggtgctgtactaagtactttacatgtaatagctcaggcttacaagaaccctacatggtaggttctgttactgtgttcatttaaaaatcaaggattagaagctaaataactcatctaaggtatgcataaatagtaaattatacagctgagatttgagtccaggtggtttggctccagaagttgggctcttaacaactatgtcacattgtttcttatgatgaaaatggattctaaaaacaatttaattaaaatatgaataactggccaggtgcagtgactgacacctgtaatcccagcactttggaaggccgaggtgggcggatcacctgaggtcaggagtttgagaccagcctggccgatatggtgaaactccatctctactaaaaatacaaaaattagccaggcgtggtggtggcctgtaaacccagctactcaggaggctgaggcaggagaatcgcttgaaccccaggaggcagaggttgcagtgatccaggattgcgtcactgcactccagcctaggcgacagagcaagactctgtctcaaaaaataaataaaatttaaaaaataaaatattagcagctaatgtttaatgcaacctagataatgtcctaaggtcttcaaatacattcatttaatccttataacaagtgtatatgtttagtactattattattcctcatttatagatgaggaagctaatgcatagtgatgttaaaatattgctcattttaatttttcttctgtctgctccattacttgtcctttctagtatatagattgcaccattattgtcattattttaaaatatgtgcacttctcacatctctcctaatttttacttgtgaattgagctatcagttttatattgtgttgtcaattgagctaacaattgccttgcaagtaatgtctttggggaagtgccaaaagctagcctaaacttccgtgttatcaggtgattatcttgttcatgggttgcagggagggaagagaagagcctattaaggggtcatttggtccatctgtactcttggctattgcttctctagtcttactggaacttcagcactgccttgagtttacacttcactattgctttttttcatcaaggcagcaaaggaagggggcagtatgcggaaatgaaaaggccaaagctctcgttcctgcccattcttctattttctagtcaaggctgcagttcacctcatgctaaaactgtgctagcctttgtgccctgcggggtcctcagccattttacgttaattgcaagtattgctttgagagctattagccttcccatatcttgtggcatcttcagggttgcttggacaagaaagccagcagtctatgctaatttgttatctttttaagaacccaaagtgtactcattttagaagcctcagtcaaagcaaaatataaatcttgaattttacttaatatattgggagtgattatgtttcataagaagtaaaagtgaaaggaagaatacctacatggatacatttagagaagatttcctcttgaatgtgaacagaaaaatttactgggagaatttactctgaagttttgctgattttatacaataaatagcaactgttacaagtctgtctgtttaacatgtatttcaaggttttcaaaattagccctttctctttattttttgtaaaattcaaatacaggacttaatgccaattacagaataacatacactaaagaaaaaactgtcatgtcaaatttaagataatatgttttaaggaatgattttggtctgattccagtatatttaggtgttctgttcatgtattaataggtttaaaatgctacctgaagttctatatcgtatcttcacacttgaaacaattctgattagtaataatcaggttggatctgtggaccctcagaaaatgaagatgatggaaaatctgaccacgttggaccttcaaaataatgacctcttacaaattccaccagagctcggtaattgtgtaaacttaaggtaactacaccattctactgcattgtttcatttattttattgatttgttgaagtgatttgtttttctttttcagataaatttgcaagaagttaaagtaacagatttaatatcctgttaaaaataacaagtaacaaaacccagagtcccaattctgtttttcaaattttaccaaatgtatatttttagttttgcttatatggtatatgtgtgaatataataactaattatttctagtggcttttcgctatcactgtgtatgtttataacctgaatctctactgcataaaaatgtcggggaaatattaactccttagctttgaatacagggtttttttttttttttttttttgaaattgattgcagattaccaccattctattttgagtccagtacagtctttctcactctttacatctgctgttccctcagcatcaggtacttttaccctgttttcatcaataattggcctattgaatgtcacctttgaaagccttccctgtcctccaagcagaattagtccctgatttcccatcatgcttcatttggacttatttgtacgatttttgggtctttctttggaaaagagttgtcccagtgcctaaaacatagtaaacacccagtaagtgcttattaagtgaatataaaggaggtttgaggtatcgacagaaagccaagtggttaagcagaatgtgtcagaagtaatttaattgctgaaaactgcatatgaatgatttggtatattttacttcactggagcaacactggtatctgctctagtacctcatgttagtaagttataggagactataaatacagttgattcttattctttgtggcagttatgttctatagacactctgaacacccagttagtgaatactgacctattgcttctgggggaaatacaggggttaggttcttgcaagagtctagtcacaacattttcagcaaccagtcaatatataactttgttatatgtgtgtttctgtagtaagatacttcatttaatattactgttgtgtcattaacattgaaatcatggccaacagcactataattcatgcctgaacaaagcttacctgacacatgtatttttttcgtaatccacatttgtccttaggaagactagacagtactttagcattatacttggtgaccatttaacacagtgaaatcaccaacaaaggtatgaaaatttgaaaagcgtggcactaaatgaaccaccaaaatgacccgtttacagtataagagctgaaacaagaagacaaagcatcaccttgttcagtctcacctgggaacatgcccgtggggtgactccaattttttgctcctctgtgcctgtttatgaatgacctcggaagtgccacacattgatttgggggtataaactttagtgagtaggcaagtttgcaaatatagcacccatgaataatgaggatcaactgtaatcaactttttttctagaaattaagaaaataagtctttaaaagaattcccaagaaacagaaatatttgaagatataatttagatcaacaatatggttgagtcctttgatttttgtttacataaacacttaactgttaaaaataataaaaaagcctctcttaattgaagatattttattatataatgaaacaaaacaagctcttaaatcttaagttgaactctcagaacatgtaaatagatttatatatgtgtatctgctcaaaggagggagagggcagaatgtgttaatgttttgggaggcagggggtggagcagtggtggtgatacattgattacattacagtccttggcttggatgactcatgctgatatttgtttaaatcttacttgaccatttagtatacagtcacttaataaggttgagaaggctggataaaagggtggttcaaatcacagctccatcatttagtagctgtttgatcttagacaatatttcttacccccctaaatttgtatttcctcatctattaaaacagaactattaatggtacttacatcataggattgttgagaaaataggattgttaagagtgactgaatataaattacttggctcagtacctttcacaaagtaagtattcaattaatatgttttgggttattaattagttataattctaatgtttaaatgttcagatatgaaaaggggcaaatagctcaagcatggtggttcactcctgtaatcccagtactttgggaggctgaggcgggcagattacttgaggccaggagtttgagaccagcctggccaaaatggcaaaaccccctcactactgaaaatacaaaaattagccgggtgtggtggaacacacctgtaatcccagctacccgggaggctgaggcatgagaattacttgaacctgggaggtggaggttgcaataagctgagattgcacctctgcacttcaggctgggcaacagagtgagactctgtctcaaaaaaagaaaaaaaaaaaaaaag

SEQ ID NO: 24422 - DNA, 1480 bp, Homo Sapiens
gacgtgaagaggtcttagcgcccgcttctgtccacggggtctctccttcctcctccctagctcagggatgggccttccagccggagcaccccgatccccatccggcaccccccaatcccccaacacgcctgtccctcccgcatggccaccaaggagctggaccttggatgcgcctaccctgctgaggtgggtgacaggggccccccacctccagggccttagaaccaccgcccctctccccaccccaggcacccctctttttactcaaaggcactgactgtaatccagggggactgggacctgcctccccccaacctctggctcccacaaggcccggtgttgaccgagccacaggccacggacaggggccggggttggggagactatgtcgccagatgccaggacgccctcaccccgtttgcatatgcaatgctagcatgggaccccgaaaatagacgctctgctgcactgagacttcttgtcaatgcccaaccggcgggggggtgtctccctgcccccgacccccccatacccccttctctgtgacacacacatcttctcgtctctttttctttcattgttaaagggaagctttttaagaaggcaattttcatattgtttctaccggatggttttggttcccttcccttcccacccccccttaagcctgtcagccccctccaaatgtctcaggatcccccctctcccctggggctgggtgacagcaccccggctgcgttcacaccccagtgtcacagggcgagctgttctggagagaaaaccatctgtcgtggctgagcggggagcttgaacacccaggccagggacacccctccccagctcccagagaggccccctgaggggtgagccctctttccaccttcccctatccatgcaccccctcgcaataaaaccaactctaaaatcacagctgtcgtcctagccagtgggggcgaccggacttggggggtggagccctctgggacttccgtaggaacaagggctgcggcccaccgcgacacttacacagacctcggggattgcactaaaccctcgttcctagctccgcactcagcttcgcctgtcctgcccgcccactttgccttaactacccgcccgtcctgggggccacagcctctgcatgggcccagagccgggacccccccagcccagccccgccctccccagactccgcgcaatcacatactgtatatagacgtgaatcgattttatttttattctttaaattaaggtcgtgataaagtgttgccaaagatacctgctgaattctcgcgtttcaggaaacaaacaaacaaaaaaaaaatgatatttgaggagggtcgtgttgactccatatgaaaggacacagctcaaagcttttttgtttggttgtttggggttttttgtgttttcttttttggggtgttttttttttaactgcctggtacaaaaaaaaaaagagaaaaaaaaaaaaaaaaag

SEQ ID NO: 24423 - DNA, 1624 bp, Homo Sapiens
gagggatgcaggccagccagggatccagcgtcttccccatcgtcactctccatggcctccgtctacacacagtgttcgtctgcacagcttgtcagcgcgttatcatgacttctatttggcaccggcccgtctgtccactgtcctggcttgttccaagcgctgccttctccaactggggtcctggctgcagagctgtctgctccccacgttgggcaactccagccaagattcctacacccaaatgtgaccgtgttgctcacgaagaaggctcagctttgcgtgtgcccagccgtgtgcacagctcgtcccaactcctgcgggtggcacctgcctctcccacctccagtctttcccctgtgatgagcagatgaccaccgccctccagggtcagcgtttggctgtttgtgtgcctgcccacccgcctccctgtgcctgggcctgccctgtgcctgcacacaggagtggctcatggcgtttgccctacacggatgggctgtcctgggagctactggacagtcaccttggtgggaatgccagaggcatgggcattaggtccccccggccagcctccgttgccacatgggctatttttgtccatcgcgtgggacaacctagtattgggggaaaactcagtccactctaaagaagcatcggcgttttggatggacgaatgctgcttcatgcgtctccatgtcaatggactattttattcaactcgggtatttatgagtgtctcctctgtgccagccacgtgtgaaagaagaactccaagttactggacaccaggacaaaccaggtagatcactgcatccggttcctcctctttctgccgactctcccgggcaaccgttctgattcctggcatggagttgggggcgagctcatcagtacccagagcgcctggtgtgcagccaaaggcccccattttattagtcggtgtgttcagtatcacgctcaagacaagggccaacctattacttcacacacctcaaatacaaaaagtgcctgggaacgtcgatgaggtattaaaggaaaccactggtcttgtcagtcatgtacacacagaaaaaaaaaccagtcatttttatttttattttttgagacagagtttcgctcttgttgcccaggctggagtgcaatggtgcaatttcagctcactgcaatctctgccacccggattcaagcaattctcctgtctcagcctcccgagtagctggaattgcagacacccatcaccacgcccagctaattttatgtatttttagtagagatggggtttcaccatgttggtcaggctggtcttgaactcctgacctcaggtgatccacccacgtcaggctcccaaagtgctgagattacaggcatgaaccactgtgcccagccgaaaacaaccaagaattttttaacaataaaatgaccagcaagtaaacttgaaacaaaaatggacaaatatctaaaatatttttaaatgtatgtattttaattggcaaataatacttgtatatattgtttacaacttgttttaaagtatgaatacattgtgaaaaaaaaaaaaaaaaaaaaaaaaaaaaaaaaaaaaaaaaaaaaaaaaaaaaaaaaaaaaaaaaaaaaaaaaaaaaaaaaa

SEQ ID NO: 24424 - DNA, 645 bp, Homo Sapiens
caagcaagctggcctgggccatgtgcctgtgaaaggcaggctctggcccctttccatgccaaagtcccccaagatctggatatctggggacaagatggtggcctcaggcctgcctcccaggcagttggctgggctcccaactgtctgtcctcaatgccctaccccaactccactagtgaccctcagagtcttctccccttaggacaaggcagacaccccaccatgcgggcctcaggtggcagagaggcccagcctcacaggcctgtggccccacacaccagtcccagcaaggtgaccacggctgctggaccccttccctgttcaggcaggcccagcccctctcagaacctgctgccagctgctggtcttggcccccaccctgaatcttactgagtccctctgggcagcagctcccttctccaccccaccccagcacccgtcccaaatgtggcctcagcttgtcctccccttccccaaactatgcattcattcagcaataaatgagcctttgctgtatgccagacccagttctaggctcttgcagccctggtagaaagcaaaacaaaaactcccgctttcccagagggtcacttggcaggggaaagaatcaggaaataaaataaataatgaaaaaaaaaaaaaaaa

SEQ ID NO: 24425 - DNA, 2857 bp, Homo Sapiens
cctcaaccaaatgcaattttttgtgtgtgtttgaaagctaatttgagaaaatttcataggttacatttcctgcagcctatctttatccacagaaagtgttttcttttttttaaatcaagacttttaaaactggatttcctcccatcactgttttttgaaggtcctccaagtccgtgttaaggtaaatatctgttttcttcctgatgtcacagcctgagcatactctgtgcattaggaagacctgagtgcatttcccaccattgtcctttccacattatgttgtagctggctggctgtcaggcgactacaagactgagggtcttgtgccttatagatctttgtatcccccatggctgacacatagtaggtactcagtaaatggttttataatgaatcagtgaacattttgcttctatagaagtgtaccttctttgtttctatattatgaaacctctttattagaatttgtgattgattctgacagtgtatagatttaccttatattgtctttattttccatgagctactaagtcattagagatactctgaagcatagttagtttaggaaatcacttcatattgattgtattagaattatcttggaattgaagatatatccctagagcaggggaccccaacccccaggccatgggccacacagcaggaagaggtgagtggtgggccattgaggagcttcatctgtatttatggctacttcccatcactcgaattaccacctgaactccacctcttgtcagctcagtggcagcattagattctcatagaagcacaaatcctattgtgaactctgcatgcaagggatctaggctatgcgctccttatgagaatctaatgcctgatgacctgaggtggaacagtttcatcctgaaaccacccttcaccctgcagtctgtggaaaaattgtcttccacaaaactggtccctggtgccaaaaatgttggggaccgctgctctagagagaggtcatgatatcataccaaccaaatggaaatgacaaatgttttatgtcaagtgttaattgcagaaataaatcttttttttttttttttggtagaaaacaaagaggcatactctgatttttatactctgtttttgcaggtgctcttttctttgaatggagatttgatgagcaagtggttaggatgcagggagagctactatgggtgatattttccttgtttaggagctgtgagttaaaattgtatcctttctggtttatctaaggaaagtcaaatcttgacagaaaacatttttccttggaaggtcaactctcagacattgtattttggtttccctcagtcctcataacttccttcttgctgaacatattttattctcttttcagagaaggaaaataaaaaggattctaaaagtttgatgcattggaaaaatttccttgaggcatttagcaacacatagaaaatgggctttgattcttttccaaaacttttagccatagggtcttttatagacagggatagtaaaatgaaaattgagaaatataagatgaaaaggaatggtaaaaatatcttttagggggcttttaattggtgatctgaaatcttgggagaagctgttcttttcaggcctgaggtgctcttgactgtcgcctgcgcactgtgtaccccgagcaacattctaagggtgtgctttcgccttggctaactcctttgacctcattcttcatatagtagtctaggaaaaagttgcaggtaatttaaactgtctagtggtacatagtaactgaatttctattcctatgagaaatgagaattatttatttgccatcaacacattttatactttgcatctccaaatttattgcagcgagacttgtccattgtgaaagttagagaacattatgtttgtatcatttctttcataaaacctcaagagcatttttaagcccttttcatcagacccagtgaaaactaaggatagatgtttaaaaactggaggtctcctgataaggagaacacaatccaccattgtcatttaagtaataagacaggaaattgaccttgacgctttcttgttaaatagatttaacaggaacatctgcacatcttttttccttgtgcactatttgtttaattgcagtggattaatacagcaagagtgccacattataactaggcaattatccattcttcaagacttagttattgtcacactaattgatcgtttaaggcataagatggtctagcattaggaacatgtgaagctaatctgctcaaaaagatcaacaaattaatattgttgctgatatttgcataattggctgcaattatttaatgtttaattgggttgatcaaatgagattcagcaattcacaagtgcattaatataaacagaactggtggcacttaaaatgataatgattaacttatattgcatgttctcttcctttcacttttttcagtgtctacatttcagaccgagtttgtcagcctttttgaaaacacatcagtagaaaccaagattttaaaatgaagtgtcaagacgaaggcaaaacctgagcagttcctaaaaagatttgctgttagaaattttctttgtggcagtcatttattaaggattcaactcgtgatacaccaaaagaagagttgacttcagagatgtgttccatgctctctagcacaggaatgaataaatttataacacctgctttagcctttgttttcaaaagcacaaaggaaaagtgaaagggaaagagaaacaagtgaccgagaagtcttgttaaggaatcaggttttttctacctggtaaacattctctattcttttctcaaaagattgttgtaagaaaaaatgtaagacaaaaaaaaaaaaaaaaa

SEQ ID NO: 24426 - DNA, 2872 bp, Homo Sapiens
gatgtattgagatggactcatctcaaactatattaaaaacactctggatgctttaaataaaaaatggcaaaagttaatgttgtaagagaagtgaaaagaaaaccaagagctcctacctgcctcagcttaccctttgtttggtgcgtgggtgcagtgggcagtgagccgtgccattccctcctggcagccggtgcatggctggccatggtccttagcagtgactgtgaacagccgtgggctactttgttacccacccagtgctgcttttgtatgttggcaaatggggctttcgctttccttggtttgattctgtcattgatgcttcagactagtcatgcttttgtttgaagggaaaaaaaaatcaatcaatcaatatcagtaacttgctatagatttttataaaggaaaaaaccccaccacatgtatggtggggagtgagttgatgtggaatcagtcatgaccgcgttgagttaggagcatcgcggatgtggagttacagctctgctgtggatgtttttgttttaagaaaacatcttttaaaaatctaataatggttcattaaaaaccagaaatggtcaagctcactagaaaccgtcatcagccacattctgatgaaagaggttttgactttcttttttaaaaaattaatgaagatacatccaaatatttgtggcaggcaggaaatcaagcggattttaatgggaaattatgtaagaaagcttaatgactaatttttctggatcagacaagtggagaacggtcttagggaaatgtgtacatccattactcattagtttgctgtattataattactgttgtataggaagaagcatgtcagataattaggaactgggtggcattttatgctaaggatcaaaacaaagattttgcttggaatgttgagcaaaattatactctggctgagattaaacacatggcaagcatcctactccagtatttaaaatcatcaggcaggctttattctatttttttgggtctttgttctttcatgttttcctctaatgaaaaggaatgcttagaaaatagcactgggaggccagcaagaaatcagtgttgggattttctcatgtgtgaggagctgttactgctcctgtcgcctggtttcacccctcggttctgctcccaggagctggacccctccccgctggcccctctgtgctgcaagcatccattttgggcttggggataatggtcaagagagttggttggtttgggctgtgggctggacaagcgcttgctgcttaaaccatgttgattgtggcttaactgctgaaccaaaccaatacttcatccaaagaacttctccagggagggagtgggcttcaggggagccacatgggaagccccctaaccaacatttctgtagcacttgattggagcctccaaacaccgtcgctgtcgatgctacagcagtcctgtgggccgcagaaggagtactcactgtgtgttctccatgcccttctgtctctgagaagcagcgtggcgtgttcggattgtgccctcctgccgaccccggtggctcaggcaaagggcttgccagatggtcggtgttctttgccaaatgggaccgatagcgtgcgcatggtggggatgaggggaggactagggaagtaaatacagtgcctgctgccacgtcaccttcacacagtccatgtttaataagaggtcgctgctgtgatgatagggggtcggccagacatgtccactgtttaaaaagcagcatccatctgaggactcattggattaaatgtacacctaaaaaaaaatacagtggcacctgcatgcagtgcccgaggatgggtgtgctgttttactagatctggtgttttttggaggtgcacatttggtagttcattgttgggttggtatttgtctccataacctgtttcagcctcaaggtcatttacctttgatcagtgcttcaagcttagcggtttgtttatatacatgttcatgtataaattatattactcagtctgatcataatatatgcccagtgcaaatcatttcattaaagcctcagggatacacggtgccaccgtttcctcattcagggacacggggatagtggtagtgtgtcttcagcacgacatggggaaattcaaaggcagccatccgtggaagagccaacggcagcccgtgcaggcgtcagcgcctggggaatagtagcagtctacatctttagctgtcagggtatctcgttgtagcctcatcctgccctctttaggggtccttggatgagttatcagttgtagtattgacattttctgtaaatagtgtcactcaagcgagtgacagtgggaagcagacaccagcccttagggagcagcccaggatgcttttttcctccaaatgcctctcacctattcccagatactcgctggagttggagcacacatgtctgcagatgtaaaacgacctgctcccccaggtgaatggattctcgccagggccaatacttatccgcaggggtgtgtgccaggcagcccaggtcagcctccctccaccgggccacccgcaccaggttgcctcccatcgtttgcaggagcggaagacccgatggagcaggtttcacagtgccctcgctgctgcctcccgtttcatctgcacgtctctttcaatgcgggcgtgcgaacttccaggtagagccgagttcaagaaaatgaagtactgcatgcgacgagcaagtttattgaagagggtgtgaggtcgcggcgcctgaccctcattatgtcagttactactaaatgaaattagaacttcactgccctttttctttttcccatcgaggtgcaggaggaattgatcttagggtagtattttggatttagaaaaaaaaaaaaaaaaaaag

SEQ ID NO: 24427 - DNA, 2198 bp, Homo Sapiens
ggtctgaggctcctcagtgagctcattggtgctgacgttaagcagagattggcagcattggatctgtctgtgagacatgaaaagccaagccagacacaggatgtggactgccgaggccaggctcacataaataaagctggaccctgggaggctgtaaggaatctgagttgggcttaggcaagggaaccgggtctgtcagtcaaggtgtgaggggtcaggttatgtgaagcctggtctatcagctgagatgtctggaacccatctttgacaggtatataactctgtagcctgaggcactggagttggacacaaataggcagaactaggtctcccaggtgaaaccattgcatcgatgctcagtgctggtatgtttatctggtgttgtcagtgagtctgccgatgcaggctcagtgctggtatgtttacctgattatgtcagtgagtctgtggatccaggctcagtgctggtatatttacttggttgtgtcagtgagtctacggatccaggctcaatggtggtatgtttacctggtgttgtcgtgagtctgtggatccaggctcagtgctggcatgttgacctggtgttgtcagtgagtctgtggatccagggtcagtgctggtatgtttagctgacattggcagtgagtccatggatccaggctcagtgctggtatgttgacctggtgttgtcagtgagtctgtggatccaggctcagtgctggtatgttgacctagcattggcactgagtctgtggattcaggctcagtgctggtatgttgacctgacattagcagtgagtctgtggatccaggctcagttccacagaggttgtataaacatggtctcaggtgggttcttgacacctgggttcaagcacaaaagtactgctgggcttgttaggtgaagtgggtggggtctagcacaggaatgcataatggtgaggctggccaggcctggggaaggtgggtcagacacaggtgagaccttcggtggtagggtcagacacaattaggtgagtagtgtgggctcttatatcaagggaaagccgtagtcattgtaggtgtttgtacctgggtctgcctggtgatgtctagggaaccctaaagatcagctgggacaggtatctgttctcagcaccctggtcaggtatgatagacagagctcagggtaatacagagggctgaggatctgtaaccagtccatggtgttggtctgcatccaagatggcattgtgctccagttgacacagggtctgagttaaaagtgaggaaagttgccaggcgcagtggctcacgcctgtcatcccagcactttgggaggccgaggtgggtggatcacttgaggtcaggagtttgagaccagtctggtcaacacggtgaaaccccatctcctaaaaatacaaaaattagccatgcatggtggcacatgtctgtaatcccagttactcaggaggctgaggcaggagaattgcttgaacctggcaggcagaggttgcagtgagctgagatcatgccactacactcaggcctgggcgacagagtgagagaccctgtctcaaaaaatcttttttttagaaagtgagtaaagtgaggaaaaaggtagatgatggttagataaggtgagatctggggcactggggcaggttaggcccaggacattgaactgactgaggagctgcatctataatgtatggtctcagaggccactgcacttaaaggtgaggtctagagacccatgtctgcagattgagggttcggaggctcaggtcagacactgcttggcattgctgggctgtcacaaaactgggatctgaggacctgttctcggccaaggtgagcagcctggactctgtcagccagagggctggctgtgtgctgaagtttagtttctagagctgagtctgggctgggtgtggtggctcatggctgtaatccctgagcttcgggaggctgagatgggaggctgaggccaggtgttcaaaacctgcctggacaacagagcaagaccccatctctacaaaaaatttaaaaaatagtcaagcatggtggtgtgtgcctgtagtcccagctactggggaggctgagatgggaggatcacttgagcccaggagtttgaggctgcggtgagctgtgatcatgccactgcactccacctgggcaacagagcaagaccctgtctcttaaaaaaaaaaaaaaaa

SEQ ID NO: 24428 - DNA, 2288 bp, Homo Sapiens
gtaacactctgctgcagaacctctgtttccatgtcaacaccctagtccctgcatgcacacaaagagggcaccatggctgattgtctccatggctgcttctcccctgcatcgtgtccttaaagggcaagtttcctgctgcacttgttgacgactcacccctttcagccccagtgtctagcacaatttccctgtacacagtatcaacagaattgtatttgttgaatgggaggcacgagtcatgttagaaggccgattatggcagcacaagaggatgtgggggcacagagagtccaggaatatcatagagacagacctgtaacacttggtagccaggagttggagcatcagggaggtgaatacagattttggttaaacatccccattttcttgtttagatgtaataattgatccccagcaaatgatgggatgccctgaaggttgtaaggctagttttgatggcttaggcctttgaaatccaatttggagctacagaagttagggccatgaaaagggagagttgatttggggtggaaggatgagttggtgagtttggtcacagcagattgatttgaggttctttggaaatacagagtagatttgcagtcattggtacccagcagagagattaaaactgagggcacagtggcagctgtgagggagacagaacgatgctcatgctttggattggcaggaaagaggggctatggcggaaacaaaaggagatgagggcaggggcacttttaggaaggactgaggctgctggcagtgtcacatgactgttgagaagaagggaatttgttagcaagtggttacatttagtaggaaaagtgttgagggcatgggtttggattaaaggagggagtgagcaattgaggaggaagtggaaattgggcaaaacattccttttggaagtttggatggtaaaaggaagttgttggggaagggaataacaggatctttatgtttggcttatttactggtctatggggaggaggtgggcgaggaaaaagctagatacaagacctgggcaaacaaagaaggctctggagggaagtgtaggttagaacaaaggtaagtctgagaggtaagagagaaggaacacactttgggcttggcctgaaatgagagggaatgaggaaaactgggtagagggcaaggatgctccagcctggtggctctgctctccaagaggaaggaatagagctttagaagtgtggatggccagagttcagggcagcctggctcccaagcctacctaaaacaaccatcccattcctagacccgtggattgaggactgggcagagatgaatcatccattccagggaagccataggcagaccccagacttcggggagcacctggccttgctcccacccccaccttcttctttgcctcctcccatgccttttccctacccgcttcctcagccctcgccacctcccctcttcccacccctgccccaggataccccttttttcccaggccagcccttcccaccccatgaattcttcaactataatccagtggaggacttctcgatgccaccccacttaggtaggtgcttctgcagctcccccaccctcttgtacctccccttacccagcctcctatgcctaggtgagctgagaggagttgggtagctccttgtgcccctagcactgggtttggtcacagcagtccctgagtctgaaacatcatctgtaggttcattaatcagctcactggttgtcactgtttcaccgtctgaaggtaggggaaggactatcccttttttgtagatagggaaacagagaagctcacctggaggacaagagttgcttcaaggcagagctgcactcactctggccagaagcctgctcttataatgactggttcttttgtaggatgtggccctggagtgaactttgtgcctggccctctgccacctccaatccctggccctaatccccatggtcagcactggggcccagtggtccaccgggggatgccacgctatgttcctaacagcccctaccatgtgcggagaatgggggggccctgcaggcagcggctcagacactcagagagactgatccacacatacaaactggacagacggcctcctgcccattcggggacatggcctgggtagactggatcttgggctgggactggatgtgccaatggcccttcagggcctgcctggcacctcaggtactgggctagggtgtctgctatgcctggtattgttcttgtccattgctgtcaccaataaaggcatggaagaacagaaaaaaaaaaaaaaaaa

SEQ ID NO: 24429 - DNA, 2961 bp, Homo Sapiens
acatactccaccttcaaaaagtacatcaatattatatcattaaggaaatagtaaccttctcttctccaatatgcatgacatttttggacaatgcaattgtggcactggcacttatttcagtgaagaaaaactttgtggttctatggcattcatcatttgacaaatgcaagcatcttccttatcaatcagctcctattgaacttactagcactgactgtggaatccttaagggcccattacatttctgaagaagaaagctaagatgaaggacatgccactccgaattcatgtgctacttggcctagctatcactacactagtacaagctgtagataaaaaagtggattgtccacggttatgtacgtgtgaaatcaggccttggtttacacccagatccatttatatggaagcatctacagtggattgtaatgatttaggtcttttaactttcccagccagattgccagctaacacacagattcttctcctacagactaacaatattgcaaaaattgaatactccacagactttccagtaaaccttactggcctggatttatctcaaaacaatttatcttcagtcaccaatattaatgtaaaaaagatgcctcagctcctttctgtgtacctagaggaaaacaaacttactgaactgcctgaaaaatgtctgtccgaactgagcaacttacaagaactctatattaatcacaacttgctttctacaatttcacctggagcctttattggcctacataatcttcttcgacttcatctcaattcaaatagattgcagatgatcaacagtaagtggtttgatgctcttccaaatctagagattctgatgattggggaaaatccaattatcagaatcaaagacatgaactttaagcctcttatcaatcttcgcagcctggttatagctggtataaacctcacagaaataccagataacgccttggttggactggaaaacttagaaagcatctctttttacgataacaggcttattaaagtaccccatgttgctcttcaaaaagttgtaaatctcaaatttttggatctaaataaaaatcctattaatagaatacgaaggggtgattttagcaatatgctacacttaaaagagttggggataaataatatgcctgagctgatttccatcgatagtcttgctgtggataacctgccagatttaagaaaaatagaagctactaacaaccctagattgtcttacattcaccccaatgcatttttcagactccccaagctggaatcactcatgctgaacagcaatgctctcagtgccctgtaccatggtaccattgagtctctgccaaacctcaaggaaatcagcatacacagtaaccccatcaggtgtgactgtgtcatccgttggatgaacatgaacaaaaccaacattcgattcatggagccagattcactgttttgcgtggacccacctgaattccaaggtcagaatgttcggcaagtgcatttcagggacatgatggaaatttgtctccctcttatagctcctgagagctttccttctaatctaaatgtagaagctgggagctatgtttcctttcactgtagagctactgcagaaccacagcctgaaatctactggataacaccttctggtcaaaaactcttgcctaataccctgacagacaagttctatgtccattctgagggaacactagatataaatggcgtaactcccaaagaagggggtttatatacttgtatagcaactaacctagttggcgctgacttgaagtctgttatgatcaaagtggatggatcttttccacaagataacaatggctctttgaatattaaaataagagatattcaggccaattcagttttggtgtcctggaaagcaagttctaaaattctcaaatctagtgttaaatggacagcctttgtcaagactgaaaattctcatgctgcgcaaagtgctcgaataccatctgatgtcaaggtatataatcttactcatctgaatccatcaactgagtataaaatttgtattgatattcccaccatctatcagaaaaacagaaaaaaatgtgtaaatgtcaccaccaaaggtttgcaccctgatcaaaaagagtatgaaaagaataataccacaacacttatggcctgtcttggaggccttctggggattattggtgtgatatgtcttatcagctgcctctctccagaaatgaactgtgatggtggacacagctatgtgaggaattacttacagaaaccaacctttgcattaggtgagctttatcctcctctgataaatctctgggaagcaggaaaagaaaaaagtacatcactgaaagtaaaagcaactgttataggtttaccaacaaatatgtcctaaaaaccaccaaggaaacctactccaaaaatgaacaaaaaaaaaaaaaagcgaaagactgcagttgtgctaaaaacaaaacaaaacaaacaaacaaacaaaaaagtaaaaaaagattactttcgagagagaagtttaagcttcaccaatgctgctcctgaccaatggaaatatgtacaacttcagcattttaagtaactggcttcaaggggtactgtggcaaccaaataaaataactccattttctaaaactttcatgtaacttttatgtctggactacagttcaagtggacaaaaacatttctgtattttttttaagtaaataagagtagttgaactgagcaatacctcctcctgtgttgtattacacatattagccacgagtttttgcagtgaccagataaacttgaattgacacgtggtgtaataaaatggacaaattctgtagagtagacacagtgagtatgtggacctcttttataaggaaaaatacattttggattaaaatcaattgcttctgtcttgttttgtttctaaataaagaataatttctgggaaaaaaaaaaaaaaaaaaa

SEQ ID NO: 24430 - DNA, 2913 bp, Homo Sapiens
gtgaaaatagttaacatattggcttatggagagcaatctcacgtttaggataaatttagtctggcagtgcctacaaattaagtctgaggtgaactacttttgaacagttgagttagaaagtatttggtagccaccagggaaaagagatcttatttcaagaaaataattagtgaaactcagtaaagtagaagggagattagaaggaacaaagggaggcagagatgggatagagactggttgcaacttaactaaatttggaagctgggattaagcccttgatttatcttttgaaatgccatataagatagcataagatgtaccattaaattcaggaaactgggctaataatcagaaatatgtgttagaaataaagaccatggtaaaaatggaagggttgtacaagagaataaaattattcaggttttgtctgtggatttgcataatgatatttatttgctgtgtgccacatggcagaaaaggaagtgaaataacacccctctgtcccgtccttttccccagaaagaaatcactggcttcatttgttggtttgtttagctggcagcttgagttggtagaacagacgagtagattgtctagctttagacgtaggtattagtgtactgtttcttgatcattgatgtttgagacctggaatttgtagcattattgatttgacctctgttttaaattttagcggcttccacaaagactgagttagtaaggaatacaactatgtaagtaatatgttttactagctaatttgtctaggcaattatttttaccctgtattcattccttcttaatcaagagtaaggcaggtattctttgctttgggaaattcttctttctgtcctcccttccctcactttttccaaattctgggcacaacagcagctctctctcttctgtggcaggtgtgcatcctattggctggctggtatttcttgttttttttcccccttattctttttaaatgggggtgggggtataaaaatatgtgtatggggtacatgcaataatgttgtaatgtttcttgttgtttaatggataattaattgcaaaataattgttttaattataacatgtttgagtaaatgctaaattagtatttttttctaatataataatgaatttgaaatctagcattcctgtaacaatgtgtctatgtttgtctgtctgtgtctgtctaatagtaattaatatctgtggtccgtacctggaagaggaagtacagctttaaaggaataacaaaagactttgtgtcttagacccttcgcaggtgttacagtcgggtgaaagaacatggtgttgggaaaagaaagagcagttacacatttgaacagttggaacaggtgtttggtcagggaggatgggatgctcagccctgccagcctgtacttattaacagtagtggcttgtaccaggagctggagtcagatggcagcactatggaggactattcacaggaggactggggaaaccacagtcaggatctccatggctatccaacagatcaggaattggatgaaatacctgtcacaaagagaacattaaaaataaaacaagagtcttctgaagaagcacagaagagagacatcatgcagaatattgtacagattttggaatcggtacagttgaaatgggaactttttcagagctggacagacttttcaaggctccatctttctaataaactggccatttttggaattggttataacacccgttggaaagaggatatccgttaccattatgctgagatcagctcccaggtgccccttggcaagcgacttcgggagtacttcaactctgagaagcctgaaggacggatcattatgacccgagtgcagaaaatgaactggaaaaatgtttactacaaatttttagagatcactattagcgaagctaggtgcttggagctgcacatggaaattgactggatacccattgcccactccaaaccaactggtgggaatgttgttcaatatttattgcctgggggtattcctaaaagcccaggcctttatgccattggctatgaagaatgtattgagaggcccctctcaccacacatggagcaaagttccctggacccaggaaaagagggccgggttgacctggaaaccctttcagcacaagcctcattacaggtggaaatagaacccacccgaattatctattgctacctcgggattgctgaggtcaggactctacagcagtgcttatttttacatttccaagcgaataccaaaaccttcagcaaagattgggttggtattaacgggtttttgtctcagaactgtattgtggatcccggagtttcccccaaatccatctacatcaaatttgtagaagtagagagggattttctttccgcaggctctttagttgagtgcctggaaaaagccattggataccccttaaaatttaacaactgaatgtcatccttcataaggatttgggctcttagctccttcttctctactcacttcccattacccggaccacccctcatccagatgccgccgtcagactcttcatggaaaccctttcttcaattgggccagtacgacttctaaggaatcatagtagacttgggccagaaaaaacagacctcacctgaaaatgctcattttgagcaagcaagatatatagcgaacttgcatggtgggtcagctatttcttttttaaaaacagaaaaacaatttttaaatggattttagagccctaatataaacaaatgtaggtacattccatattggacaaaacttatactttgagtttcatatgaaattgaaaaattgtatttttttcacaatgtttcatttttacacatctctatgtctctatataagtaatatttacaaccctgaataaataagcaatagataatggcaaaaaaaaaaaaaaaaa

SEQ ID NO: 24431 - DNA, 957 bp, Homo Sapiens
gtcatctctgtaggctttatcctttaattaattatggatttttatctgcatatatgtgaagctaatgattgacttggttcggacactgaattgtcggcttaaacctgccattccactgggcttcatcactatgttctatgggtgtgaagcctttgttttttcagagacccatttccaccagcgggtttgcactgtaagtgtttccacaggaactctgccctttgccagtgtcactgttgtggctatgcagcagaacccacagggcggaggtgtttcagccctcactgaaaatgcaacagatcttaacatctcttgctgcaaattttccagtgtgttctggtctaccttggtatcttaaaaccaggctcactgactaccacatgagaaatgacagtggggtgtcttaaatgatctgttgaagaccagcagccaaaaagattgcccttagtgtttctctctaccggctaacattagacaatgccatgtagaagctgctgttagggtttgagaactgtgtcgcctcattctcaagatagccaaggaagtgtcatctctggagaaggcagttctgtctctttcagtttctccatggatccgatattgttctgaaagaggtggttttaccaattcgtctcacacagacttcttgcctttacttttatctgactgctgacagggtgggctggaatataatcgctacttaactggacttgactttcaaggcctgattggcgtttccagtatagcagttgcctgagtcatctagttttggaactgataaatcaaaggactggcttggaggctagtgtcctgtctggagaatgggcttaatgtaacttcagttaagaaattaatgaatctgaaatagttataacccaaggaagagattttcctaaagaatgtccctttagagaaataatgaccagttccctcaaaaaagaaaaaaaaaaaaaaaaa

SEQ ID NO: 24432 - DNA, 4983 bp, Homo Sapiens
ggaaggtcctagtagaaggcattcccaagtgaggggagccctggacctgtctatcctcacttgggaaggtcctagtagaaggcattccttctgagtctcctggccctacagcttctcacccctgctgctccccaagacctgacccggaccaatcagctgcatctctgcaccaagtgccacccccaccgtgcactgatcgcacctcacgctccccatgggctggcccggaccccagtgaggtctgcacctctcggaccagccaggacctcggaagccatgacctgggtgttcagggcttggcggaggagacgctgctccgcgggggatggagaagccccgcccctccacaactcccttaatctggatgcaattagaggaaaccagccaaaaaccccgcggcagctgttgccccgggattattcccagccagcgagaggcattagggcgataattcagtcattagacttctagccttcccaccgccagaacgtgcaaataggggataatcagccctgcacggccatcctcagcaatgctgcttatttaacccattttttaaaatgacacttaatgttattggctggcgtacgtgtgtgcgcatacttaaaagttgatgcgtggtgcagctctgctgctaatgtctgctgacagcgtcgcccgatgttgctcagggcctctgggaagaggggacacctttgatgtgggcgtgctggcacccaagaggcagcgtggtcaggctcgatgcttgccagccctggaaggtcccgccagggttggggggtcgggtgagcactcagagatctggggaggaagcgaggagcctggtgtcctcaccaggtgcagaggggaaatgcgtactgctccagaaggttctgactcaagtctcagccctgaggactcagaactcacaagtcatggatcaagtacagagggagggagggccccagcccacccctgcgggggaggaggagggtctgaaggtgggagggcagctccatgagcagccactgttcctgaccagccgaagtgccaggcagggggaggtttccatgtccaggagggagaggacctccaccctctgacctttcagttttccatagcagcccagtgtgaagctcggcgggggtgggcagggcatcaggacaagatgaagatgctggctctggaatgaggactccccttgggctaaggggtagtggctggcagaggttgcccagctcttttggaggccacagggaatagaggtggggtggtgcttccgttcctgtgaggcccgcccccctgagccccctcgtctgcttcttgtttggcagaaatagatgtggggcacagcccctagatgatgggaatctgcccaagctgtgtcctctggggaatgaaatcttgctcctcgtgcagcttcccctttcccttgcggggtgggggctgggggtgccaaggctccacccttggagggggttgctgggggtgccaaggctccaccctttgctcgctgggcagagggaaggaagcacctccctgtatgctctgcaggggcccctgcaggccactttgcctcagaggaaggaggagaggtcccctgggaaaatgcgcacacacacacacacacacacacacacgcacatgcacacacgcacgcatgcacacacacacacacatatgtgcaggggtgcagcctaagtcagtggagccaggactggctgcgcagctgggcctgccccattcttggagtccccagggaatgagcctcaggatccacttcgtcccttgtttctaagccaggctgcacggccgttcctgggtgtgaaagcattctgtcctgtctccagtcagagggaaccgcccccaaactagaaagctaatttcccccgaaggttcatgaagccagaggcatgcccttgggggttggtcgggagaagggtgagaggcagtgctgtggaaggggcctggcccctgctgcctgcgattctccccgggtatgtggccttctgcctccttcagcctcagtttcctcacctgtaacatgagaataatgatgcctgcctgcccaggccacctcctgggactgcagtggggactctaagtgtaaaactgtcatgaggatggtttatgaagtcccagggaccacacctgccactcagggaagagaccgctgacctcagccatcagccgtgtgcatcgtgaggggcagcgagctcaggacggagagctctcccttggttcggagtcagcacacctgcactcccacacgcccacccagctgtgtgtcctccgccgagggcgagcctctctgtgactcttctgtaaaatgcaccccattctgcccactcctgccacgagacccatcctctgcgatcccgccaggcatgtgtgtgtgaatgcatgtgcaaagctctccatcagaagggtggtgtgggccctgcaggtcctacccctcggccttgaagctccctcgggctgcggactctgcctcctgggtctgagcattagaaccaggagaggggtgtccctgggcagagccaggggtgcaaacagcctgcagccatctggccttttaagtatagtgtgtcgcatttccgggtaggaaggtagcatttcaagttcaaagagaggtcaagtcatgcaaccatctttcctccagcacttttggggtaaggaggacagtttttgttatggtttaggggaaattttcatgaaatttccaccattaccaatagattactgatgtccatggcaagtgatctgttcttggtattttgttttgttttggtttggtttttaaatgtaatcacccattggtcaggcccaggactggtcaccatgagctctgctagccacggccccaacgatgcttccggctctcatggattccacagcaaataaaactgtactgacaacagatgcacgctgtacagtgcctctggaaggtgcggtgggacttgctgggtcaaagcacggcaggctctgtgctgggcaaacagggccccgcggcagcccaagggcagcctgcagacgccagtgtgcccggcttctcccatgttctgagatgggggaggggaaggtgtaaaagagagctggatgggggctgtggggactgagggtcctgggaggctggccaggggctcagcaagcgcccactttgggaggccttgccctctgggctgtggttggacagcactaggcctgcaggctgggctgccaggaggaagagcagctccggacctcaggcccccccagcaggcggcgatggagggtgatgggagaattgacgagtgctcgcggggtctcactcgggaaagggccggttaactctgagcaactgggagcctcgctcccaccccagtgcctggaaacacaaacagtattttattgagccttggctgccggggctctggtttcaggaaaagcctcagtcctgcatttgtgaatttttaaggaggcaaacaaggtgaatttgaccttcctaggagtgggagttagggaaaattcaggctgccctaccaagcccttggaaccgtgcagcaggggtcaggggagggatgggcaaaggcggtttggcccatggagcaggtctcctggtcctcccggagcacggggggcggggagctccagctcttcatcaagcgccctttggggtttccaactgttttctgttgttctctgtgtgtcttttccccttttgcctgggggcgggggctggaggggaacatacctcttatctacatcactcgggtctcatgtctgaagggcctgtctcacctgccacctacctggccttggcctcgacatctgagcgcctcatcacctcctctccacatgcccaggggtgcccctcccaaggctggctgggcaggtcccacggactaggccccaggaggagcagtgggcttcccccaggaaagagcagagccagcactgcctgcctggggagggcacccactaccaggcatggctggtggctccgtttaaagaaatctttgtccatgtgggagtgggaggtgcttccccatcctgcctggaagccacgtcctggctcttaccgtggactctgcaacagccgtggtggccacatgaagatggagaaacctggtggctcaggggcccctgatgtcaccgcctccaaggcaacgggactgggcagggcagctcctcaggaaggatgatcccacctgcacgggtcagccctgcagggggacaaggcccaccacaaccccacctcaggccaccaactggacctgtcctgccaagaaggtcccttccaatttgtccggcagctggttccctggatacagcccagacgcagcatcatcctcatgttcacctctgctgtgccctacttcccccgtaaatgacaactgtgtagtcacccacgccgggcaagagaacataggtgccacctggcgggccacacttttcaggggccgtgcctcgggcaggcccggctctctgttgtcccgcagccctcagggctggcggtggctgctcagtgcctagggagtgcccttgccacacagctgggcagcgagcatgactcagcgtttacactcaaccagccgcacaggctccagaggggaagttctctggggtccttctatgagagagcatcctgtctgcagccctgttctggctccttccacatcattcatgcattcatcccacgaggactatggtaccgtgggctcgctctagggaagcaaggcaggagcgcactggggctacttggattcccggggcagacacatatgtaccctgcacaccctcaaatgagcaaagccaccccactggcccctgggtgaggccatgtggacccccacacctttggggccggctgggcaaaccttgaacccccaatttctgcgtggcctttggctgccctccttctccaaggcgtgactcttactccagagactcaggcgagcacgtgtcccttaccttattttctctcaatcaaactgaaacccattgtgaaaaaaaaaaaaaaaa

SEQ ID NO: 24433 - DNA, 1735 bp, Homo Sapiens
gattgcaaggtccgatccattcccatcagtgttgaggagaggaagagaggtcttgttggagaagagtagccatcgaggaggggacagtggtgctagggcttccttcagcctcccagcccccagcacaggagagggagacagcagagagggccggagggagggagctggtggcttaaaatggagccgtttacaaccccgcacagcaaatggagccattgggaggacacttgaccgagaggagagcattgcttgagccaggggtgccgtctgcaggacagagacaggaggcagtgttgtttccagggcatcgtggaccatggcacaggtgagcaatttaaaaaggtgattggaatcatatgttagaataatgaccttagcagtcaaaggctcctggaatttgtcatttaatttcatattttaggtggactgatctgtaatttagttaatttcacatctccatctaggaaaactggagctctgcacaatattttctgcagacgacaaagtattcacccaaactatttctcatagtaaaatgtgctctttgtccccagagaactgctgaatactacataagatctgtgtaggagccatgctttaacaacaacaaacacctcagacacacaacaaccctttcctccctcgataaagatactgaaaagaatctggtctctggggtgaggagtaggggaagcaggtgcaagcaagtgggtgcagaggagtgggaagatggcattttgtgtaggaaagaatttaacgttgcccaaagagaggtctggcttttgtcctcaccttctgggaggtgaactctaagcccttggaatatcatgcctgattggagtttgtttgcctgggatccttgtgtcacagaatggtctaaccatatgatttagggtagatgctggccacactggataggtttagggtaggggttggctgtgccagaaagaccaacaaggtgacttagggtggggtctttgggtcacgtggtatcagctgactctggaggagctggagagggagggcagtcacctgtgtgatggagccacaataaaaactctgaacactggggctatggtgagctgccctggttggcagtactccatgggtactgtcacacatcaatgccaggaaagtcatgcttttcatgattccatggggaagaggacagtggaagctccatgtctggtaccttcctggactatgccctatgcccttcctcccttggctgattttaatctgtatccttttgatgtaataatgtgcaactgtgagtatgagagcttttgatgagttctgcgtccttccagtgaatgatcaaacctgagggtggtctagggtaccccttgcagttggtgcagcaataaaggtggtcttatgtggatggtgctccctttaacttgacaggtggctaactgatatggttggctgtgtccccacccaaatctcatcttgaatttccatgtgttgtgggagggacccagtcgaagataattgaatcatggaggcaagtctttcctgtgttgttctcacgatagtgaatacatctcacgagatctgatggttttaaaaacaggagttgccctgtaagagctctttctccctttgcctgctaccatccatgtaagatgtgacttgctcctccttgccttccaccatgattgtgaaacttccccagccacgtggaactgtaagtccaattaaacccctttcttttgtaaaaaaaaaaaaaaaa

SEQ ID NO: 24434 - DNA, 2791 bp, Homo Sapiens
gcagcgaacacaacccccctgccagcctggccccagctactcccaaacggcgggttactccctccagagtctcaccagaagatggctactgtactgcccttgggctctgcacccgtcgcgggggctcctcccagctcagtttaaaagtgggaaactggccgggcgcggtggctcacgcctgtaatcccagcactttgggaggccgacgcgggcggatcacgaggtcaggagatcgagaccatcttggctaacatggtgaaactccgtttccactaaaaatacaaaaaattagccaggcgtggtggtgggcgcctgtagtcccagctactcgggaggctgagacaggagaatggcgtgaacccagaggcggagcttgcagtgagccgagatcgcgccactgcactccagcctgggcgacagagcgagactccgtctcaaaaaaaaaaaaaaaaaaaccaaggtacaacccccaagtatctcccctcggatcacagaagcggccaagccccctccatgtaggactccaggaagaatgaggcaggacagtcctgacctccccagctcatggctgagctggagaattagaagccagctgcgtagctgggactccaggcaaacaccaccatgcccagctaattttgtaatttttgtagaggaggggtctcgctctgtggctcaggcctgtctcgaactcctgaggttgcccaggcctgtctcgaactcctgagctcaagcgattctcctgcctcggcctcccaaagtgctgagattacaggcgtgaaccactgtgcccggcatggtggatgtccttgactgtttcctttgctgacctccctccagggagggcaggactgtgtctgacctcaggggcatttgctggggtctggggtggtcctctgtgttcagcaggtggaggctttgggagtcacaggccactacctcctttgcaggggaccggcttcggcagacagaaaaccgcgccacgcgctgcaaggtggaacggctgcagctgcttctgcagcagaaacggctccgtagaaaggcccggcgggacgcgcggggtccgtaccactggtcacccagccgcaaggccggccgcagcgacagcagtagcagcgggggcggcggcagccccagcgaggcctccggcttgggcctcgacttcgaggactccgtgtggaagccagaagtcaaccctgacatcaagtcagagttcgtggtggcttaggatcttcggatcggccaccctcgcccctcgcaccccagcccagggcggcggggactccgagagccccggagagaacgtggcccagccctggagggcaggcggccactcccccagccagaagtctttttttcttttcttcttttttattatttttttctttttttaaaaagttctgaccgtggtttcctggactcttcatgggctttgcttcctacctccttcacccttcactcctgccctcctcttcctcctcctcctcctcctcctctgtctgtctcctttcacctctgcgccaggtcggtcctccctgccaaccttccccagctccaatatgtagcagtctctctggatggcggagagtgaaggagacggagaaacgcgccccatcccttccgccgcctcctttcccccccgaccctattcaggttttaagtcaaaaatgtcgatatgtcattatgcactttacagatgaggggaggggccgcagtgcgcagaacccaccccaccccccagtgcagacttcggggtctccaccccaggccagcagcgcccactgggctacagcaagccaacaggtcacagaagccaacgaggggactgtttctcttccactcctatcctcttttcttgatcttttttttgcattttccttcatttctttaacaaggagagcaaagctgttttagcagaggctggggctgaggtccccatggggtttgggtgcaggggcatggcaccctttcctgtcgggaagggagaggggaactacccccccagcctgccctccgccccgccccagccggcggactgtgctgtttcctccgcccccactcccgtgttttctgacctcctgcctgagtttggggtatttatagactattaattttctgactgagccaatagtggttggggaactcttgaaaaaggggagagaatggctgggtgctggggagttcccccctccgagccctccttcccggcccaacctgagggatgtggatttgggactgtctgggggcccctcctgcagcgaggatgggagggggtgctgagctgtgaatcccctgggcagggggcgacaactccgtgtagcattaacccccgtggcggggtccgctgctggtctaatttggaccccctgcctctcagtgcccctgccctaggggtgtctgtctccagaggggagggacaaatcccctactggggccatttcaatggggtagtttttggatttttttccccactcactttttattttttaatgataatggagatgtctggacccttcctcaccccacctgtcggtcttgtcctggctctgcctgtcccccaccgttgttctcgtaggtgaaccccaggtcctcaactccccccctttatgtgttgaaagttaatggtttcagatgtgaacatcacgtgttataactgtagcgctgtaaatttttttgtgggagggtgggcagggaggggtcccagagggtagagctcaaggattttgggttttgttttgttttcatttttccaaaaaaaaaagaaaaaaaaatagaaaaaaaaaaaaaaaaa

SEQ ID NO: 24435 - DNA, 1954 bp, Homo Sapiens
ggtgaccacacggcaatccttaccctttgtctgtccctgtctcccttgtctctgtacctctctgcttacccctagctgtttctgtgtccagccatctgtctctacctggatcccaatgatcctgaaacacatcagtaaagccttcttcatcactgccacgcacaacagacttgtgcctgggagttctatctgtgtgaatgcaactgcagaggaggaaagagtgaagcaaaaattgggagagtttaggggtaagggaagtctacctcacagaacagaggtacttcccttggggttggaaccactcgtgtttgcagtttcagtttctgggaaagaaagggaatgaacagatttatcacactggaatcttgaaaaggcaaatcgccaacacctgagacgcggtcaactctggtatgtgccagtgaggggagaacggaaggacccagggctcgcagcctcagccggtcattatggcaccttgctatggacccttccttcaagacccaccataaagcccatccagagcccttccaagaggccccgggagtagttttctccagagagggcagtggtacggggaccaagattcctctgacttatatcaaaccagaggcaactcccacacagaggctgtggaagggtaagcctgtgtgcctcaagaaaaatgcttcaaagcaaaagcaagtaagagattctagatgattcttacctgctatgaaagatgccttgatgtctgaagaggcttcggcctgatctccctgaagatgctgaaatgggggagaagcctgatcacctctgtgcaagcaaaggagtgaagattatttcttgaacacctggacaacatatctgttcaactagcttgcaccctggtggagctgggggcagcatttctggaatcctcctaaccattgttcactgcttgtagcagagtaggtgggcctcagggttagtgacaagtcctttcctgcccttcccaacacccagccaccttgctgcagtctctgtagcctgggctctgaaatacatgagctcctcgggagctgcctatccatcctacagcttagtggttagctgtttaattgtaggccaagaatttctctccccaccacagccatctaaatgagttttactagccaggaacctaaaaacacccttcgtgggcttccctatgaccccagctcgattgaccctgtaggttcaaaaggtttcgaggtggcacctaaccagaatgtgggcagaaggcagaggagagggagccttctttctgtctttatctctttatgcttatcctcattgaccatgggctgagttctttctctgggtcccctaatgtgggaatggagtggttcttgccctctgagcttacagactaagaaggcagaaaagctttacaactacagagtacatgtgtatacacacaaccaacctaaacacatcagagaatacatacttaaatcaattcacttcatatacacatctcattagaagaccaagctaaacttcacttagagggcgggcaaaggactagaaaagaatttttctcttaaaaaaaatgagtactagagcaaaattatgagtgtctaagtatcttagttatgcttcataagatctgactggggtaagagataaagaggtaaatagggctgggcgcggtggctcacatctgtaatcccagcactttgggaagccgaggtgaacagatcacctgaagtcaggagttgaagaccaacttggccaacatggtgaaaccccatctctactaaaaatacaaaaattagccaggcatggtggtggacccctgtaatcccagctacttggaaggctgagggggaggattgcttaaacccaggaggcagaggttgcagtgagccgtgattgcaccactgcactccagcccaggtgacacagcaagactccgtctcaaaaaaaaaaaaaaaaagaaaaaaaaaaaaaaaaa

SEQ ID NO: 24436 - DNA, 1396 bp, Homo Sapiens
agattacagaacatcacaccttggcgtgatgaaatcatgccaagattctgactctccctttccggtgatactgctcatgatttctcctaatacgcttcaagcaactgttaccacaaaaaatacagtttccgcagggctttaaaggattgagtttagcatgtatatcatgggttattaaagttcacgtgattcatgtgaaattaactgtcctttttgctagtgccaaaacagtgccttctctgcacactttacttgtttataaagttctcccacatgtccttaaatatcaagggggaaagtatggatattcgcgtagcaataatgccagcaaaggtcattttcattttttagtcatatagatatgaaaataagttcatatagatatgaaattgcttgactttattgttttggggagattttttttccttacatgattatattaaacactttaaaatagccttccggtttctggattttgagaagcctgatctgttattgttgtggttgttggtgtttgtaatattcattattgtttgtatatacacggtttagtcttactgatttcaaatgcattttgttattgctcaacccaactggtaacactgtttgctgggagcattatacttaactttgattcaccatggttgatgccactgccatgatcgctgggtcttaaagagctttccctagccactgacagccccgtggagatcataatcagggccccaggctggttccaggatcaggcagcctatagagtgtgagcatctatgtgtagctacccttgttgggtgggctcttagactgatggggtaggatatgaagtgaaagacttcaaatgcaagtaaggtagtttgggctccttaattccaaacatcccatgagtatatcaagatgaataaggaccaagggacctctgtgactcatagaagggctggctgaatcctgaagtagcatagtgggacctggtctacaatttatgcacatgcactgacagccttgctgtgccacgtgtctcaccaagacccagttgggaaagagcgtcatattgccaacaggttgggtttctctggcctccacctgattaatgggccctttatctttggtgtcccctaggagtgtccagttgttttattgctgtattttgttattgcagtacttaataaaaattgttgatagggcccaaaaccctacagaaattctatgtctgtaaaaaccaacaaaggcattggacttgtgtgaatgtacagggtttttttagtagtaattttaaatttaaatgttttaagtgatcatcagtgttcctttttacttataaagttggattcctttttagaatttgtaataaataaaaactgctgctttaccactgtaaaaaaaaaaaaaaaaaaaaaaa

SEQ ID NO: 24437 - DNA, 479 bp, Homo Sapiens
ttaaagatgaccagtggtgggttctgatgggaatatatacactcatctggactaggccaatggaagcagtctctttcagttcacctccgtacagcacaagttgttcctgctcatgacctcattgaggaaaatgagaattgtggtgctggtgactttcatgtgtcttgggaggttgaggtgttcaacatcgttaaggcactcccaaaacgcaaacctccttttttaaatgccaattgtacatctacattaattcatctatgcaaacttgtgttttcatggtttgttttttacactatatttctcattaggttctttaaacatcaggtttaatattgatattatgaataatttttaaaccaaagtattctataagtctgtgtgctttgttttcctggatggtttgaccaaggtaaacatcagtcttgtccttctctcttaataaagtcatccatttgttaagtcaaaaaaaaaaaaaaaaa

SEQ ID NO: 24438 - DNA, 4213 bp, Homo Sapiens
tccactcctggagcccgcggaccccgagcacgcgcctgacagcccctgctggcccggcgcgcggcgtcgccaggccagctatggcccccgacccggtggccgccgagaccgcggctcagggacctaccccgcgctacttcacctgggacgaggtggcccagcgctcagggtgcgaggagcggtggctagtgatcgaccgtaaggtgtacaacatcagcgagttcacccgccggcatccagggggctcccgggtcatcagccactacgccgggcaggatgccacggatccctttgtggccttccacatcaacaagggccttgtgaagaagtatatgaactctctcctgattggagaactgtctccagagcagcccagctttgagcccaccaagaataaagagctgacagatgagttccgggagctgcgggccacagtggagcggatggggctcatgaaggccaaccatgtcttcttcctgctgtacctgctgcacatcttgctgctggatggtgcagcctggctcaccctttgggtctttgggacgtcctttttgcccttcctcctctgtgcggtgctgctcagtgcagttcaggcccaggctggctggctgcagcatgactttgggcacctgtcggtcttcagcacctcaaagtggaaccatctgctacatcattttgtgattggccacctgaagggggcccccgccagttggtggaaccacatgcacttccagcaccatgccaagcccaactgcttccgcaaagacccagacatcaacatgcatcccttcttctttgccttggggaagatcctctctgtggagcttgggaaacagaagaaaaaatatatgccgtacaaccaccagcacaaatacttcttcctaattgggcccccagccttgctgcctctctacttccagtggtatattttctattttgttatccagcgaaagaagtgggtggacttggcctggatgattaccttctacgtccgcttcttcctcacttatgtgccactattggggctgaaagccttcctgggccttttcttcatagtcaggttcctggaaagcaactggtttgtgtgggtgacacagatgaaccatattcccatgcacattgatcatgaccggaacatggactgggtttccacccagctccaggccacatgcaatgtccacaagtctgccttcaatgactggttcagtggacacctcaacttccagattgagcaccatctttttcccacgatgcctcgacacaattaccacaaagtggctcccctggtgcagtccttgtgtgccaagcatggcatagagtaccagtccaagcccctgctgtcagccttcgccgacatcatccactcactaaaggagtcagggcagctctggctagatgcctatcttcaccaataacaacagccaccctgcccagtctggaagaagaggaggaagactctggagccaaggcagaggggagcttgagggacaatgccactatagtttaatactcagagggggttgggtttggggacataaagcctctgactcaaactcctcccttttatcttctagccacagttctaagacccaaagtggggggtggacacagaagtccctaggagggaaggagctgttggggcaggggtgtaaattatttcctttttctagtttggcacatgcaggtagttggtgaacagagagaaccaggagggtaacagaagaggagggacctactgaacccagagtcaggaagagatttaacactaaaattccactcatgccgggcgtggtggcacgcgcctgtaatcccagctacccaggaggctgaggcaggagaatcgcttgaaccggggaggtggaggttgcagtgagctgagatcacgccattgtactccagcctgggcgacagagcaagactccatttcaaaaaaaaaaaaaaaatccactcatataaaaggtgagctcagctcactggtccatttctcagtggcttctccatcctcatttgcaaacctcagagggataaggcagttgaacctgatgagcaagaattataacagcaaggaaacattaatgcttagaattctgagatccagcacaactcagtctgtgggagctcagctcgctgcccagggataggtatgacctatgtctgccttaggctgctgggagatgccattctccagtttcagaagcaggcagggcaaaggtcaagactgtggtattggggtcttttggctctgaaggatcctggaaccactgattttggtttattccctccagggtctaaagagaacaagaggtgctagctcttaccaaaacagatggtagagagagttgctggctatttaaaaagctctttcatcttttaattcacctcttcttttcacctctttaaccactcctcaggaacagaacacttctaggactgggggtcttttagctccataagcaagtgagcagatgggacaagttagtcttttctccctagaaacaaaggggatgcccagtggtttccctttgcttcccaacctaaaatttcaagtttaataaaatagcaattagcagaagtgaccaaattgggagataattatcagtcatgaggaaagacacagatttcggtcataaagaatgtaagggctataagtagaaactttctataacctaaatgatgttatagaattatttttgagcaggagcagaaagattaaatatgatcacttcatacttctaaatcagaaataggaagattaaaaccacagaacagtttgtgatttctattgctgtagctaggtatcttactctgtccactcttgttcaagtatctaactcttctggaaaccaaataggctttagaagagattatcctatattcctatcagtataatactaaaatgtaactttttaatcatctggtttttaaaagataaacagtttagcccatctctccagagagcaaacataggaatatgactcaggagcctcctagggcttatcatcagccctcacacccgcttccccctccaacccacagcctttgcttccaggtggcaggattactactttgcctcttcagcagcatctactctaggcatattgatcattttagacactgggagaagagaacctcaaactaggaggaaaagacagagcctccacttagttttgggaggggatggcagacagtcaaggagatgagcgtcctaaggcatgttgggatagggtcagatgcaccacccatggagaggtttgtcaacacaaagacatggaaggttagaggtttgtcaacaaaaagacatggaaggttaggtttgtcaacacaaagacatggaagattagaggtttgtcaacacaaagacacaggaagaatgggctgcagaagatttagatgttttccatttgggcacattttacttagctggagaactaggtttaaaacagcctgggtaggaaaattagaagcaagctggatgcagtggctcatgcctgtaatcccaacacttttgggaggtccaggcaggaggatcacttgggcccaggaggtcaagcctgcagcgagctgagatcacaccactgcactccagcctggggtgatagaacaagaccctgtctcaaaaaaaaaaaaaaacaacaaaaacttagaattgaggagttgtacctccattggcttcctcactccaaaataggtgctgatccttcctattcctattctttgccaccttttgggtgtggtgtcaccagcctgtttagccaagtagctttgggcataggctgcccaatctgagcaaacaccagtgaggctctattgagccaagaccaagtcctcaaagcacctgaaccactgtggccttctcagcctacagcagtgtggtctcttacatggccacaaagggacacacagtgacaaaaggctcggaatgttacaatggtaaaatgagtgatctcaaatccactgacagatataaaataggcttagagaggaaaagctgcctctggtcaagtagatcatggcagcatgaattccaactcacttttttacaactccaacttctatgtttatctttgttactttcacttttttacaacctggccagaggcattttttaaatcaggcccaatatcagtattctttttgtgtgtgccaattttgttatcacatccctatgaagttgaaaaataaagttaattttgaccaaaaaaaaaaaaaaaag

SEQ ID NO: 24439 - DNA, 2432 bp, Homo Sapiens
cgtttgctgctcacaggcacacctgtacagaacaatctgttagaactcatgtcgctgttgaattttgttatgccacacatgtttagtagtagcaccagtgaaatacgaagaatgttttcctctaagacaaaatcagcagatgagcaaagcatatatgaaaaggagagaatagcacatgcaaaacaaattataaagccatttattctcagaagagtaaaagaagaggttctcaagcagttaccccccaagaaagatcgaattgagttgtgtgcaatgtcggagaagcaggagcaactctatttgggtcttttcaacagattgaaaaaatctatcaataacttggaaaaaaacacagaaatgtgcaatgtcatgatgcagttgaggaaaatggccaatcatcctttattacatcgccaatattacacagctgaaaaactcaaggaaatgtctcagcttatgctaaaggaacctacacattgtgaggctaaccctgacctgatctttgaagatatggaagttatgacagacttcgaactacatgtactttgtaaacagtaccgacacattaataactttcagttagacatggacttgattttagattctggaaaatttcgagttttaggatgcatcttgtctgaattgaaacagaagggtgatagagttgtgttatttagccaatttaccatgatgctggatatcttagaggttctattaaaacatcatcagcataggtacctcagattagatggaaagactcagatttctgaaaggattcatctaattgatgagtttaataccgatatggatatctttgtgtttctgctatcaacaaaagctggtggattaggaataaatctgacttcagcaaatgttgttatacttcacgatattgactgtaatccttataatgacaaacaagcagaagatagatgccatagagtaggccagactaaagaagtactagttataaaactaataagccaagggacgattgaagaatccatgctaaaaattaaccaacagaaattgaaactagaacaggatatgactacagtagatgaaggtgatgaagggagtatgccagcagatatagccacattactaaaaacatcaatgggcctgtgaaataagaactgtgaactctcaattgatgaggaaatatcaacttggtgcactcaaggacatttacattatgatgaccatggggtttatgaacatttataactttttataatttccatattacatttctcatagtatggacaactttttgccactaactgaattctccaaatactcacacgtgaaatttcaaaaaagaagccacaaatatgtagttctgaagatgttgaataatcattttacaaagcagttttctgaatggggattagttggtgattgtttgtaacaaatatgctaatgctttagaaatgtcagtatttttgtaattatttctacctccaaatatatatatattgtctttcactggataatgtgtgtagatttttacatgtgccttatttgacaatgcttatgtcttgtttttgcttgtctcatttgaagttcttttttattatgttaaagaatgcagctgtatagattatatagctttcattttattgctatttgaagcagatgttcaccaatgtcagcaagaactcaacctgaatttaaaggtggcattccatatactaacatcccccaggtcctctcaagtacttctgctgaaacaaatttatttggctaggcactaagttgttttccagtgaatagtaactaaagaagcccctaccttgctccatggattaattccttctgttcattttccaactgcactaattgtgcatattactctgcctaatcttgtgcatgttttcattgatttccctctcccggcttttgcttctcttgaaactgttgcccagtcacttctgctccaattctcttcctctctaaatagtagtttattactgccacatctccatgcatcagcaaaatgttggtgacatttttctagcctggcagaacagattacttaaagctatttcatttcaaagcagactgaatgtgacttcatctaaaggcagcattaggtactgcatggaaataggtcattaacttgaaactcttatcaaaatatattttaccagtttccagaatttccagtacaggaccgcctgaagagagagccattgttcaattccaattcagtgtgagtgacaaagtgaaatttagaagtgaagttgtctatttgatatttaactctttattaaatctttctttaaatttctgcctgtcagtctatattgctgtttttattatacatcagtttctttgtataacttgtgagttccatgtgttttgtttttattatgtaaatatcattataaataaacttatttataaatcaaaaaaaaaaaaaaaaaaaa

SEQ ID NO: 24440 - DNA, 4699 bp, Homo Sapiens
ggctcggggggtggctcagggggcaagggcaaaggaggttgcccggctgtgcggctgaaagcacgttaccagacaatgagcatcttgcccatggagctatataaagagtttgcagagtatgtcaccaaccattatcggatgctgtgtgcagtcttggagcccgccctgaatgtcaaaggcaaggaggaggttgccagtgcactagttcacatcctgcagagtacaggcaaggccaaggacttcctttcagacatggccatgtctgaggtagaccggttcatggaacgggagcacctcatattccgcgagaacacgcttgccactaaagccatagaagagtatatgagactgattggtcagaaatacctcaaggatgccattggagaattcatccgtgctctgtatgaatctgaggaaaactgcgaggtagaccctatcaagtgcacagcatccagtttggcagagcaccaggccaacctgcgaatgtgctgtgagttggccctgtgcaaggtggtcaactcccactgcgtgttcccgagggagctgaaggaggtgtttgcttcatggcggctgcgctgcgcagagcgaggccgggaggacatcgcagacaggcttatcagcgcctcactcttcctgcgcttcctctgcccagcgattatgtcgcccagtctctttgggcttatgcaggagtacccagatgagcagacctcacgaaccctcaccctcattgccaaggtcatccagaacctggccaacttttccaagtttacctcaaaggaggactttctgggcttcatgaatgagtttctggagctggaatggggttccatgcagcagtttttgtatgagatctccaatctggacacgctaaccaacagcagtagctttgagggttacatcgacttgggccgagagctctccacactgcatgccctactctgggaggtgctgccccagctcagcaaggaagccctcctgaagctgggtccactgccccggctcctcaacgacatcagcacagctctgaggaaccccaacatccaaaggcagccaagccgccagagtgagcggccccggcctcagcctgtggtactgcgggggccatcggctgagatgcagggctacatgatgcgggacctcaacagctccatcgaccttcagtccttcatggctcgaggcctcaacagctctatggacatggctcgcctcccctccccaaccaaggaaaagccacccccaccaccgcctggtggtggtaaagacctgttctatgtaagccgtccacccctggcccgttcctcaccagcatactgcacgagcagctcggacatcacagagccagagcagaagatgctgagtgtcaacaagagtgtgtccatgctggacttacagggtgatgggcctggtggccgcctcaacagcagcagtgtttcgaacctggcggccgtaggggacctgctgcactcaagccaggcctcgctgacagcagccttggggctacggcctgcgcctgccggacgcctctcccaggggagtggctcatccatcacggcggctggcatgcgcctcagccagatgggtgtcaccacagacggtgtccctgcccagcaactgcgaatccccctctccttccagaaccctctcttccacatggctgctgatgggccaggtcccccaggcggccatggagggggcggtggccatggcccaccttcctcccatcaccaccaccaccaccatcaccaccaccgaggtggagagccccctggggacacctttgccccattccatggctatagcaagagtgaggacctctcttccggggtccccaagccccctgctgcctccatccttcatagccacagctacagtgatgagtttggaccctctggcactgacttcacccgtcggcagctttcactccaggacaacctgcagcacatgctgtcccctccccagatcaccattggtccccagaggccagccccctcagggcctggaggtgggagcggtgggggcagcggtgggggtggcgggggccagccgcctccattgcagaggggcaagtctcagcagttgacagtcagcgcagcccagaaaccccggccatccagcgggaatctattgcagtccccagagccaagttatggccccgcccgtccacggcaacagagcctcagcaaggagggcagcattgggggcagcgggggcagcggtggcggagggggtggggggctgaagccctccatcaccaagcagcattctcagacaccatccacattgaaccccacaatgccagcctctgagcggacagtggcctgggtctccaacatgcctcacctgtcggctgacatcgagagtgcccacatcgagcgggaagagtacaagctcaaggagtactcaaaatcgatggatgagagccggctggatagggtgaaggagtacgaggaggagattcactcactgaaagagcggctgcacatgtccaaccggaagctggaagagtatgagcggaggctgctgtcccaggaagaacaaaccagcaaaatcctgatgcagtatcaggcccgactggagcagagtgagaagaggctaaggcagcagcaggcagagaaggattcccagatcaagagcatcattggcagcccgtcccttcaggctgatgctggtggaggaggagctgcgccgggaccaccccgccatggctgagccgctgccagaacccaagaagaggctgctcgacgctcagagaggcagcttccccccttgggtccaacaaacccgcgtgtgacgctggccccaccgtggaatggcctggcccccccagccccaccacccccaccccggctgcagattacggagaacggcgagttccgaaacaccgcagaccactagcccacccagcatcagagaccttctcttcctttcctgtgcaccccaccctgtaacagcaccaaccaccaggattggacatcaccgaggaacagcgggattgcctccccgaatgcctccctgggaggcacactgattgcccacccccaccactgcaccatttccaggagggagagtggggaccctcagccgcccccttttccttcccattggggtgctgccctctctttgacccccagggacccttgccccaggacaccgcctaccccgtacagaccccttcactccggggtgctatccccatcctctgcctcatcgttcccctgagcactgggggacagaccctcacccccaccctgggggtgtggcacctccaaactttcaacttcagggtgatttttttagcagtaaccagagctgacaatctaactcccctccaccgccccattttggcctcccctgccccccttgttatggggaggggaccccgggtgagggggccctattaccccttgatttctcaggagcgtctgggggggctcagcacgcacaaactccttctccttctaccactcttaaatttactccctccccacccagaacccagatggggtggagggggccaccggggcagggagggggcggcaaggggggaatgggagttgtctccccttctccccacacctgatctgctctcggctggtcccagagcggggtgagggggcttatgcccccccctcccccagtgtgttgggtggggtggaattgaggttagggtgaggggtcagggtttgggagggtgtgtatgttgggaggacaggctagttgatctgtcctactctgacacacagtcccctctgccccttccttctctcttcttggtctctactcccagggggaggggggaacttactctaggaaaagccatgtctctctcccccagggtggggggacctgtgttggaggaggggtgttggggggcccccttccatgactctgtcccctgggggaggtaggacagggctgggcttccctctcatcctccccctcccaatctccttccacctccctccctcccgccagctccacgatttttcggtgtttctctgtacatagttttctggcgggataggggaggtaggatggatggggtttggggtgggtaggccatgggaggggagaagcccctccttggcaccccctcttccctgactgctgtcccctacccagccttgcccccttcatccttttgcgtttggtattgagactctcctagactctactcctctttcttttgtatggacagttccccttcagtcccatccccctacacatacacccagccggggccaaatttatacttatataaaagttgtaaatatgtgaaattttatccctgtgccctttccccacctcaggccctacccctggaccctccccaaccttccttctctcttctttggctgttgtaattatctggggtttgtactgtacatatccggggtgtgtgtgtgtgggctgggggcaacccttctgtacagagcttcctggccccctccccccccgcccctctgcttccctccccacccaccacctcaagggtagggagttgctcttcctacctgttttattttgttttctcgttctccctccccaccccactcccagccttatctatcccccctcactgtccccttttctccactcccagccccatttcctttttttctggagtgtgtggtgaaacagaaaaaaacatgtttaataaacggagattgttcttttaagaaaaaaaaaaaaaaaaaaa

SEQ ID NO: 24441 - DNA, 4475 bp, Homo Sapiens
gaaacttccactatggctgccaagaaaaaccggcaatccagtgataaacagaatggccgagtcgccaaggttaaaggtcatcggagccaaaagcacaaggagaggatcaggctactgaggcagaaacgggaggctgctgcaaggaagaaatataacctgctgcaggacagtagtaccagtgatagtgacctgacttgtgactcaagcacgagctcatcagatgatgatgaagaggtttcagggagcagcaagacaatcactgcagagataccaggtcatttggatccaggattcctagcaagtgacaaaacatctgctggcaatgcgccactcaatgaagaaattaacattgcgtcttcagatagtgaagtagagattgtgggagttcaggaacatgcaaggtgtgttcatcctcgaggtggtgtgattcagagtgtttcttcatggaagcatggctcgggcacgcagtatgttagcaccaggcaaacacagtcatggactgctgtgactccccagcagacttgggcttcaccagcagaagttgttgaccttaccttggatgaggatagcaggcgtaaatacctactgtaatacaatgtcactgtgtttcctctgcactgttcccttccacttcctcatcctctttgtgacatggaagttcattgtcatagcttcagcttcagaagctgtttgtggcatttgtaggattcaaactcatggaaaattccctcctcttcccccctttttttaattaaaagaagtcacttaggaaaataacatcacagagaaaagaatttcttctttccctcagtaggaatatagaatgatgaattttattagacaactttattttacttggtgacttttaatcttaggaaactctgccttccttttagaataatattttaattgccaggcaaaatgggtttcagtttttgaatcttgtatttatttttctgtataatgaaattaatatctagacttgaccactatctgcccaccccattggcactcccatcttagggcattcgcacacatatcagtcaggtccttattggcacctagtagggcatgtgcatttaaaaacttgtccttaaaaatagaagacagaagtattaaaattatattttcttttattttaagtcttctgccttctttcttgagtttgctcctgttgacttcccacagcacagataattgacatgtccctttgtgtttataaatactactaaggtgacctagttggtctccttgttgcaataattaataactctttgcaaaatgtctcctttgagacagaggcatttcagatagatacccaccatgaggtgttctgggcatctgaaggtattaagagttcagtgggaaaaatctctctccctcgcctttttttctggtttagtcaaataacgggtgaacatagaaacctgttgggaagaatatgaaaagttatgtggcctctgaggctacaggcacttgcaaatccgagaggaaagtgccgtctttcatagctggtctctgtataaagagtatgtagcaacaactgtttaacatccgagatgaagtggacctgatgctgtatttgggtatttttctcctctaccttctaaaaaaaaataccataagaagaatcagaatgtaccataagaaatcagatgcaaagcacgttaatgtcattggtaagttttacagagtctaaaaggattagcaaagggtagcaggagcttcagggaattcaggaaatgccagcattggaattttgtggcattagttactaccttctttcttataatatgttgtagttactagtgaattcttttaaaagcaatacctagagttagaacactatgtactctgcacagggggagtgaagtaatattggcttagaagacttcaccttttgtttttcatggtttttgtttgttttgtttttgtttttgtttccattgttaccgttgctatggccctttgcctgtctctccaaatcccctggtggctcttcttatcattaagagtatgagaattaccattttcagttttcattcagcaaacaaatttaccaagtgcctgctctgcataaggcactgtgaggggtgggtgctctgggggctgctgagatgaatgacacacaccgcacatacacatgcatcagtgtctgcctgcctccccctgcccagcctgttcttcttcttcttcttcatcttcttcttttttttttttttgtaaagacaagtttattcctttacgcttcttgttgcattagttctcctgtatgttccttcttccacaggaatgtatttgtgcatatgttctttgatcttctctgatagcatctcatttgatctggcctctgtccttcatcagcttttattttttttatttttattttctgcttttgttagataaggcttttaagatcatgaacctccagctttagcaactcatatatcagtctctcacatggccacaattctagacaaaaaccaaagacccagaggccagagcaaagtaggaccttctgaagattcactactggtgtatccttggaccttcacattttactttaggattaatttattgaattttactgttacacatagtttttgacttgaattaaaatactagacaaagcagaaatgtacaatttctggtctgtgttttccaggaaattcatagagaagagaatagagtggatgatgtgacttgaagtttttgcagcttattttttcccccactgtcagggcagaggcccattttaatgaatgtttttgcatgatctgttcttatgttaaccacatattttttttcccaattccacacagcaggtgatttcccgtgtgacatattttcttcatagtccctaatatagtcatcctctacagagttggcgtgctgtgtgcactgtggattaggaacagagtggagctgtaaccagtctcttctctggccctttgcctttatgtcagcttgcacttttgcctcacttattcctagtccagctcccaactgcctgacttaatggaccagaacggagatttggatattaagatgcagagggggaggggaagggatggtagagatagacagctctcccctactaggttgggtcatttcccctaataactatagagagactgtgtttcaactctcttttcattgctgtttccagaagagtggagagtgtggtttcaggcaaggtattaatgatacaattccgtggtatacagctcctgtgacatttgaagtttcttttaaaggggtttttcttaatcaaagttttacatttggtagcataagtagttctttatgcttcacaggacattgtcttcagagtaatctctctgctaaaatggtacatgtgggtcacagattggtttatgccactgacggttaagtttccaccccctccaatttgtgaaaaacagagcagtgacctagctgttgcatcatcatgactgccatgtaacctgtaattgctgctctccagtaattgtcttttcattttgatggtaggggccagactgaatgaataatgcattcttttttattcaatttatttcattcagtttattcttggcaatcaaacatcccataaactttgcttttattatcaattatgaatatgaattgtctggtttactaatgtagtcatttgttcatctttacttttagcagattagcaccataactaacttaaaactaagtttgttacctgctttttatactgtcacaaaggtttttgaaaaagctggggacactattttgtcttttagttttaaacttttttaaggcaaagcaagctccccaatccctgttctccaatatgtgtatgatgtgacttccatgtagatataaaaatgattgtgccctaaccaaacttcctcagattgtgcactgtttgtttaaaataatcacgtattttagtctgatgctgttgtattttttcattttatttaaaacactacttacttcttattctcttaacaaattttaaaaggtagtgatcttaaaaaaaaatcactggataactaggaaatatttttgttgttgttttgtttcttaaagagtacagaggccattgaagccttttgctcctcttaccgtgaaaatgaaatgttagccattgtatggctaggaaccaatgcacttggcagttaatggatctgctgttgctggagtgtgagcgtggacttgatgcagtgatgacaaatcattgcttagaattaatgttttcaaatgtgcaactctagtttttaaaacaaaatttggttctttacattcattatttcgtttttgtttccctttagtatttaatggtctttggagaaaaaataataaaacagagtgttatatatatattttttggtgcaagataagattttctgttttttgaaataagtctgtagcataaaggttaaactattttaagacaaaataaaatagagtgtatttaaaaagaaaaaaaaaaaaaaaaa

SEQ ID NO: 24442 - DNA, 3426 bp, Homo Sapiens
ccagacgttcccagggctgactccaaaggacggggcagggacccgagtgtcctatgccttctggatcatggccctcatcaatcttccagtgcccatggctgtgctgatgctgctgtccaaggagcggctgctgacctgctgtccccagaggaggcccctgcttctgtctgctgatgagcttgccttggagacacagcctcctgagaaggaagatgcctcctcactgcccccaaagtttcagtcacacctagggcatgaggacctgttcagctgctgccaaaggaagaacctcagaggagccccttattccttctttgccatccacatcacgggcgccctggtactgttcatgacggatgggttgacgggtgcctattccgccttcgtgtacagctatgctgtggagaagcccctgtctgtgggacacaaggtggctggctacctccccagcctcttctggggcttcatcacactgggccggctcctctccattcccatatcctcaagaatgaagccggccaccatggttttcatcaacgtggttggcgtggtggtgacgttcctggtgctgcttattttctcctacaacgtcgtcttcctgttcgtggggacggcaagcctgggcctgtttctcagcagcaccttccccagcatgctggcctacacggaggactcgctgcagtacaaaggctgtgcaaccacagtgctggtgacaggggcaggagttggcgagatggtgctgcagatgctggttggttcgatattccaggctcagggcagctatagtttcctggtctgtggcgtgatctttggttgtctggcttttaccttctatatcttgctcctgtttttccacaggatgcaccctggactcccatcagttcctacccaagacagatcaattggaatggaaaactctgagtgctaccagaggtaaaactgggtgaagaaggcaagagaagactttcagcctcttgatcaccagcacgaccatactgtttcagaaagctgggtggtggtggaggcgctctctcaatggctattcaagtcttctccactaaaacttggttgggtagaggaaattaaattgagtcctggtacctggtcaaaatcattagaagtttacctggcttctcaagttatcttcttccctggttcagactgttggtaagagctgtccagatacccagatgggaaggaaggagacagccgcgcgcttcactccatttgtcacctcatgcatggaccatactctgggtttgagatcattcttcattgaagtttgtaaaaataggttgaaattgtaaagctccatgatcattgctatatgtagatatatttcaatttaagcaaaacaagctgcaagttattccctggcatgctcaaaggattttcgtgcttttcacttaatagtccaaagtctcttaaattcctgctgcagacatcaatagcttatctatattctcaaacaccaaaaggaaaagttgaatcttgctctctttggtatactaatgtagtggtatgctaagctggctcataccaacttagaaaagctgattgtaaaattttcattttgacagctggttattaaatgcagccattattaaaaatcaaatcatacaaacttataattaaatcaattacatttaaaacaaaggtaataaatattcaaagcatatcacttcctaatttgatcttgatgctcttgaggtaatttacgtccatggtacctgtgtggtggaattactatatatgatggtgtgctactgtgcaccttgtctcaactccactcttcgtgatagcatgttggtagcttgaaatcagcctggtgggagtattaccatggacactggcaaaagctacagatcccggagagccagtggttaaacatttaccagcataccactgctagtaatcaaggctaactggtccagaaatcgcccaggagaatgaaatggatgttccatttttttctactgacattgactagcatataaaaggtatagaaacagcactaagactttctgaaaatacctaatgaaaattttacatctttttttgtttttgtttttgtttttgagacagagtctcactctgttgccaggctggaatgcagtggcgtcatctcggctcactgcaacctccgcctcccagtttcaagcgattctcctgcctcagcctcccaagtagctgtgactacaggcgcatgccatcacgcacagctaattttttgtatttttagtagagacgggatttcaccgtgttagccaggatggtcttgatctcctgacctcatgatctgcccgtctcagcctcccaaagtgctgggattacaggcgtgagccactgcacccagccaaaaattttacatcttttatagagggaaaaaaactctttataccatggcaaggccttttctttcacaaaaagctgggcctactgaacaattcaagctgtgcagtagtagactgaaagcaggatttgttgaggagttacagctcctgtccagagcaaatcctgtagtgatacaaggagaatgtaaacttgccagcttagacagggatcagtcctgagactgctggcagtagcaaatggctattagagtaactgtataatggttttgcctgcactttctctatgtatatacaaatgtacatgtataaatataaaaattaagtgatcatggttcttggtaacctgtcccaagtgctgtgattcacacgcctgacactaaaaggttcttcctggtccagtcagccagctgtgaccaccagcagcacagctgagtgctgagaatctggctggaaagagaaacgtggctcaagtgctggctcaccttctagctgtgtggccctgggcaggttactgaggctcttccaacctcacttttcacatgtaaaatggcatttctaaaagtacctaccctacctcaaaggaattctgaaaaaagtaagtgaatttgtataaagcaaagcactcacaatatgcctgacacacaaactgcttaataaatgttagtaatttttaaaacctcctcataagcggcttagaaattattcatgtttggtacatatttattgcaagtcaagcagatccaacttttttgaaagctggtggtctaggagtatagttttaattatatttgtaaatactcaaaagtattagatgccagtctaatttaaatgcagtctgactgtagcgagtaactgacctgggcaatgaaaaagcagttgtatttttcttgtggtttttcaagaaaatatcctttttatacagatttagaaagaagaatcaatggctatatcgaagttgattgtgactaatttgttaatacagaaaacaacattaacacaaatctaagagtacctttcctaaaataaaatatttaaacttaaaaaaaaaaaaaaaaaaaaaaaaaaaaaaaga

SEQ ID NO: 24443 - DNA, 3176 bp, Homo Sapiens
gccgccataggccagtgccggggtttaagggccaggaaaggaagcattcagggaatttaggtgtagccagaagaaaatcaggtcctggctccccagaagcaagagagttcaagtgaaggaaggaggaggttcctggatgtggatgtcatcatttctgggaacactcttaaatggagactcagatttcttagccaaaatttagggaggatccagaagaaaccaaagacgaagcatcccagttcttgggtatttcctgaaacagaagaaaatgacaaaggcccaggaatcactgaccctggaggatgtggctgtggacttcacctgggaggagtggcagttcctgagccctgctcagaaggacctgtaccgggatgtgatgttggagaactacagcaaccttgtgtcagtggggtatcaagccggcaaacctgatgccctcaccaagttggaacaaggagaaccactatggacactagaagatgaaatccacagtccagcccacccagaaattgagaaagctgatgatcatctgcagcagcccttgcaaaaccaaaaaatactgaagaggacgggacaacgctatgaacacggaagaactttgaaatcatatttaggtttaaccaaccagagcagaagatacaacagaaaggagcctgctgagtttaatggagatggagcttttctccatgataatcatgaacaaatgcctacggaaattgaattccctgaaagtagaaaacccatcagcaccaagtcacaattccttaaacatcagcaaacacacaacatagagaaagcccatgaatgcactgactgtgggaaagctttcctcaagaagtctcagctcactgagcataagagaattcatacaggaaagaaaccccacgtgtgtagcttgtgtgggaaagccttctacaagaagtacaggctcactgaacacgagagagctcacagaggagagaaaccccacgggtgtagcttgtgtgggaaagccttctacaagaggtacaggctcactgaacacgagagagctcacaaaggagagaaaccatacgggtgcagtgaatgtgggaaagccttccccaggaaatctgagcttactgaacatcaaaggattcacacgggaattaagccccatcaatgcagcgaatgtgggagagctttctccagaaaatcactactcgttgtacatcagcgaactcatacaggagagaagcctcatacatgcagtgaatgtggaaaaggcttcattcagaagggcaatctcaacatacatcaacgaactcacactggagagaaaccttatggatgcattgactgtggcaaggccttcagccagaagtcttgccttgtagcacatcagagatatcatacaggaaagactccctttgtatgtcctgaatgtgggcaaccctgttcacagaagtcaggactcattagacatcagaaaattcactcaggagagaaaccctataaatgcagtgactgtgggaaagccttccttacaaagacaatgctcattgtacatcacagaactcacacgggagagagaccctatggctgtgatgagtgtgagaaagcttacttctatatgtcttgccttgttaaacataagagaatacactcaagggagaaacggggggattcagtgaaggtggaaaatccttccacagcaagtcacagcttaagtcctagtgaacatgtgcaggggaaaagccctgttaatatggtaactgtggcaatggtggcagggcagtgtgagtttgcccacatcctgcattcatgataaacagtttgctgtttgatcatatagcctccagcggaatgctgagtttgtcatgtcccatgggcctttggctccctgcactaatatgtatagtagggtttacaagatatgaaatatattttacttttttatatcttataaacctcactacccctcccacaatattgtttttcatttactatcttgatcatagagtttggctggggaggggggcagttttagaggcttccacttggtgttcctcagaatgatatctcttactccgggggccaaggtaggggttagcttttgttctctttgtagtttagattgtatctcttgccttgttcaagttcacaaatctttttgtgtatacacatatgtacatgaaaatgatgttcatgctttttattattttacccttcattatttcattttttatagttctcatagctatgtctttcagttcactaatcttttttccacagtgtttaatctgtcattaatcccatccaaagtatgttttctctcagaaattgtaatttttaacctctaataatttgacatgggtttttccctgttatatctttcatatctttatttatcatggttttacttttaacctatttatgctttcatatttaaagtgggtgtttagtgggcaacatacagttgggccttccttttttatccagttaacaatctctgtctttttactggggtatttagatcatttacgtttaatgtattgatgtttttaggtttaaattactaacttactatttgttgtttattctatgtcttctttgttctccttttcttctttttctgctttcccttagagtagctgagtgtgtttatattacatattgtctcctttgttggcttattaactgtaaatccttgtcatttgattccttgagattttatagcatacatcattgtgagggattgcatatttatgtcctctccaaatttacatgttgaagtcctaatccctaagggatggcattaggaagtgtgacctttggaaggtaattacatcttgaaagtggaaccctcatgatgagattatgtgtcttatgagacaacacagaagagagtttgttttctctttctctgctctttgccatgtgaagacagaatgagatgaccatgcataaaccaggaaatggactctcactggacactagacctgccaacaccttgattgtgttttagagtccagttctagagactcctcagcctctggaacgtgagaaatgaatgtttgttaaggcagtcagtcagtctatggtgtattttttctagtagcctgaactgactgaaagaaaatcatgaacttatcattctaacttcaaggacattatatcacttactgtataataaaataatcttacagtaaaaaaaa

SEQ ID NO: 24444 - DNA, 3460 bp, Homo Sapiens
ggcgtttataaataactagtttacagagagaatcacaaacaggataacttagtaccagcagtttttaaccttgacgtgagactaaaacgtgaccgtaggctgttttttagttattgctctcatgagatgatggctgtatttatctgtttatttatacctatttatgtatttatttattgaagtgtgaaattgagcaataggcaggcaccaccgtccccagagcaggtcagcgtctcgagaggcccctggacaattgaggatgcccatcccctcccctttccctgatcttttactgaggggctgtgtgcgcgatccttgcaaattgatgatgttgccatccgtacccaggctgtgtctcataaaagtcggcctggtgccagagaggacctcctttctcccacagaatcccagatcctcaggaaaagccaaaaccgaggcccattgcccggattcgacacaaaagagggtccctgctctgttgcccgagagcagtctgcatcctgggaccagaatgctttcctggaaaaagaagcctttcaggtttccctgggccagcatcttctgatggaaggtgggagccaacacccttctgatggaaggtgggagccaacacccttctgatggaaggtgggagccaacacccttctgatggaaggtgggagccaacacccttctgatggaaggtgggagccaacacccttctgatggaaggcgggattcccgcttctgaaactccccctggagtctcactcccacacatgcccatagctagcattcaacagagaactctgtcttaagcttcaactgtgaaaatgatgacgggcttgtagcacctcagcttctttcctcgcccccttttatctgaatcctatcaattattctgatgctgggacaggtgagaagaaactgtgaagtatatgagcctttgaaagttccctgaagtttctcagttcaggaacattctcattgtatgtggtctccgctgtttgaacagccttctagctaaaaaattccaaagcctttatttgggagtcttagcttgcaagcttgtggaaggatttagcttaacaactgtcactcctgaaaagcaatctctgttccatcaaggttctagttgctggccctgtgtcctcaaagttcattacatcttatcaaggcctgtttgcaaaggggagatcccttttcttaaaaaaggctcaacccaaaagaaaccatttcttaaaaaattttacatagatcagttgtatttctatttagcaaaaatgagtgctctgcttttatttgggaatttcgatgaaaaagcgttcagagtagataatgttcatttatcaaaaatctggtttgggaaataccaaagaggctttgattgaattcccttttgacccgtgtgtaacttcctctggtagttagaccccaggcagctccgaatttgtgaacctgcttcctgatgaattctcccttgttcccccttggctctgccattatttcgttttcagtgtaatttgccaagccgcagttttctgtgctggctgtgcctctagtcgcagctctgtgactgattccctcccgggtgctgagtcccctccccggccaccatcctgcgtgaatatcctgaaattcatgggcttcctcgggggcccgcccgcaggtggtgctgggtgggttccgccaccttctcctggaaggtgagccttttcctggccaagggcagctgccttaacctctgagagtctgcgcttggccttagtcctggagacccagcctccagggactgaaccgtgctgctgttgggagccaagaccggccctttggagccggcagcccaggggtccctgctggatcagagaaatagaagcacccgaagacggttagtggcaattccttgacccggtttgcttccaaatgaaggccatttgtccaccaggcattgaaaagacatgacttacccagtccggcatcggacttgaaaaatcgaaattgacatcactcagctgttacatttcacatccgattcagcccccttttatttccatgtgcttttcgcagccttcctgtgttggatgaaagagaataagaattcagctgacaggaggcctctatcctgtccctccaccccaccctccacctcaatcccctcccatcttccccagacctacctcacctactaggacctgaggcagctccttagcagagacccctggggtttagctgactctgggggtcaggggttcctgtccccaaacttcgcaagacagccctgaagtcacaagtgctttcttttaagtggcattggcaattggcgtgtaatgatggcagtagaatctgaatctcggatcccaggcagggttcacatttccaaacctttttgatttcccctgacctctaatggctggatcctatttttctacaacctttcagtgacatcgttcaggtttctttcttggccatttaaaaaaacaaatttttttttctcacttgtaagtcaccgccagtacctaagttaggctaacggagactttgacaggactggatttttcttccaccagaagagaagccttttccgttggtttggggccacctctttgaccatgaccatgtgatgttccgtttacagtgacttgctttgggggaggggaggctctcttaaccgattcccatgttgtacagtagatggttagaccttttgtatattagtgtgttttaagttattgatttgttttatataaaataatttatttttcaggtgccatttttcattttaactttgtttttacatgggtttgttttcaataaagtctgacactggtgtccaaaagtcaacaataaaatgaatcccattgtgttcttttgaagatgcctatgtaacttttaagctttttaaattattttcagaaaaaaaaaaagaaaagcccttatcagttttccatcagcccattgcctttttatttttttttttaatccttgtgaataaatgttctttagtgttttaggaggaaaaagcaaacctagattttgataacccagaagacttcagattaataaagaagctttgaaagaagaccatttttcaaaattttagtgaagtgtgaatattttttgtcaatggctttctcaaagagaatgaaacttttgcaccattttcagagtttttatagagatgccaaattgatatatttacatgtaatggaaacatgaaaaagttttattaaacaattgttcatagctgtgtagacattttaattcagtttccaaagctctcaaaaaatcgtatttttgaagtacggagtgatgcggtttggggcgtggcttacagttccaacgactcaattgtcccgatactcagttctttctacaggtatcaggttcgtgttaaacgctgtatgttaactatgactggaattctgtgatattttggtaataaatgaagtgggatcaaaaaaaaaaaaaaaaaaaaaaaaaa

SEQ ID NO: 24445 - DNA, 1433 bp, Homo Sapiens
ccttgaacttccagacgtggaattagctgttcctctaaagagcctgagcctcgttgagaggttatgttgagaaaccaagcttagagctcaaggggtatcatttcatctagattccttcagtgaacagccaggaaatatatacattttaaaaagtgcaattacactaattgttccagttcatatttaccagaacataatttttcatttctttgattttgtgtgtgtgtgtgtgggtgtgtgtgtgtgtcggtctaatttcatgttactggaaaaatctaaccctactggttctcttctcgcttgagaattattcagattttcctggttgttgttacgccaaataacgctttattgcaacctggacattttacatatttgagactttgggtatttttaaaaatcctttagcgtgtcaggtttttttgtttgtttgttttagcaacaaccaacacggttaattccagtgcccaagctcttccttgcctctttgtgcaaagcttccaatgtcagctcagcctccagagcctctgctgcgttgttttgggtcacctgtgcaagtgcagctcgtagtgagcctgggacttgtgctgctggttcatgcatgaagctagggtgctcctctccaggattcccccagccccccacacacgaagctagggtgccccctctccagctctcctctccaggattcccccagccctccacacagggagctagggtacccctctccagctcgcctctccagaattcccccagccctccacacagggagctagggtgccccctcttcagctctcccagaccccccaggaccccacacaggaagctagggtgcaccctctccagctctcccagaccccccaggaccccacacagggagctagggtgccccctctccagctctcccagacccccccaggaccccacacagggagctagggtgcccctctccagctctcccagacccccccaggaccccacacagggagctagggtgccccctctccagctctcccagacccctccaggaccccattcacgaagctagggtgcccctctccagctctcccagagccccccaggaccccacacacacactctggctcccccaggggctctctttccgtttctctgactaggaaaatgtgatttctctcagtttttgccatctacaccctcaggttaaacccatgagagaatggaggaagatgaactgggaacctccccagatcagtgttgactgctgtattctgacagctcttgtctattctcagaggctgcaggttgcttttcaaaattgcgtccagaggccaggcatagtggctcacacctgcagttccagcgatttgggaggatcacttgagtccaggagtttgagaccagcctgggcctcatagtgagacctcctttctacataaaaaaaaaaaaaaaaa

SEQ ID NO: 24446 - DNA, 1697 bp, Homo Sapiens
ggggagagaggggttgtgaagggaagcggaagggaagggaagggaggtcccgtgggacgctggggtctggggtagagcaggtagcagcgtgctgccctgacagctgtctccgctcctcagattgtcagtggctgctatgcagcaggtgcagcctggtctctcactgagtctctactccacaaaggcaacgactggccaaggcagtggctggctctgggttacacaagtgcagacactcaactaagtgagctggaagacccaggagaaggcggaggctcaggtgcccacatgatcagcacagccagggtacctgctgacaagcctgtacgcatcgcctttagcctcaatgacgcctcagatgatacaccccctgaagactccattcctttggtctttccagaattagaccagcagctacagcccctgccgccttgtcatgactccgaggaatccatggaggtgttcagacagcactgccaaatagcagaagaataccttgaggtcaaaaaggaaatcaccctgcttgagcaaaggaagaaggagctcattgccaagttagatcaggcagaagaggagaaggtggatgctgctgagctggttcgggaattcgaggctctgacggaggagaatcggacgttgaggttggcccagtctcaatgtgtggaacaactggagaaacttcgaatacagtatcagaagaggcagggctcgtcctaactttaaatttttcagtgtgagcatacgaggctgatgactgccctgtgctggccaaaagatttttattttaaatgaatagtgagtcagatctattgcttctctgtattacccacatgacaactgtctataatgagtttactgcttgccagcttctagcttgagagaagggatattttaaatgagatcattaacgtgaaactattactagtatatgtttttggagatcagaattcttttccaaagatatatgtttttttcttttttaggaagatatgatcatgctgtacaacagggtagaaaatggtaaaaatagactattgactgacccagctaagaatcgcgggctgagcagagttaaaccatgggacaaacccataacatgttcaccatagtttcacgtatgtgtatttttaaatttcatgcctttaatatttcaaatatgctcaaatttaaactgtcagaaacttctctgcatgtatttatatttgccagagtataaacttttatactctgatttttatccttcaatgattgattatactaagaataaatggtcacatatcctaaaagcttcttcatgaaattattagcagaaaccatgtttgaaaccaaagcacatttgccaatgctaactggctgttgtaataataaacagataaggctgcatttgcttcatgccatgtgacctcacagtaaacatctctgcctttgcctgtgtgtgttctgggggaggggggacatggaaaaatattgtttggacattacttgggtgagtgcccatgaagacatcagtgaacttgtaactattgttttgttttggatttaaggagatgttttagatcagtaacagctaataggaatatgcgagtaaattcagaattgaaacaatttctccttgttctacctatcaccacattttctcaaattgaactctttgttatatgtccatttctattcatgtaacttctttttcattaaac

SEQ ID NO: 24447 - DNA, 928 bp, Homo Sapiens
gaagtattagatcctcaatctcaaggtattctaagaaattttggagaccattgagtctaaaattcccagtatctttgaggcaggaacagacttggagaatgtagtttatgagcaggagtttggagctggaagaaatactgctttctgttggtggttaatgctgtcagctccttggattgtggctttagccctaaatattggggcagtagagactcttacctggaaaacaattgagggccacccatgttagcggcaagaggcagaggaaagcttggatggttgggctgaagatggtggatgtgctgtccctgtgagagtgctgatgctggactctggagccaacgacaaagtgtttgagcaagcagggtccaagcaagggcagtcgagggccggatgaagtgggcaggaaccgagtttcccaggtgacatcctgcctgtgctcatcacgccgaggggtgttgcacaatcacaccgattctttgtcactactgagtgcagtgttcttaagaatggggacctggcagctgggtgcgatggcttgtgcctgtaatcccaacactttgggaggctgaagtgggcagatcacgaggtcaggagtttgagaccagcctggccaacatagtgaaccctgtctctactaaaaatacaaaaaattagccaggcctggtggcaggcacctgtaattccagctactcgagaggctgaggcaggagaatcgcttgaaaccgggaggtggaggttgcagtgacccaagatcgtgccattgccccctggcctgggcgacagtgcgagactctcaaaaaaataagtaaataaataaaaggagacctaggaaaaaaaaaaaaaaaaaaaaaaaaaaaaaaaaaaaaaaaaaaaaaaaaaaaaaaaaaaaaaaaaaaaaaaaaaaaaaaaaaaaaaaaaaaaaaaa

SEQ ID NO: 24448 - DNA, 1836 bp, Homo Sapiens
gggggaagacctcagccacagctgtaagcagctctctgccagccacatggccggggaccgaaaaactcccgtgggagattttggccccaacccacacaggccaatgcaagaggccaaggctggagaggcgtgccagcaaggccagggatggccggagggctgcgggctccgctatttgcaaatggatgccccagtgtccgggatgtgtggccagctgctgcaggcaggactccagcgtcaggatgttgccacttggagtatgaacaatgggcacggggttttcagccacagttccctcgaggccagtgttcagcaggatcatgccttctgtgtctggaagaggcggcagaggcaacagtgtttaggatttgggttatcataaggtgttaagagtcccttgttaaaggggcagtgggagttatggggtcatcaaggaccttgcctctctggaatctgtcaacccagttttgggctccaggtggatgggttgctttataaatgtgcctggtgcatgagaaactcttgtttcagctcttggcctttacccatgactcagcctgggggctggtgccggccttgcctgcagcaatgtagctgaggactggtctgaaggccaggagccctgtgctcttgacatcactgtactccctctccctccccgcaaccctgccccaccttgcatccagggtatggtgtaaataaacctgtgttgccatggcaacagagaccggcggtacctgccccaagcaaaggacacccctgcagatgagctgggagcaccggggctgaagggtagaccttacctgggagggtcattgttgctgttttaccgctgccctggacgtcaggaaccagccactccacattcagaccgtcatccccaggcagctggagaagagggatcaggctgcctcccgtgtagtacattggtttccgtgtggcattcactgtggggccccaaatcgccaaggtgaagtggctgccattcacagaacaccttacctggttgctagggtcccataggccacagctctacgggcatcctctctaagcctcatagcaccctgccaagtagctctcatttccttgccttgtagactagaagaagtgacttgcccaaggtcttataagcagtaagcaaagttgccaggagtggaacctgatgggaccaggtctgcctggctccagagctggtatccttcccgctcgcttaggtggctcccatggcaggaatgctgagtctgatggggcctctttgagatggcttaactgcggctcttctgggttcggggtcaagggaatgaggggtttggatagtggcatctgatcactgcttaatgaatacagtggaggcctctgaaacattagagtaaccagcagtggagctatgcaccaagggaaataatggggggtttggaatttgctggtttcctacctgctgggccacataaaagctgagtgactgtataaattcctgaactgttttgagccgctgtttctctataaaatggaatccctcagtttctctataaaatgaatgtgtgggtcaggcaggtggctcatgcctgtaatcccagtactttgggaggccaaggcgggcggatcacttgagggcagaagttcgagaccagcctggcccaacatggtgaaaccccatctctattaaaaatacaaaaattagccgggcatggtggcgcaggagaatcgcttgaacccaggaggcggaggttacagggagccgagattgcgccgctgcactccagcctgggtgacagagtcagactacatctcaaaaaaataaataaataaaaataaaatggaaaaaaaaaaaaaaaa

SEQ ID NO: 24449 - DNA, 3951 bp, Homo Sapiens
gcccgcgtcacgggggcgggagtcagctgagctgccggggcgaggttgggatcacctggcaccggctgaagggagcctgtgatttttttgtagcgggggcggggagtaaggtgcaagactgcgccagattcaaggacgagggctgcccgattatctcgctgcataaggcaagagcaagaggatcctcaggattttaaagaggaggcgacggctgcaggttcccaggatctgtcagaggctggggagttacagcttccattctggggcgacggggaccccgggggggtagcccttttgtaatccccaggccccggacaaagagcccagaggccgggcaccatggcgtccatcctggatgagtacgagaactcgctgtcccgctcggccgtcttgcagcccggctgccctagcgtgggcatcccccactcggggtatgtgaatgcccagctggagaaggaagtgcccatcttcacaaagcagcgcattgacttcaccccttccgagcgcattaccagtcttgtcgtctccagcaatcagctgtgcatgagcctgggcaaggatacactgctccgcattgacttgggcaaggcaaatgagcccaaccacgtggagctgggacgtaaggatgacgcaaaagttcacaagatgttccttgaccatactggctctcacctgctgattgccctgagcagcacggaggtcctctacgtgaaccgaaatggacagaaggtacggccactagcacgctggaaggggcagctggtggagagtgtgggttggaacaaggcactgggcacggagagcagcacaggccccatcctggtcgggactgcccaaggccacatctttgaagcagagctctcagccagcgaaggtgggcttttcggccctgctccggatctctacttccgcccattgtacgtgctaaatgaagaagggggtccagcacctgtgtgctcccttgaggccgagcggggccctgatgggcgtagctttgttattgccaccactcggcagcgcctcttccagttcataggccgagcagcagagggggctgaggcccagggtttctcagggctctttgcagcttacacggaccacccacccccattccgtgagtttcccagcaacctgggctacagtgagttggccttctacacccccaagctgcgctccgcaccccgggccttcgcctggatgatgggggatggtgtgttgtatggggcattggactgtgggcgccctgactctctgctgagcgaggagcgagtctgggagtacccagagggggtagggcctggggccagcccacccctagccatcgtcttgacccagttccacttcctgctgctactggcagaccgggtggaggcagtgtgcacactgaccgggcaggtggtgctgcgggatcacttcctggagaaatttgggccgctgaagcacatggtgaaggactcctccacaggccagctgtgggcctacactgagcgggctgtcttccgctaccacgtgcaacgggaggcccgagatgtctggcgcacctatctggacatgaaccgcttcgatctggccaaagagtattgtcgagagcggcccgactgcctggacacggtcctggcccgggaggccgatttctgctttcgccagcgtcgctacctggagagcgcacgctgctatgccctgacccagagctactttgaggagattgccctcaagttcctggaggcccgacaggaggaggctctggctgagttcctgcagcgaaaactggccagtttgaagccagccgaacgtacccaggccacactgctgaccacctggctgacagagctctacctgagccggcttggggctctgcagggcgacccagaggccctgactctctaccgagaaaccaaggaatgctttcgaaccttcctcagcagcccccgccacaaagagtggctctttgccagccgggcctctatccatgagctgctcgccagtcatggggacacagaacacatggtgtactttgcagtgatcatgcaggactatgagcgggtggtggcttaccactgtcagcacgaggcctacgaggaggccctggccgtgctcgcccgccaccgtgacccccagctcttctacaagttctcacccatcctcatccgtcacatcccccgccagcttgtagatgcctggattgagatgggcagccggctggatgctcgtcagctcattcctgccctggtgaactacagccagggtggtgaggtccagcaggtgagccaggccatccgctacatggagttctgcgtgaacgtgctgggggagactgagcaggccatccacaactacctgctgtcactgtatgcccgtggccggccggactcactactggcctatctggagcaggctggggccagcccccaccgggtgcattacgacctcaagtatgcgctgcggctctgcgccgagcatggccaccaccgcgcttgtgtccatgtctacaaggtcctagagctgtatgaggaggccgtggacctggccctgcaggtggatgtggacctggccaagcagtgtgcagacctgcctgaggaggatgaggaattgcgcaagaagctgtggctgaagatcgcacggcacgtggtgcaggaagaggaagatgtacagacagccatggcttgcctggctagctgccccttgctcaagattgaggatgtgctgcccttctttcctgatttcgtcaccatcgaccacttcaaggaggcgatctgcagctcacttaaggcctacaaccaccacatccaggagctgcagcgggagatggaagaggctacagccagtgcccagcgcatccggcgagacctgcaggagctgcggggccgctacggcactgtggagccccaggacaaatgtgccacctgcgacttccccctgctcaaccgccctttttacctcttcctctgtggccatatgttccatgctgactgcctgctgcaggctgtgcgacctggcctgccagcctacaagcaggcccggctggaggagctgcagaggaagctgggggctgctccacccccagccaagggctctgcccgggccaaggaggccgagggtggggctgccacggcagggcccagccgggaacagctcaaggctgacctggatgagttggtggccgctgagtgtgtgtactgtggggagctgatgatccgctctatcgaccggccgttcatcgacccccagcgctacgaggaggagcagctcagttggctgtaggagggtgtcacctttgatgggggtgggcaatggggagcagtggcttgaacccacttgagaaggctgcctcctaggctctgctcagtcatcttgcaattgccacactgtgaccacgttgacgggagtagagtagcgctgttggccaggaggtgtcaggtgtgagtgtattctgccagcttttcatgctgttcttcagagctgcagttatgccagaccatcagcctgcctcccagtagaggcccttcacctggagaagtcagaaatctgacccaattccaccccctgcctctagcacctcttctgtccctgtcattccccacacacgtcctgttcacctcgagagagagagagagagagcacctttcttccgtctgttcactctgcggcctctggaatcccagctcttctctctcagaagaagccttctcttcctcctgcctgtaggtgtcccagaagtgagaaggcagccttcgaagtcctgggcattgggtgagaaagtgatgctagttggggcatgcttttgtgcacactctctggggctccagtgtgaagggtgccctggggctgagggccttgtggaggatggtcggtggtggtgatggaggtggagagcattaaactgtctgcactgcaaaaaaaaaaaaaaaaaaaaaaaaaaaaaaaaaaaaaaaagaaaaaaaaaaaaaaaaa

SEQ ID NO: 24450 - DNA, 2386 bp, Homo Sapiens
ggcaaaagtccaggaattatcttcatccctggctatctttcttatatgaatggtacaaaagcgttggcgattgaggagttttgcaaatctctaggtcacgcctgcataaggtttgattactcaggagttggaagttcagatggtaactcagaggaaagcacactggggaaatggagaaaagatgttctttctataattgatgacttagctgatgggccacagattcttgttggatctagccttggagggtggcttatgcttcatgctgcaattgcacgaccagagaaggttgtggctcttattggtgtagctacagctgcagataccttagtgacaaagtttaatcagcttcctgttgagctaaaaaaggaagtagagatgaaaggtgtgtggagcatgccatcaaaatactctgaagaaggagtttataacgttcagtacagtttcattaaagaagctgaacatcactgcttgttacatagcccaattcctgtgaactgccccataagattgctccatggcatgaaggatgacattgtaccttggcatacatcaatgcaggttgccgatcgagtactcagcacagatgtggatgtcatcctccgaaaacacagtgatcaccgaatgagggaaaaagcagacattcaacttcttgtttacactattgatgacttaattgataagctctcaactatagttaactagtatcacatgtttagttggtatgtaaactaatgtatccagaagattggaagagggataagaaatgaaagatcctgatactttaggtttttccctttcctctattttgtaaatataagatgagtattatttaatgatgtatttgcataagtaatgcaaattgtgaagaaggaccagctgctgtttagaaaattttctccttccttctgtccttgattttttttcattaaagtatttcctttttttaattcaagaaaagtttacctttcttatgcttatgttagctatgccagctcttaattgcatccttttctaattaggattattaataaagcgtgaatattttgttttttattatagacagaaatttgtaacattacttctgatttgaaaatgcaattcacaaaatatagggaaatttttattgaagtaaatttgaaatgatggagaaatttcagaagcataataaagttcacaataaggataatactttatataatgtataaagtatatataatataatatatatgttatataaactgcacattatattcaaacttaaaattgagctttttttttaaaggcccaaaattgtacagtgatacaaggagctatttctaaaatttggcttatgtataatatatttaaatggggaatttcatctaaaacaatgatgtagtatttttaatattctgattggtaaaattaaagaggaaattaatctttatatattatttcttgcagaaacattcattattttattaatattgccctaagtacaactaggcaagtgattgccacctaaatcagaagacgttctaaagtcagtaagaaagtgtgaaatgctagtataaaggttattttttttctttcctaaataactaaagtgaggtgtagattgagccttgatattatttagttaatgttttttattaattaattttggctggactttatttagcttgattaggttattatctgtcaaaccttttaagttgacaacatgactcatatatatacatgtgtataagatgagcatgtgtcgaagacttattcgactcattaatgaggaaaccagcagatagtaaacctggttcaaagtacaattcaagaaactgagtatttatgggcattgaagaaaaaatgttgagataaaattgctgtgcagaaaaaagtgttaatgaagccgacctgactacttaaccttagagacctgctttacaaggttggcccttgattggcatctgggaacttggagttcagggggcttccaccattcccagaactgatcaaagtagcttactatatctaaactgtaaaacaatatagtttctcctgaacacctgctttccttctgggagtctggaattttggtatgtgccaggcagagactacctttgtgaccagctcccagtaaaaaccccaggcactcagtctctaacaagcttttctggttgacagtgtttcacaagtgctgttacaactggttgctgggagaattaagctcatcctctgtgattccactggcggaggattcttggaagcttgcacttagtttcccctgacttcaccccatgtgtcttttttcctttgctgattttgttttgtatcctttcactgtaataaatcatggccgtgagcagaaaaaaaaaaaaaaaaaaaaaaaataaaaaaaaaaaaaaaa

SEQ ID NO: 24451 - DNA, 3728 bp, Homo Sapiens
aatcaattgtagtgctttgtgaaactcccaaatcaactccttgtctcatatctgctcttctgtatgagaagcaaacccttttacatttttttctcagaaaagagaaaggagtctgttcttacttttattatctatttggattcttgcctcccaacagacttgttctctgttaggacaggcaagtttggggctaggcaaaagagaggaaggaaagacatctctaagggtccggagatgattgacattttcctgtgtgttagctctttagcttcaaggactaccatgcaaaaatattggtatccttttttacacatgagtaagttaagactaagagtttgaaacgacttgtctaaggtcacataatgacagattaagaactcaaactcaggcctctctgactccaaaacttcagttcttttcactctgcaagaaacagaaggcattcgtagaaagcagaaatctggtgaggagggactatgattattactgtgactttcatacacagatcaatttcttccagcccactgaactcattgatagtctggttcagaagcttcccagcatttgcaaaatgttgctaggcacctgtatctctttgatatctcttggtcaccaccaggagtatactgtcacctacaccaaatcagagccatttctcgggtatagaataaagactttcttgatttctcctggttttccagaaggctaatggacatctcccggcagaagactagtagagagaccttttaaagaataatacatgttatcctaatactctaaaaataattctagagaccttgtcccagagctttcaggaaactctgccctggggataaggttggccttgacatgtgcatttctacatgtctagtcagcctgacccatggcctacccaataatatataaatcatgaccaagccaaacatggcctgggcccccaccgggacatgctttaaaaggaaatataattgctaagggagaagaaacaaaggctccatttggcaagtaactctattgaaggacaaaggagtgccagtgtccaactcaaggtggctgtttcaaatccacatgctttgtgtatagattttgtctcctcctcctgtttaaaaaatattgaatcctttgtaaaatttatctctggagacaaaggctaatgagccattgtctaaaagagctgagcagaatcttgttatctgctcattcaaccccttcatgtcacaaatgggacagggggagaaatggcatatctgaaatttacaaagaaaaaaatggcacatctgaactttacataagaaatggcatatctgaaatttacaaacttacatttacatgagtggtgccacaaccaagatacattgactcacagcatcttttatgaatgaaggagaaaagagtgtctgctgtattctgtcacttccacccccagagtatcccagttttgtgtcaacctcataccttgaaactcagaagttcaggtggacattttggctgtgaacttagctttggccacaaggtccagaagccacttcgaggagccgttaaacacacaacatttgcaagcacaaagatctagatgtgacctgcagctcttcaatttgccaggtctgcaaacttcgccaagttactgatcctctctggacctctggttcctcatttgagaaagatagctcaccgtagttctacatttaaacgatagtttaatgaggtaaagtgcataaagtgcctggatacataatatacccttgataaacatttcctcctgctgttatggataccccctctcatcagcatgatgcaaaaatcccataggttattaagtattgggatgtggaagaccaaattcagtttacctacatcacatggggcttctaagctctcagactgcaggaccttctctttgtagttaaacttggacctagccataaatatactcaggccacatcacattgcaaaatcatgagaatagccacaattcgtcttgggtgtttggtcgctaccctttccatagcagccctcccctgctccattaccagtctttccctccaatgtcttgcttataagatagggcaacagtcactcatttctttatatagcaaatatttatttagcatctgttatgtgccagccactgtgctaagtactgaatacatgacaatgaataggaaagctttgatccctgccaagtaaacttgagtctggtagaatttatttttcataaggcaggagacaggccaaataatgtcagtgttctgtgagtctttgtgttccttgacctctcccctccccaacacacacacatacctctccttccttttccaaccaccctcagattttccaggacacacaccttcagagccacatctcaactctggtcatccctacagtgtaacagtagaatgagtgtagtagtcctcccagttgtcacattttaaatagggcctttgggaagaaaccaccagtggcactgagtgaaaaggaggctgaggcaagggggactattggcagctcttaggtcccaccagcagccagtggtccctcagccttcctacagcgatacagtggtagaccagttgtctttgctcagcatatgttttcagaggcagctgaatgtttgggttgtatttttcacagtactgatgtcagggacaccaaagggcaggagcatagggaaagggctcttggctgactaatgacctcataagaaacctgcccttagaagagagcatctgtttgggctgtatgactcagtggcgtttctaggtactgattcatgaggctgaccatcgaggtgactgacccgtgcaatctgctggctgaaagaggtgaaggcaaagtagatcccagctctgccctcatcctggaggagagccacccctcctaccacggcacacgggtgctccccaccccaaccctggctcggccagccagtctccttgttaagaggatctgacactaatgtgggcagaggtcagcatctgggggcttcttattttagaggaagtataagagagagatgttttgaaatcttgttagtgaatagaggacagccttttaacctaggatctgtagatagaattgagggtgtcagggaacttaaattaggaaaagtattgcattttttatccctaacctataactgaaatttagcatttctttctactgtgaataaagacaaacgccctagaagtttagcagctcctatgcctttgataccaatggaaagcaggtatttttatatcacattacagctgagatagatcctcatcctacaatttatactcatccctgctctgaaatggccataattatacccactgctagatcatattcattaacttagtaaaggcacatctgttagtaagtcacaaatttgtttttatatattgatactatctcagtaatattggttttctttgtatttttatcttatgcatttaagacatttcctaagaagagatattctcatgtcagatagacaaagaacctaaaaatataaagactctttccacatcaagctgaggcattagcagcattacacgccacacacacacaaatatacacatctatgcataggtaaacatatatgcacacacatacagctgtagtggattgaggtctgaggctcttggagtaaacaaactcaattcaaattccaactctgccactcatttcctattacctcgaacaagtcatattagttctgagccttagtttcttcatcaaaaaaa

SEQ ID NO: 24452 - DNA, 4969 bp, Homo Sapiens
cggacgcgtggggccttgttctttgttcattcatctagcaggtattcccagacctcgtgtatgacaggtagctagggagctcttggagatgtagcagttgggattgtgggagattactgggcttcctcatcctttagaatggtaactctccttttgctttctgaacacctaggaatttcctgatgttttgttttgttggattccagactttttgttgtttctagtctgcagctgagctctggtgcctgttctttggcccaccccctaatccctaactcttccctcagcatcacagggcttcactgcacacactgtgttcagggcaagatttcatcatttactgactgcatactcgatatgttgtttttgtaactttagccaaaagaaagtaacctttagtggcagggatataaaaaattgctcagggtcacttgcagatattttatttttaaactttttttttttttcctggaaaacatcctgtgcagaaaagggtatataattttagaatacctgaaggcttcttggcttttccactttccttattcctcctcttcctgccactctttttgtcccttctgtctttcctgctcatccttatttgggtattagaggtgtcagttgaggagggactttagctgaggttaagccttcttttgggatttgcattgtaattgagggccctggaagatctctgagactcaaaatcaggtgaagctaggaagatggagctttaaggagcatggctagtgctctgagtaggaccgtaaccgcctccgtgcgtggcatatggtccctgcatgctgttcactctgtatagtacttagtattcgctgaggctaagaggcctcaggtgcctgggcttctgcccttggactcctggatatccagcctagtgctaattgaatgctaagcagtggtaattcaaaatgagagggtcccctgcctctagagtcatcatctaattggggacaggcagacctagataagaaaagcagagaactactttggaaaacagtttatctgctgtaattgaacattcagctaccctataacccagttaatccaatactggggataaatcctagagaaactcatacatgtacaccaggagatgtgtacaagaatattcatagcaaccctattcacaaaagcaaaagcctagaaataacccagatgcccatgagcaagagagtggacaagtaaactggaatattcacataatagaacattatacaattgtcaaatgaactataatgatacctaaccatatggatgaatctgagcaataaaataattaagtgaaaaaagtttaatcccagaagagtaaatgtagcatgatgccctttctaaatgaaaggttttttcttttctatggagttattctttacatacaatatagttcataaattttaaatatattgtttaataaattttgataattgtatataatagtatagtcaccatcaagatgtagaaaatagaaaatgggctaggcacagtggctcacgcctgtaatctcaacactttgggaggccaaggtgggaagatcacttgatcccaggaattctagatcagcttggacaatgtagtgagacctggtctttaccaaaaaaaaaaaaaaaaaaaaattagctgggtgcgctggcatgtgcctgtggtcccagctactcaggaggctgaggcaggaggatcacttgagcacaggagtttgaggctgcagtgagcagcctgggcaagagagtgagactccgttttgtgccactgcactccagccagggtgacagagtgagactctgtctcaaaaaaaaaaaaaaaaaaaaaaggcattgggatttataatgtgctgtttaaagtctgaagctcggccaggtgcggtggctcacgcctgtaatcccaaaactttggaaggctgaggcaggtggatcacctgaggtcaggaggagttcgagaccagcctggccaacgtggtgaaaccccatctctataaaagtacaaaagggcatgatggcgggtgcctgtaatctcagctactcggtaggctggagcgggagaactgcttgaacctgggaggtggaggtttcagtgagccaggatagcgccattgcactccagcgtgggcgacagcaagagacttcatttcgataaataagtaaataaataaataaagtctgaagctccactggtcactccttttattgattatttgcagctggtctaaccagttacgtatgtctggcttgattacatggccagagcaacataaaagccctgctgggaacttctgatttgagctcttccaaaaccaggatggatgcctcacatagatcatgatgattcaatccaaaggcactttgcagtgcagtccacatgtgcataaggaccatggggagcttgtatttgggaattctgagattcctgatgtttacctacctagtctttctcttgctgccctgtatcctttgcctttaaataaaaatcttaagtgattaaaaaaaaaaaaaaaaaaagcggccgcggaggcccggctggaggggcgacagtgtccccgcccgcccccggccgggtcgcgggcatgaaggacagctggatcgcggcggggggcggaggtggggcggcccgggcccctggactctagacctacgccgcccgggcacgaaggcccagccctggccctggccgcggtctcagcccgggaccccggatcgcgcagaaatgcactgaacaggcccctacaattgggctccagaaactacctgagctcggactacctgttgcctcacattggcaaaagagggggaaaccagaaggagggaattctgctgcggcgacttgactttccccgccccgagcagaaaggcattgacgtttgtaggcggtgacccgccccttctctggccttgccaagagtctcatccctaccctggggcacctctgaccctggacctgcttgggcagaggcagcgtgaagggcctgaacaagaggagaagaagggccttcctagtagaggcacagcatggacaaaggctcacaggggtgggggtgcccagtgatcgagtcctggcttgggagggaaggtctgagttccctgggaactgaaatcggctagcagcactgtgagagaggtgtatttccccctcctaatgacagaggaaaccgaggcttcggggagggggggatttgcccttgacatgcagataggatgaggaggaactgcgtgtgcccctgggcctgcaggctcccacacccctccccagtcttctccaagacctggcatgatgggaggagggaggggaaagtgaagagggaagcatagggctcctagggcaccaagggagaggggcccaagggtagggaatctggggatctcgctttctttggagcagtacagaagatcacaggaaagattaggacagacagctgagatggcagacaggagagatgggccccaggatccctggggagccaagctttcccccacagcctagcctccccaccccacctggagcttcaccaagggcttttcagcagtgaagtggcacaaacctcccagtttggtgggcaagtggggctgatggtggtgtcatggctcctggagacacgacataaccaggagggtgaagggataaacctggggtgggctggggctgagacccatggcatgaccccaattctctctcctcaagctcgacccccccgccatccccaggatcacacaggagaatctcatcctcacggcttggattggtcctgggggcccccggttgtgctgctaactggtgtacaatgctcaagagcagcccagaggggagccaggaagggaccctcgccctcacctgctatccccatttccgcatctcttgcactggtaccctgagggccacattctcagttcctgggattgaaaactgcagcagtctggccagctccagggacagagtgatccaaccacctaccacgtaccctcctcagcaggccactggacccaggtcctgaatgaagctgtccgcctgcctcaccccagaagaggctggacagtggctgcctcgtgccccctgcagtctcccacagccagggcccgatggggtgcctccttgtcccaagtctcctgagaacccctgaccttgctggcctctctcatccgccccaaccctgtccacccttgaccacctctgggggcctgtcagcctgctggtccccccaacagatctctgggggcagcctctgtgggacaagagtgatacagagctggaggagaagaggagtgaggggcctccttgtgtctgatgcacagatgtggccctttcaaaccctggtgtcaccctctgggtgactggatccctagctccagcctcttcctgggccagccaggaagggtggaggaaagttctttgctgattgcatgtgtgatacagtggggggtgcctgagccctccccatgcaaggggctcatcctgggactctggaagctgcttccctactgggagaaatgtgtgtcggagctgcaggggtccctaccctcagagacccccgactgcagggaacccaccccataagagggtcacggatgtccatgtccgcccaccccccgtggcttctgctgtggctatattggcctagaggggctggctggggaggagcagggctaagccctcagcatttgctcctgtccctgccttttcacccctgctgcctgaagtggtagccccgcctgctgcttctctacctcccctccccacctcttctctcccctacagggcccttgctgcgtgatggggtctccatgcactttatttatttgcagtctgttttctaggcggtggagcttctagacaccgaccggaatgacatacgtttctgtgtgtgattcactgtgtactggtcagcacaggctggccagagagatgttcttgtttctggtgttgtcacgtcttcttgttttctctaagaaaaaaaaaaaaaaaaaaa

SEQ ID NO: 24453 - DNA, 3892 bp, Homo Sapiens
aaacaaactgagacaaaatgggaatacaacaatgtgggcattgacttgtcccctgagcccaaaagcttcaattacccattgctctcgtccccaggtgatcagcttgaaattcagctaaccgagcagctacggtccctcatccccaacgaggatgtgagaaagttcatgtctcatgttatctggaccttgaaaatggaatgttcagaaacacatgtgcaagggagctgtgccaagctcatgtcgcgaacaggcctcctgatgaagcttctcagcgagcagcaggaagcaaaggcattgaatgtagaatgggatacggaccaacaaaaaacaaattatattaatgagaacatggaacagaatgaacagaaagagcagaagtcaagtgagctcatgaaagaagttccaggatatgactataagaacaaactcatcttcgcaatatctgtgactgtcatactaataattttgattataattttttgttttatagaggtaaagacaataattaattcaggttttcaaaatacaatcctgtgtttgtgtggattcagaatccacaaactgaaaaccaacgtcactttcccacttgacattcttcttctgtcatttaaggctgaggtgtgctttgttcttttactgcaatgtatattccaggattgttaaaggatcctcgcttccaggaggtctctgtgaaataaaaccaagttaatcccactagactattttaagaagttaagttgatataatagcaaaatttctcccacccaaaactatgtcaacaattggatgtactcactgagtcaccccttactctgccactaatttatttccttgttgcttaaatgatgagagacatataatctccaccctcacggagttgtcatcaccctggagaggaagaagacagccaaaagagagaagtattgtcttgtagacttactagattcacatagtatcatccttctccagtgtgtaaggtgttgtctaaataggtccagttaaagaactacagggtagccatttttaaaaaaaaattttggccacgttttcaaattcacaggggagggggaatgtctcatactccagccctcctgagcctaggccctctgtgagatgtgtcaccatttcttggacaccatatgagacattccccctcggattagagatgctcaacctgcatcaacaaatctaaagcctgcatctggctaccctggggcgagtcctgtttacagtgcctattcctggagctcgcctctttttgccttttgtttgattatgtgatgtattacttttcccagcaggccagtgctagcatactggaagagggatttaataagctggcacccttgatgctatgctcctaatccaaccttatttgcctcattggccatttccattatggtggcagccctccattccagccacagcagcccctcagcgtcccccagtcacactgtccccattgctgctcatctgtgcctttgtccatctacaatgcccttatttcactctgcctgtgggagtcctgtgaatctctccaaagccaactcagttcatctttctgcttgaaaccttccctgaataggccaggtgcggtggctcacgcctgtaatcccagcactttgggaggccaaggcaggcggatcacaaggtcaggagatcgagaccatcctggctaacacagaccattctctactaaaaatgcaaaaaattagctgggtgtggtggcgggcgtgtgtcgtcccagctacttgtgaggctgaagcaggaaaatggcatgaacctgggaggtggagcatgcagccagccaagatcgggccgctgcactccagcctgggggacagagcgagactctgcctcaaaaaaaaaaaaaaaaagaaacttccctgaatattccagccctcctgagcctagtccctttgtgagatttgtccccatttcttggacaccatataagagacttcagaggctgaagtgggaggattgcttgagcctgggaggtcgaggatgcagtgagctgtggtcataccactgcactctagcctgggcaacagagcgagaccttgtctcaaaaacagccaccaccaaaaactatcttgggatttgaataggattaccttaaatttgtagattaatttgagaattgacatctgtacgacattctagaacatggtatttcatgtcatgtattcatttcttgttaatgtctttcagaagagttttagggtttccatcatatagatcttacacgtcttttgttagataacagatctttgtatttttgttcctaaatacttcagacatttgtattgccattgtaaatgggatctttcttccattttctagttagttattggtggtacatctgaaaagcatttgaggtttgtgtgctgctctcttgattttgtttctagccaccgtactgaattctcatattacttccagtaaaatcttagttgattctcttaggcttctttggctaacatttattattttatatgcaaataattatagttttgtctcttccttttcaatacttacactctttccttcctttcctttcttttttttttctttctcagggccttgttgtcacccagactggagagcaatggtgtgatctagctcgctgtaacctcaaactcctgggcttaggggatcctcctgcctcggcttcctgagtggctgggactacaggcaggcagtgaattttaaaacttttggtgtagagacaagatcttgctatgttgcccaggctggttttcctgccactttagagcaggtttcctttttttcatacttttaagaggtttttattaggaattgtccattgaatgttagctaaaacagtcaataaaatgcgttaagtaccagctacatgcaagaccctaagttagatacagtcagccctcttcatcagcaggtccacatcttcagattcaactagataaggctgaatatttgaagaaaaaaacaataaaaatacaattagaaagtacagtataacaactgttgccatgatacaatatctatacattttattagtgatgacctaaagttcatgggaccaggcacggtgactcacacttgtaatcccaacactttgggaggccagcctgggcagcatagtgagaccttgtctttaataaaaataaaaataaaaaaattagctagtgtggtggtatgcacctgtagtcccagctactcaagaggctgaggtgggcagatcactggagcccaggaggttgcggctgctgtgagctgtgattgtgacactgctctccagcctgagtgacagagggtgatcctgtctctaagtaagtaaataaataaagtatatgggggggatgtgtgttggttatatgcaaacactgcaccattatacgtaagggattgagcatccacagattctggtatggtgtggaggcgatatcctagaaccagtcgtctgcaaggtagcaaggatgactgaactgtggaagaatcaaagcactgttaaacagcatacaattcctgtcttcaaaaaagttatctcatcgggtagatgagacttaaaatgaataaaaggaatgaatacacattggagatagtggttgttgtgatagataaccttaattgtgttttcttccaaaacgggtgaattcacataaaagggcatcagaaaaatacaaagacaacccatcaatatcaggagcctgagcatgagttaaagcatgtggatggcctagagccatgtttttaaaattgttattaaatattggttttttacttaaatcaatgaaaactttctttactttgtggttgtgttcctcaaaatgagaatttttaacaataataaaaataaagcttattagatcaaaaaaaaaaaaaaaaagaaaaaaaaaaaaaaaaa

SEQ ID NO: 24454 - DNA, 6476 bp, Homo Sapiens
ctgggaaggaaggagacgcctaaaccgcggcactgcccggtttgagcgtagccaaacctgcccaccggctttgtagccccgattctctgtgttttgctcccgtctccgacgagagaggcggcgacggtggcgtctgcgacgggagacagcgcgtcggagcgagagagcgctgcgcctgccgccgccccaacagcggaggcgccgccgccatcggtcgtcaccagaccggagccgcaggccctcccgagcccggccatccgtgccccgctcccagatctctatccttttgggaccatgcgcggaggaggctttggggaccgggaccgggatcgtgaccgtggaggatttggagcaagaggtggtggtggccttcccccgaagaaatttggtaatcctggggagcgtttgcgtaaaaaaaagtgggatttgagtgagctccccaagtttgagaaaaatttttatgtggaacatccggaagtagcaaggctgacaccatatgaggttgatgagctacgccgaaagaaggagattacagtgagggggggagatgtttgtcctaaacccgtgtttgccttccatcatgctaacttcccacaatatgtaatggatgtgttgatggatcagcactttacagaaccaactccaattcagtgccagggatttccgttggctcttagtggccgggatatggtgggcattgctcagactggctctgggaagacgttggcgtatctcctgcctgcaattgttcatattaaccaccagccatacttggaaaggggagatggcccaatctgtctagttctggctcctaccagagagcttgcccagcaagtacagcaggtggccgatgactatggcaaatgttctagattgaagagtacttgtatttatggaggtgctcctaaaggtccccagattcgagacttggaaagaggtgttgagatctgcatagccactcctggacgtctgatagatttcctggagtcaggaaagacaaatcttcgccgatgtacttaccttgtattggacgaagctgacagaatgcttgatatggggtttgaaccccagatccgtaaaattgttgaccaaatcaggcctgataggcagacactgatgtggagtgcaacctggccaaaagaagtaagacagcttgcagaggatttccttcgtgattacacccagatcaacgtaggcaatctggagttgagtgccaaccacaacatcctccagatagtggatgtctgcatggaaagtgaaaaagaccacaagttgatccaactaatggaagaaataatggctgaaaaggaaaacaaaacaataatatttgtggagacaaagagacgctgtgatgatctgactcgaaggatgcgcagagatggttggccagctatgtgtatccatggagacaagagtcaaccagaaagagattgggtacttaatgagttccgttctggaaaggcacccatccttattgctacagatgtagcctcccgtgggctaggtttgtatagataggtgtctctgtcaatggtatatgtatcttttggtttaaagattcgtcatttcaaattcagacttcaagtttagaaagttgtatatacatgtggttagataaatatttgaaagaaaaaaatacaaagcgtgattctccccattccctgccccccccacaattttttttaactttggtttcccccaccccccttttattttcaaagtctcttcctgctcctaacaaacaggctttggtctgcagcaaggcctaggcatgactattcaaacagagggagaggagacagacagctgaatggctcagcttctctctggtggtggtttctggctggatagaataagcctgacgaaacctagctattgtaagctagtttcttcagttattcttttccctatccctgtctaagctagatatatacagagaggtccagttttatgaatgcttattagatggaattttataagtctaatgcagtatcagaatagcaaatatgtgtattgcccagtttaatttactgaggtcaaattatcatgggcacttggctatcccctcctacccatgcacttatctgtaggtgtgttatcaactgatgattttctggagtttttgacccattaccatttaagatatacagagaattttatggtagtttagcccactattctgagctaaacaggtctaactcagaacttctatattttaaaaaaaaagattatttgtattacaaggaaatccttaaattattgacaggtatttaatttgcccagtaaggtgagaagtaccatattattcccttatactatataatataaagagaacaggtattcaaactggaatacaaaagtaatgaagcctttttatgcattgcactcatcattccctccttcagaggtggtgacctgcagccatgatggaaagttctctctgcccctctgccctctgaggtcatgtctggatctgtgccattagaacttgggcctgttgggagaggaggcggaggcctgaaggcagtttacataaagctttcagtaatggttggtttttaaacaggcttgctatgtgctggtagcttctttgtgcatcttgcctagacaattaaaaatatttgctccatgtccccttgcatttctaaaccaaattaattggctaccattagaataacttagactcttcatcccacccccactcatccaagtgaggggagagggaaggtacccgagtctgtttcttgttactcaacatcagtgcttgttttgggcccctttgtttgctgccttgtaaaaaatcaaaagagggagaaaacccaccaaaatggcagaattctgaccaatgtcctacaagatcctggaaagtgaaggcttctacctcatagacaggggtgcaattttcagctgagtcaccagggccttttttcacttcctgtcaagcgatggtctcttaaatgttcccttcaggtaagttctttgattcccataattttataatagtcatccttaggctaccacttccctttccactgggatattttttatttttccttttttttgtttgaactacacactgttaaactaaaagtattgaatttattttgttttgttttttaacagaagctttgatatcagctgcagatcactcaatacatggccgagacaaatctacattggccggaagcagctctagatgagcctcttggctagacttagtccctccttattagtgattggcgattcaggccatgtcatagggcctttcagacaaaaggttcttatcccagtcagctggccaaaacattaactttggatttcttaccctgctacagcatcttctagaaaggcagcaagataatattgtggcagtgcacagataacatcagggtagacttgactggagaaaaccaaattctgcgcttgctcctgtgtgcccccatccagctgtgcatgcacacacaggacacctttctagtatgaagaacttgcatcatgtctgccctctattgagcacccccttctagaaatacttccaagtattagcatgtgaactgttgactccaccctggtgctttctgctaggaaagcacacttaacgcatccagtgtagtaattgaacttgttctactgccatggtcatatgcagtgggattgcataaggagcattatcctagctctgaagataccatggagtagaattccccaccccctgtcttacatccaccctggccctgtaaattcttttttcctttgttgcgtcaacgaccctagccggagactcaagctgccccctgtgataagtgccttctcgtctttctggtgtgattcaggactttaggggtcagtaaagaccgaggagcctttattgtaataagaaacagacataatgccccttcttcacaagccctgtaacaacagctaattttttttttttgatctcccctttctcccttgaaattaatccagtctgggcaatagatgcagtctgaccctttggatgtaacttacatttttttttattaattatttttttctacaatcaccccaattatccttgggggaggcgttggaggacctgaaatttttacccgaacccaggttctccggcgcttggcaaccaaatggggctacagagaagcatctaagccagttcacagagcgagcgtgtgtggggacttctcactgccacggacccttgatgcatgctccccgcgctccagtggtcccgtgtcagaaggcggagttttcgaaaggaggccgccaaaaataaaaggcaaagagacgggatcggctgcagcggtttcccaaaggaggagggagtgtgcatcggtctggtaacaaacagagaatgttttttaattatttatatcacaaaaatctgtgttttatctaggatattttctgaatattctttgtaaaatgcagatttttttccacaaaacagtaggattctttgttatattcttaaaattgtttgtttaagtaggtaaaaatatacattcagctgaaagcattacactaacatttacattttaagccttaggaggttattcagcccaattcccagcagtagagagaatactaaacttgtgtctcaaggtttcatggttttcccacgttctttggctattaatttaatttcccaggtcacgtagacaatcattgataattgaaacaagtcctgagttgaaataaccttgagttgagcaaaaatatcctcattttggcagaagctgggcttggtagtacagtaaaattttagtgtaatgtgctcttgtaattgaaaggggatagataatctggatgtttctgcaaaggaaaataggtgtgtacttaacagctttggctctactcagtttcttaaaaagataagagcaaaaaaagttaaatgttaatcaaaacatttaagtttcctttaaattgtagtaataaaatatatgaagctcctttttttactttgctctgtgactggtttaaaggtaagtttgttatgttgttggtagattttgccaggcttctcccaacagagtagaagtgatttggcctcataacttcacagtggtttaccactttgttctatgttctggttttgtaaaggatagtactggaatttgcgtctgaagaccaatattggtgtaactcctgtcagtatattggtaaaatgtagcagaggcaggagtttggatgtttggatgggattcccttaggattctacagccaataaagatcctatttcctatgcatgtcccaggaatcagtaatcctcttttactctgttgggatgagtctttttttgtttctgttcagagtggttactaacttcaccttctttcctcttgctgtcatctgcattcgtgcttcccacctgttgttggcatgtcctttaccttctctttccctgccacatcaacctacacactgactcatcattgacgtggaagatgtggaagatgtcaagtttgtgatcaactatgactatccaaacagctcagaggattatgtgcaccgtattggccgaacagcccgtagcaccaacaagggtaccgcctataccttcttcaccccagggaacctaaaacaggccagagagcttatcaaagtgctggaagaggccaatcaggctatcaatccaaaactgatgcagcttgtggaccacagaggaggcggcggaggcgggggtggtcgttctcgttaccggaccacttcttcagccaacaatcccaatctgatgtatcaggatgagtgtgaccgaaggcttcgaggagtcaaggatggtggccggagagactctgcaagctatcgggatcgtagtgaaaccgatagagctggttatgctaatggcagtggctatggaagtccaaattctgcctttggagcacaagcaggccaatacacctatggtcaaggcacctatggggcagctgcttatggcaccagtagctatacagctcaagaatatggtgctggcacttatggagctagtagcaccacctcaactgggagaagttcacagagctctagccagcagtttagtgggataggccggtctgggcagcagccacagccactgatgtcacaacagtttgcacagcctccgggagctaccaatatgataggttacatggggcagactgcctaccaataccctcctcctcctccccctcctcctccttcacgtaaatgaaaccactcaagtggtagtgactccagcagacttaattacattttaaggaacactgtctttcctttttttttcctcttcgccttttctttttttttccttttttcttttttttttttaatttttccccccaaccatcgtgatttgtcttttcatgcagattagttagaattcactgccaggtttcttctgcccaccaaaatgatccagtctggaataacattttgtaaaaaaaaaatatatatatatatatataaaaaaaaaaaaaaaaaaaaaaaaaaaaaaaaaaaaa

SEQ ID NO: 24455 - DNA, 4120 bp, Homo Sapiens
gccccatcaaaactgagatggcccatcagctatatgtccttcaagtcctaacctttaaccttctggaagaaaggatgatgaccaagatggaccccaatgaccaggctcaaagggacatcatatttgaactgaggaggattgcatttgacgcagagtctgatcctagcaatgcccctgggagtgggaccgaaaaacgcaaagccatgtacacaaaggactacaaaatgctgggatttaccaaccacatcaatccagccatggactttacccagactcctcctggaatgctggccttggacaacatgctgtacttggctaaagtccaccaggacacctacatccggattgtcttggagaacagtagccgggaagacaaacatgaatgcccctttggccgcagtgccattgagctcaccaaaatgctctgtgaaatcctgcaggttggggaactaccaaatgaaggacgcaatgactaccacccgatgttctttacccatgaccgagcctttgaagagctctttggaatctgcatccagctgttgaacaagacctggaaggagatgagggcaacagcagaggacttcaacaaggttatgcaagtcgtccgagagcaaatcactcgagctttgccctccaaacccaactctttggatcagttcaagagcaaattgcgtagcctgagttactctgagattctacgactgcgccagtctgagaggatgagtcaggatgacttccagtccccgccaattgtggagctgagggagaagatccagcccgagatccttgagctgatcaagcagcagcgcctgaaccggctctgtgagggcagcagcttccgaaagattgggaaccgccgaaggcaagaacggttctggtactgccggttggcactgaaccacaaggtccttcactatggtgacttggatgacaacccacaaggggaggtgacatttgaatccctgcaggagaaaattcctgttgcagacattaaggccattgtcactgggaaagattgtccccacatgaaagagaaaagtgctctgaaacagaacaaggtgagtagagaggccagtttgagtagctggcccagtgatacttggagagtgccattggtggtggttttttccaggtgcattcttggcatcttcccctctctattcctgaatgttttattaagaattttgaacatacacaaaaatagatggaacctctgtatacacatcacccagactcagcaaccatggccagttctgcccatccacttgtttctctcctttatcgctttgaagaaagtcccaagtatcacactgtttcatctgtaaatatttagtgtacatcgtatagtatataacattgccaccagtccattagcacacataacaggaaatgaaagtagttatttcagatcaaatattccactgatggtgactttctaccaattgtcttataaatgtcataatttctctacagatatataaatgtttatatggatacacacacacacacacacacacacacacacacacacacacccatacccatcttgtctaaaccagagtctaagactggtcttttaagtttcttaattcataagttcccccgcccccccatcccccaccatcttttcctttgcagtttattagctgaagaaccagattgcttgtttggtagtttcctagcatctgaattttgctgattgtttccccgtggtacagtttaacttgttcctctgtcccagatctgtacattggaagagggatctagaggtttgatccagttcaggtttaacttttttcctggccagtgtcatcagtggtattatgttctatcaagaggcacataacgtctggtggtctctccttttgtgataattagcagactgttgaagctcagtgcctcattccatcagtcaactaaggtttgcaaactcatgatattttgatgcagtcattgcttttcatttatgagctgaaccatgaaacttgcccttatctactattggtttcccagtggtacagtttatataggaaacgagaataaatgctgattcttcttttatgtacttactttcaaaataatgagttagttccttggtatcatgcaacagtgaccaattttgtgtgtgtgtgtgttttgttttgttttttaattgttaagacattcctatgccaaatacagcacgatagaagttgttagtcatcttggtaatataaaaacttttaggataacttacagtcatggatcgtgaccttccagggttctgagtgttgaaaatgacttttttccaatcttaaaaatatcacaacatctttgatgtgacttgggcagggagtgggtaagttaaggttgatttatgctgggcctcatctccagccacacttgtggccgcctaggagcattgatgacattcatctgaatcagcatgtttggtgatgatgccgagtcactaggactttggccaagatcttgatgtgcagaccccaggctgttccatcgctctaatttaaaccctttctccttcaggaggtgttggaattggccttctccatcctgtatgaccctgatgagaccttaaacttcatcgcacctaataaatatgagtactgcatctggattgacggcctcagtgcccttctggggaaggacatgtccagtgagctgaccaagagtgacctggacaccctgctgagcatggagatgaagctgcggctcctggacctggagaacatccagattcccgaagccccaccccccatccccaaggagcccagcagctatgactttgtctatcactatggctgagcctggagccagaaacgacggtacccaggagaagggattttgggcccaggagaaacacttacattctggtgccttgtcttttgcttgtacagaatctgtagtgattttggtggccagtaaatgccagccatttctcaaacccacctcggaccacccagagtttcctcttggtccctgtctactaagagtcatgaaggcagggtgctctgcccactccatcaccatgaagcctgggattgggccacgaggaacaaacagcagatgcccttgccttccagtccaagaaactgcttcttgaaatggatttaacaacagccactcaccttttcctcctgagcctgctctctgatcagctggatccccacgtgagcaacagctggcccaggaaaggctgcctgcagaggacaggtgtgttgggcgtgttgagagccttgaagtgactacctgtatcttagatctgagtacaagcctgaggcttttgcttttgtcttttttgatgagggctcactccagcttcatatggtgccaagacgttgctgcttctgaggttggctctaacatctctggtctttagagccaccagatctctctggcccatacagatatcagagcagacggaaatttctccctgcaagcgctcagtctcatcccagcaagtcaaagacctcctggccaagtcctgccctcttaagtctccaggaacgctgcagggaaaacccagctgaggcctgggcctagactgtggtgaggtcactagattctactgctcttcccccacattaataccttttccttcctcagagagaaatctcccctaacctgaattgcagccccctccagtttgctttcctttggccttccagaccccaggaagttggccttcccttcctagtgctatggtttctgccattggccatgatttcagggagctggctgaggccggctgaggccacacctgtgccagtggggcttccctggtgctgcagcacttgtaaaccacacacacagcctctctccctggacatacgttagcacattggcattcagtattggtggcctggcatggtaggtactacccaatgaagagtgtactatatattttcattactataggccatacttatacagacgtgtatatatatttatataagatctacctatcttaggatggaaccttggggaaaaataaaattgaggggaagtaaaaagtatgtaacacttccagttgtgagccaagattgtaaccagagagcagccaggagcttcctgtcagtaaccatgttttcaataaatactctttcatagaaaaaaaaaa

SEQ ID NO: 24456 - DNA, 1502 bp, Homo Sapiens
tatatatgcagttctacatgtcagtacatttatctaaaatccattcacagtccacacataagattttaagtacttgtgataaatgttgtctttgttccactcccggtccctccccttttctcctcccctcctttggcccagagggctgcacagtgcctctctcggaaaaagtacttcataggtttgccatgaggactgctggggccaaggccacttgctcgccagggtgtttcatattccagtcagatgatctgggtgatacgggtttggtttggagcccaccttccaagaatgaaagaggccacttaccactttgtctgacactttgcagtccgccttcactggctgaaagactgactcttaggacttctaccccaaaccatagcacctaggggccatgtgttctgtttgagcctcagagtttgagatgagtgggtggttgagggagtaggcattcattagagagatgggtgtgggaactatctattatgtgctccaggattctcgatgtcactttgtgctgccaactcttgacgtagccatcagtgctagattaggaggggtgcttgcttgcttactacccattgagcacctgctgggcactttatatgcattgtctcatttgatctttatgaccctcttttgggtggtgggctggtggatcagaccctgcagctgacataccaactctaccatcttgattcttacagattacacagacagaggtccagcaaggacagcagcagttcagccagttcacagatggacagaggaacagcgtgcagcaagctcgagtctctgagctaacgggagaggcagagcccagagaagtgaaagccacaggaaattcaactccctgcacctcttccctgcccaccacacaccccccctcacaccgggctggtgcctcctgtgtctgctgctcccaaccccagcagagctccacttcccctcctccttctgacgccttgcagtgggtggtggttgaggtatctgggacccccaaccagctcgagacccatagggagctgcatgcccctctcccagggatgacctcactctctcctctccacccctcgcagcagctctaccagatccagcaagtcaccatgcctgcgggccaggacctcgcccagcccatgttcatccagtcagccaaccagccctccgacgggcaggccccccaggtgaccggcgactgagggcctgagctggcaaggccaaggacacccaacacaatttttgccatacagccccaggcaatgggcacagccttcctccccagaggacccggccgacctcagcgcctcctgcaggctaggacactggtgcactacaccccatgcctgggggccgagattctccagcagaaagatgcaatattttttgtttcctttttttccattttttttctctaaggaatcaatatttcaatatgttgagtgtgtgtccaatgctatgaaattaaaatattaaataacaaaaaaaaaaaaaaaaaaaaa

SEQ ID NO: 24457 - DNA, 4469 bp, Homo Sapiens
tgcctactcaggtaacgttttcttttgctctcatcttggtttccatatactatttttgtttttttgtgagatttaatcaatgatctagtcagaagctacttcactggctaacagtgatcatgttcatgtgctaaaaatgaacttgaaacacggaagtagtggttggtccagtttgaaagctcttattagtattcttcatcctggctgtaataatagccattatttgttatgcctttgttatgtagcagacactcttaaggattttatgtgtattattcaaattgctattactgttctttttatagttgagaatctcaggatacctacatttatcactttttcaatatatatgtatttcttattcttattttgtcttggagtgtttaatgtgttatttcctgttcattactttaatattatggtatctaggcttgtgtttattaccatgagcaaggtctccaggagttccacagtactgaaggaaaattttgtcatatccctcagaagaactgaatatttattattggtatgggctcctttgtttattctcttctcccaattaatagattttaaatgaaatcttattagctagaaacaaaagccacttactccttgctgagagccaattacttaaatatatttcttccttataataaaataatttgcttctaggagcagaaatctatcttgccataccctttggtttttaaagatttctcttctatttgcatttctgcactttggtggttctcccatgaagataattatggtgtcataaaattcacattccactggttcctttgaatcttaccaaccactcttgttaacagagacaatgaacctgaactgttttaggactcttgttattactgagacaggtcacaaacatcaaaataggagtccgtggcttgtagtgatgctttttagtcttgtgatagcacaatccatcactttccccaaaattcttgtcatagaacataatgaaaaatatgtaaaatacccatttatgtggcatttcattcacttaagttgcagttaactctaagccaaattataccattttttctctctgtactttagctccttgaatttccttaatctgggaaacttttgttcccacaccaaggaacaaattcagggggtacaagtgcaggtttgttacatgagtatattgagtgatgctgaggtttggggtacagatcccatcaccaggtggtgagcatagtacctaacagatagttctttaatccatgccctcctctctccctccctgctctagtagtccacagtgtctattctggtctgggaaattttcatcactttccaccaatcttctatttattctccaaatgtcttccaaagtatcctgccccaccccctcctcatcctaagagattcctttaacttcaagatcatatccagtgattgctgaaaaatgtctgccatgcacttgctaagctagtgtttttaggcattaacatttattatcacatccatatttatatttttgaaataatttatacttctcactgatatcatctaaacagatgcttctcacagttttatgttttgttttttgtcagggatgaaagacaagtgagtggtatcacttaagggaaagaacagtaggcttaacgaatagcagacctggattctagttctggctttgtcatttactagctctggtaccccaggccagtcacttaccatctctggttcggttctcatctatcaaacaaagaggctagacaagattagaaactaaaggcagaagacaaggtagaaaaatcatatgattttgggaagagcattttgtcctttggtttagaagaccaggctgcccaaaagagcctcctattttatccataacccctgatgataaggttggtgggaacagagtttctaatagtaatcataataaatttcagaagagttttaaagcttctggtcaacccccttgatttatatgggtgataaaactgaggcctagagcagttgtaatatgtgcaaagtcatagtgactggcctcctagcccaactactttgtcagctacaatgaaatgctcattaacagaatctttctgcaagtataaacagaatctattttttataaaacagctggccacaactaaccatgccccatctttacaactgcttctgacattcatttatgactgctttgctcacatttaggaataaactttgaaaaaaatactttgtcagaaatagtgccaagttttcactacatctattcttgttcctgtatttcttttcgtacttttaaattttatacatctttttaaaacaattttatacaatttcctttactacaacatccaagcaattcattagatgactacagcctagatgaaggtataaatgcctattacatctacctcattaaagaacttcgttgtaattcttgggcagtttccagactctgttacagaaacagagggctgtttctttttgttgtctttaaacttttcaaattaattcaaaactagtatctaattgtcctttttgctgtggtatgtggtgtaatgttgattgggaataagaattatggtagaaatagcagatgtttcaaattctcccatattagtctcttagggacgctagctccagattccagcccctggggcaataacttgtgaggattttcctggtgttacaaaaaatattgctgttaaaaaactaagactcaaaaccaaaagttgtgattaataataacaggattattagtcaataatattttgattaatactatagaatagcaacagtgaatatacctcaaattgaaaacttttaggttgtgttcttggctcattctctcataacctggatctaagttggaaagctgtggcaccctgtttgggtgtcccatctaccctgttttctgtttctgcagatggcttgttcaagcttcattttaagcctgctctgtctacttatcttccttatatcctaatagacttctcttgtgttattacacatttctcttttgctctaatatttcattattttccagtttgtcagtaccgttatcagagggacaaggaaggaataacacaccagttgaccattttgtttctctgaaaatctgagcaatacggagatccttttattagtaaaactgaatcattactcatactacaagggctttcacttttaaaatgtaatccatcattgcttgccatttttatgaaaaccaaagttgaaaagtcttctgaatcacaggctatgtatagccacacatgcatgacttcaggctagcataaagacatgtctgctcctgagcctcttcttttaaagggcaaccacttgtataccctctggtggccactcctccttctccactccaaggcagccctggtactttcctaagtggcccctcctacagagcacttgccggcatttggcctgctgctggtgaagacgccccttactagcttcataaatgtttttctgcaagcagggatcccagacacatactttggtttctagtgtttcagttactatgttgtatttgaaattctcattccacaattaccctttagttgaagtcctgaagtacatgccatgtactccccctttatttctaccttgatcaatggcctctgcggagtgtagtgaaagacatctttttattatgatctacactttaaaaaaccaaaggctgcctgtattacattgctttggggagttgttaagactctgttttttctactgcttcacattaaacaataattttgttgaattttgaattcttaaaattctcactgacaaacattttaggtcagtgttgaggaaaatgtgtgatgcatgttagagaggtgatgcattctcccttatgcagggacatgggtatatgtgttacatatgctgatatataacccaccattcatcccaggaccacaagggtagctgtagataaactggttatcctaaaatcatgattatcagtgttgatctctgcaaccaacattgctttagggagttgctagtcattacccctgctacaatagatagtatttgtcagtctaagttacagacaaaaaattctaggttgactgattaagaaagccatgtgttttaatttccttcatgttttaaaaacaatggacgtaagtgcagagagacctttgaaaatattaagggaaatctatttaatcctataggtatgtgatgacttgtttttttggaaaaaggtatttggaacatcaatctgtaattatccattttccattcatgcattcactaattcaatatttgatatgtgtctgggagtgctgggaataacataaatacaaaaaaaaaccctaagataatcattcaccagaagctcatagatataatacagttatatagctaaatgcaaccagttgtttttccaaatgtactcatcatctgtaataaaagaaaaatgaagtaaaacatctgaaaccttaaaaaaaaaaaaaaaaaaa

SEQ ID NO: 24458 - DNA, 7712 bp, Homo Sapiens
taagaactttgtgactgcggaatcattgagaaacattttctacattccagaccgcttctagaactctgaaactttgtgactgcatttacaaaggagtgtttaaaacacatgtgagaccttggagagctgcaccgtccagtatgtgtgtggctgccgagcgcttgccaagtgtctggtccaaattgacatgtgctgttaagtgtaaaatatacatcaaatctggtacagaaagaaataattttatattaattattggcagaaatcactaaattgttttattaaaattctacctatttctttatacattttcaatgttattataaaaatattttaaattatacatgtggctcatgttatattgggcaccattgttctaggactctgaagctttgctaatacaggaacatttacaaatggaagggggaggttaagcacatacgactatcatcaactgcatattttcccaggcttcttgcctttagttaatcaagtaatcactttgaaatcacaggagttggtttggttgtcattagcaaattggattgctacctaaaagcaacatctctctcctctcagactttttttttttttcattaattctgccactgtactagcctcatcaaaaagaaaaagtgacctcatgtgctatgaacccatcttgtacatttcggattggtcagattcagcccattctccctcatagcaaatgaaaacaacaaatcaaaaagcgcttttggctcctggcactaactgaatttgactgtccctagttctcgtttttgctggaggctggggtatgaatgcagaggctcagcaagccctgcacacacccggctgggtggatcggtcagcctgccaccctccgaccatcccaagaggctgggcccaaggacgcaggtccacttcctgggcagactctggtttgaaacttgccggtgctgagctgtgtccctcatattgcatgccccagtagcctaaacattcacattccctgcagagtccccaactccgtgtgagaaaataactgcaatacttattcaacacatgcagcctgatatcaaaatgtcttccctgtgtttgtttgcatttatttccttgatcttaagccagaacaaactgtcaataaggaacgtttctaaagattgaggtatgtgttggtgggggggaaggaagcccgggagaaaaacatctgggcaggtttactttaagctaacagaggctgatgtttcttgctgactgctaactcttcagggacacatacctagggctcccctgctaagcccacagggaactggcctccaagcccagtgactaagggcataaatctggtggttttgcaaagagagaggaatgtttataatccattagtaaccctttggagagaagtagatgggagttagtaaggaaggaaaatactgctgtctctccctcctgctttcttacactggaaagtaaaatcactacattgccattggctctggcttttgctagataatccattcatacatgctcagaacacagccgccctgttttgcatcaaaagaagagcaggctgctcctctttcctctctcagagatgccaggagcttggcagcctcaggaggaacaccaaacaaggtcctgggctgcgtggtggccagaccttccctcactccacggtgcacacaggctgggagctcctagctcatgtccactctttctttcagggcaagcagggccccaaggagccagccccacactgaagtgtgggggagcaaagctggagcagaggtgggatgcagaggtaccagcattgcctggaaccaagcagcagcgtccggggcaacctctatagagtgccaagtgaggccagtggtgggagggagctggacaggaaaaaacacagggatgaaggactagggctgagcacagggtccccagactccagaaaggcagctgtaactggtggataggggagaaaccagctcagaagcagccccaagcgcctggagctgggctcctgctgtttctagagggcagggagcccggagcctgggaggaggaaggtgttgaagggctgagactgttcagaccttgtacagcctctctgttacagtttcaggctgacagccacgcactaagattgctaggcactcagtaacaaaataaagtgcttactgtgtgcagtgtaagaagaatgcagactcctttgcaggaaagaattcttgttcactaaaggacaaaattatccttttaaattttgctggctaaaaatttgctctgtcactcaagctgctttgaactcaaccaagcacagttctaaagaaaaagggtaaaatattcatcctaattcatccttttccttaagtcatgctggttggtttcttgttagatttctgtctccgccttgtccaaaggtatttgctatttttaaatcatcacagtgtttctatatatgtgtgtgctgatttcttcacataacatgctaacataagcatggatgtgtgtttctacatagacttaatgatcatcatatttactgattttaatgccctttgaaatatatatgtaataatttaggtaactgcctagtgctggacatttctagaattcttacatgaactttgttgtatttatatttttccttctatagggtttccttaaagcagattattaaaaaagagattaatgggccaaagttcttacaaagataacgtgatttttgtttgtgtgttttttgatatgtatttccacattgctttccaattaaaacctgtagcaacaagtgtgggtctgtcagattcatcacatcttcatcagcttggggtgggtttttgttttgttttgttttgttttgctattttgcaaaatggtagaatcagtggagtttttatcttattattttttttaattcttattgatatcattatgttccatgtctcatagtgacgtgatcaagcatactttaaaataaaggcaaatactttgaagtaaaagtatgtctgtaattttgtttggctgggctttaagcatcctaaactaagagcaagcatttaaaaagttttccatctttccaagtatttaaatctcttttccatttcagattgctcttttatatggcaatttccatttttctctgccatatattttattaaaaatttaaatgtatttaaaccatctcattccatgaaagagaaaagcagaactttagtaaagtgcattcaaataattaaagtccatggcaaaagcaatagggaagtcagtcatgcacctcttgtggtccttattaatgggtccacatgcacacacatctccaaccagccccctttgtgtagcttgtcagaggacattagctgagactaatctggaagccacttcctggctcccaaatggacatagtcaccaaatcagaaagactcatttatcagaataaaaactttgctacgtgaggattgtgcaaagcttatttcatgcatcattatctgggcctgattagcagtgatggaaattggtcctcaatttttaacaatcagcggaaaacaaaccttcagctttcactgaagatagacaattgccatagacatgtctctgtgttttctgcacaataggaaaatagaggcaagagcccttgcaaagacagtttttaaattgttttggcagcagttgtctcacagatgccattgtccctgtgacgcaaatgaagccagatcccgctctctgagcagacgggttgacatcttcctggatgccccgtgccacaggggccacattattatgtgttgtggccccagatgcagctggtccttcttgggctttgggggcaggcaggcctggttccagatgccagtgtgacctgggcagctctgtagtctctccgtacatagtttcatcactgtacaacagtgacaacaacactacctgcctgaaaaactgtgagggttataataagataatttatgcaaaagagctctgtgcgggggctggcacaaaggcatgcagacaggcctcacactgctaggagcttcctcctgttaagtctgagaggaggcccttgggaagggtcttgcggagtcaagggtggagcagttactcctgttactgttgctgtgaggttttttggccatccttattgtccttatgtcccagttcaagattctagggagtacagctcttcaagtggcattatcaggcccccaagccctgcccctgcaagtggcattatcaggctccctgtcacccaccaagggtaggaattaagccaaagtaaacatagagtctgtaaaagtcatttatagtagaggagtgaaatttctcgttttctgagtctggcagggtgggctactgctagggtggacacagatggaggctgagcttatgaagttggtgggacttctgggaacactcccccatgcagccctgcacaaccctccccacggacctcctaacagcaggcagatcctgcaccagaggtatgtagcctttatcactgggaccttgaacgacgctgcactcaaatccgcaagtgccaaggaacagccgggctgtgcagtgttgaggtgaggtggaccagcctccagccacgtgcacatgcttggcctccagatggcttcactccttcttgccaggtgccaggtgcaggggactgctgtagcgcaaggcacagatgcaagcaaatcctggatcacgtgaaccgtcttttgtgcggtggaattaaaactttgacttcagtctgcagagtgaatgaaagctgtgtgtggtttggttactgtaacactttggggccccacacacacaccatatatcacatgtccaccacatacaagacatatactccacacatgcacacacgctacacgcatcccacacatacctgtgcacacacatgggggacacacacacccatgaacaatctgcgtctccgtagttctgaggacaacagcagtacagtgagtatgtgactgcttgaatttgagtatgagctgttctatcctcagatattcctggaaaggagtacattaaatcaatagtaagagaaatgagtgctcctttctctttggtcttccctagaactgaaaaagctgtcacagcctcaaatgatgaagaagacctattaattgctggagagttccgtaaaacccttgcagaacttgatgaagacctggaagaaatggaagacagctatgaaacagacaccagctccctcaccagctccatccatggtgcatccaaccactgcctacaggatgccatgatccctcacggcgacacagatgcaatcccagtaacattcataggggaagtttcagatgatcctgtggattcggggttgttttccaatagaaacaacaatgctgggtctttcgactcggagggtgttgccagcaggagagcctccctggcgccacttcaagctgagcacagccagccccatgaaaaggcaagggaggaagtacctgccctgcaccccgcttcccatgacatcggaaaaggaatccgtgtggccttatctaacatctctaaagatgggaatctaatggaaacggcgcccagggtgacttcttttgcttcgaatcttcacacagacaacctaaatgcaaaagtgaaagacaaagtgtatggctgtgctgacggggagaggactcaagccacagagagagtgaattcccaaccggtgaatgaaaaggacagcaacgataaaaacgctgccttggcaccaacatcatggcaccaacgaggccaaaacccagggaaaagctacagacttaagcacggcctcacaacgtataaaatcattcctccaaagtcagagatgcgatgttacgacagagatgtgtccctctccaccggagccattaagattgacgagctggggaacttggtgagtcctcacgccaccggcatcaggatcatttccctgtcttcgtctgtgcctgaagcagaatctcagcccattgggaaagtcagagagttctggaggtgcaactctgtggaaaaacacctgggccgaccctcagagagctctgccaggggacccccctccacccctgtgcccacgcagacgcagaatccagagagcagactccaagcagaccccaagccaatatcgccccagcagaagtctgcccaccatgagggccggaaccccctaggggaggggagaaaccagccccccaccatgggcatgggtcacgtgagggtgccagcagctcacaccacagaagtcacatttctcaagcctcagagaagaacgtccagccagtatgtggcctctgccattgccaagcgcataggagccccaaaagtccatgctgatgtggtgaggccacacggttatgccgagaagggttatgcaggcaaggcgccagtgctggctgcaccacctgtcactgtgaaagatgacaggacatccagcccacagtcagagacacaaggatggaaggatggtgcccagtggccctgtgtcactcctcccaacaaccacggggaagatttggcagtgggagcccctcctaggggggaggtcattggcccacacaggaagttgtctactcaggacagacctgctgctatccacagaagctcctgtttctcactggttcagtcttcccagagggatcgtgtttctgtgggacagagctgtggtttcagtggaaagcaaagcacaagtagccaggaggccagctcagcatctgagcccagacgcgcacctgatggtacagacccaccccctccacacacatctgacactcaggcctgcagcagggagctggtcaatggctctgtgcgcgccccaggccacggcgagccttcccaccctccaggagggtctggcacagaaagccacattctcctagaaagagaggaaaagcccagtgtgttctctacagatggaaatgaaacagacagtatttggccacccagcatttttgggccgaagaaaaaattcaaacctgttgtccagagaccagtcccaaaagacacatccctgcactctgccctgatggaagccatccactctgcgggagggaaggacagactacgcaagacggcagaacacaccggggagggcaggccagcgaaactgtcctacacggaggcagagggcgaacgatctgcactgctggcagctatccgcgggcacagcggcacctgcagcctgaggaaggtggcatcctctgcttctgaggagctccagagcttccgagatgccgcactctctgcacagggctcggaaagtcctctgctagaagaccttggtcttctgtccccaccagccattcccccaccaccccctccaccctcccaggctctctctgcaccaaggacggcctccaggttcagcacgggcaccctcagcaacaccgcagacgcaaggcaagccttgatggacgccatccgctccggcacaggggctgcgagactgagaaaggtgcccttgctcgtgtgaatgaacagaggccagagaattgcagaaacccacctgtaatatgcccacaggcgtcactcaaggagtctgcatagccaggaacatcaagttttggtgttactttcttgtctacaggccaaaatgcgcacagttgattttcggtgtgttcctgtataacggcttgaaaggaaaggagaagatgctgtgtcgctgcgcagctcgtgtgccaaggaaatgtgttttgcctctgaatatcttaagttgctaataaacgattcttgttggcaggttaaaaaaaaaaaaaaaa

SEQ ID NO: 24459 - DNA, 5440 bp, Homo Sapiens
acagtctgcagtctacggcgaggcacaggccagcccagctccacgaggactgaacaaggtgctgtctcactgccaccatgccggaagtcgagagaaaacccaagatcactgcctcccgcaaactcttgctgaagagcctgatgctggccaaggccaaggaatgctgggagcaggagcacgaggagcgcgaggctgagaaggtgcgctacctggcagagcgcatccccacgctgcagacccgtggcctgtccctcagtgccctgcaggacctgtgccgggagctgcacgccaaggtggaggtggtggatgaggagcgatacgacattgaggccaaatgcctccacaacaccagggagattaaggacctgaagctgaaggtgatggacctccgtgggaagttcaagcgcccgcccctgcgtcgagtccgtgtctcggctgacgccatgctccgggccctgctgggctccaagcacaaggtgtccatggatctgcgggccaacctcaagtctgtgaagaaggaagacacagagaaggagcggcctgtggaggtgggtgactggaggaagaacgtggaggccatgtctggcatggaaggccggaagaagatgtttgatgccgccaagtctccgacctcacaatagaggccagcttgctgtgctgcgctctgagctcctgcttcatgcttcttctccaacccagctcactcacctctctgcctgtgtctggagcatcccttcccacctctcccccacttcttccctccagcctgcatgccctcctctggaactgggattaaacagatacccaagaggcaggaaaaacgcgagtgtctgaagacctcaccctggcagggtgggcttctatccacccatgaggcacctggggcttctcagccaccccgtggtgtaacaagtggaggaggaggagggggtgagaacacctttcctccagccctgtgccacactccttctatgtgtgtacagtgtccacaggcatcacaccttcttcattaaaaacccagtttcctggtcatttctgcagctctggctgtgagccctgagaagaaagggaagacttggggtttgggaagagggggctgtgctgggctccagtcaccctgtctgcagacctgagcttgggatctgaagggagggctaaggaattggtggctgcttgccagggtcccctggggccccttctgcccagtccctgtgacgtcacactgcacacactcaccacccaggatgctcagctcaccagagccctgacctccgagaaatgaccccgtcctgcccctgactctggccatcagaagaggcctctccattaagagccgcttctcctgccggctttcatactctccttcctctgcaaacctggattaactctccctgatgtgtgctgggttgagaggtcagggcactttcaatccctcacctagtcctgctgcacagggcaggaggcctcacagaagagatacttgcagttccaggcctggccaccaggtgacgccttccttctctcctgggctctcctgtccctccggcctctgctctccccacgttcacccaccctcctcccaactgtttccccttcacactcctgcactggtcctatcccccaggactgattctttcccggagatggggtggccacttatctgtcctctggatcaggtcctttctccatcccactacctcctgggtccaaagcctggtgagagcatagggccttctggggtggaaggggggtctggggcagcctctcttcccccaacatactcactagagtggctcctgtgaagcagagaccaaagttctgacttttctttttccttttttttttttttgagatggagtctcgctgtgtcacccaggctggagtgcagtgacgcgatctcgactcactgcaacctccgcctcccaggttcaagcgattctcctgcttcaacctcctgagtagctgggattacaggtgcgtgccaccacaccccgctaatttttgtatttttagtagagacagggtttcaccatgttggtcaggctggtctcgaactcctgacctcgtaatctgcccacctcggcctcccaaagttctgggattacaggtgtgagcgaccacatccggtcaagttctgacttttcagggcagtgggatggtgacttctgggctaagcctgcaagggaagtggctgttcccagacctggggtcccttggcttttcgaccaccctagcactggccctaggaggggctgagttatcagagcagcaacccttctacccaccctactgagtccccattctaccttcgaatcccatgtattatcttccataagtgccagaaattggtacaaagtgcagtgccagctgctccccagggcatggtctggctctctgggctgctgggctgccagcccctttcagaaagcatggcagtgggaaccagcaacttgggctaccttaggggaagcagcactctgcccagggttcttgctataaataggtcagtgggcagagaggcagatgtgtgcaaaaagcacaaccccaatcacacacagaaacccgtaggcacggacacacccagtctcaatgcacgaagttggagaacctgacagggctggtccaggccacagaggatggggttaggcttcatgccttcatgcccaggcagccacagaaacccactcttccccgcctcacagggctcctccggttggcctggatccaaagcgatctccttgtttcacctctttccagctcttccctagagcctggccccaagttccagagtcaaatcccagttttgcagtcaactattaacctggggccctggcagattggggtatccacccagtcatgtaaaggcaggagacctgctctgggcctgactcaaagcaaacacgtgggtgcagaagacccatgggaggaggaggtggggcccactcaacacacctaagccagtggccctctaggaggggcagaagagccaaccagagggttcctggaggtcatggggttcctccttctgcttccaggcagcaacagacctaattcatcccctgtgaggatggagcaagggcgaatataggcatagacatatctggagcgcaaggattgagaggccctgtggacaaggggaaggagagcttgggggtgggagagggatctatggaaggggctgttgtagccaagaatggggcctgggctgggggcctggcctctggagagccctgattctactccagtcttctctcaccatggagacaacaccagtagagctgggagctggggcctgccactgagtaacagctcacacatgtagcacacttatgcgtcaggcaccagcatgtacaccttaatttatttaactttcacaacaaccctaggagaatggtacagctactattctcatggtacagtggggaaaactgaggcacagagaggttagggacttttcatgatcacacagctaataagtggtggtcccaggattcaacccaagaagtctgttagaatccatactcttatcgactattttaataacagcatttcaataatagtaatatgtgatgttaaatgctttatctgagttatatcattgcattctcacaaaaatggtacatttgttagctcaaatttacagatgaggaaatggaggcctggagagttcaagtagctcactctaagttacagggtttgctagctgcagactggagactagatctcaggtcactctgccttggggttgcccttttctgagatcagactggccttaacagagcccaactttcttggaaggacacagctgggggtcgagggtcctgcatatgcacctggggagtccccacacacccgcaccaaaggggaaacattcaaaggagatgcaggtgacatacagatgggctaaggtgaggccttcctccaacatggggccctggctgagagtggagggatagggtgctacttgggggatatctattactaatcagcacacaatagctgggtgggcaccccctctctctgcagctggtggagatgggcctggtgctcctctctgcttggtaggaatgaccagggcaggatgccacctgctacactcttgcctgtcccagagcccttgggagaccagctgttgctcccacctttccccacagggtgcccggtccccacggcgcaaggaggccaagctcagctgtgtgtctgagcccactcagcagcaggcatgatcagggcagggcccagcgctaagggctgctggggctaaagtgccttgctgaaggaggggcagagttaaacattagccacaatggccccccgcgaagtgagtcatactccccacaagtctctgggctgggcagccgggggcgggggggttagcttcgttccaggtgggtgaccaagctgcggaagcccaggacagttcgctgggaccagtgctaatggcagcttctgctcctgacccccatcaggtctctttcctcagacatccccaaagcttgtctgcctgtgggtctttcattaaaggtggcgggcaagggttttctcttccttccaagacacacttctaggctggcttgtgggtcccctgagacgaaggctgagcagggtgagcctcgaaaaccccatagcactggcccagagcactgcggtcaatgtccgaaggaccagagagggagggtgacttgctcaaggtcacaaacctaactggagctaggaagtaggtccccagactcccagtctgaggaaattggatgtggacagggctttggcctcctggccagaggcaaacgcccagggatctgaacaggctgcccatctctggcctcaactcagcaccccaactggctccagtgccaaccattggcctctctcactggttggcacaggctgggtgagcctggccctttgccctgggttcaggagagaggtatggctttgcctggcagtcaggggaggtgttccaacctgggagcccctgggggaggagcgtgtgtgtgaacgcttgtgcctgttcatcagaaggggtgagcatggtgtgtatgcgtgggcatgcagaatgcagggtgatgacctgtctgcccgccctgagtgtcacagacacctgtgcgtcccctgtactagtgcctcccagatgctcttctcctgactggctctttgtgacctaaatttcaactgctccaccccacaaggaggaaaccagggccacaaatgtagtgagattttcataaagctaaatgtattcagtggaaacgaccttcctctgatctaaaagcatgcatgcctttgttttattactggagtattaaattagcccttacttatggaataggaggacagtaggtggcaattgttttctaatgctcttacttcacaaaataaaatggtggcagcacaaaaaaaaaaaaaaaaaaaaaaaaaaagaaaaaaaaaaaaaaaaaaa

SEQ ID NO: 24460 - DNA, 4508 bp, Homo Sapiens
cgccgagagatcgagggctggagctctgactcagacagtgacctcagtgagagtactatcctccaactgcacgctggggtcagcgagcgctcaggctacactgactcagagtcttcggcctcattgcctcgctccccgcctcccacagtagatgagtctgccgacaacgccttccacctggggcccctgcgggtcaccaccacaaacacagtagcctcaactccaccaacacccacgtgtgaggatgcagcctctcgccagcagcgtctgtctgctctgcggcgctaccaagacaaacgcctcctggccctttccaatgagtccgattctgaggagaatgtctgtgaggtggaactagacacagatctctttccccggccacggtcacccagccccgaagatgaatccagcagttccagcagctctagcagctctgaggatgaggaggagctgaatgaacgccgagcctctacctggcagcggaatgccatgcggcgccgacagaagacaacccgagaagacaagcccagtgccccaatcaagcccaccaacacttacattggagaagacaactatgattacccccagatcaaagtggatgacctctcctcctccccaacctcgtcccctgagcggagcacttccacgctagagattcaaccaagccgggcatcaccaacttctgacatagaatcagttgagcgaaaaatttataaagcttacaagtggctccgctactcttatatctcctactcaaataacaaagatggagagacctccttggtgaccggggaggcagatgaagggagagcaggaaccagccacaaagacaacccagccccttcttccagtaaggaagcctgtctaaacatagcaatggcccagaggaaccaggacctgccacctgaaggctgcagcaaggacacttttaaagaagagactcctagaactcccagcaatggcccaggccatgagcacagcagccatgcttgggcagaggtgccagagggtacctctcaggacactggcaatagcggctctgtagagcacccttttgaaaccaagaagctcaatggaaaggccctgagcagtcgggctgaggagccgccttctcctcctgtccccaaggcatctggctccactctcaacagcgggtctggcaactgtcccaggacccagtctgatgacagtgaggagaggagcctcgaaaccatctgtgccaaccacaacaatggacgcttacaccctcgtccccctcaccctcacaataacgggcagaacttgggggagctggaggtggtggcctactcttccccaggacactcagacactgaccgtgataactcgtccctgacagggacactcctacacaaagattgttgcgggtctgaaatggcctgtgagacccccaatgctggaacaagagaggaccccactgacaccccagccacagatagtagcagggctgttcatggccacagtggcctcaaaaggcaacgaattgaattggaagatacagattcagagaattcctcctcagagaagaaattaaaaacatgataaatacaaagggaaaacaaaaagctacaaaagtagccttacaaaaaaaaaaaattgtttagtgaatacagaggaaaggaaaaacaagtattaaaggcacatgaaaccagggcctgaaattttgtgtctgatgctgctcccttctatccaacattcaacaacgggtctgaatgtctagctggccattggcttgtgctgtgttaagaaaggggaaaaaaaaataacccaagtgactcctttctagtgagacgtgagcgtagtgtgccgcgcaaggctctgtggaagtaaatctttgttgagacgttcgacttgttcttgtgtacgcacaatggcacgtgtgcgcttattgtctcataagaccttccttttagttctccatcagaaaggacctatgaatttgtactttttgccatctcaccctgtttacatgccataggtgttctggtctggatgatgggtgcctgttaaatcaggttgtgctgccagtgagttgtagatttatgctggaagaatggagaatggaaacaggccttcagcccattggctgcgctggagaggaaagcatggttcctttcttaaagaaatcttccatgttttctctaagtaacacttctttattgagcatttaatgtggtcatactataaaaaagaatttttaatgctaatgagaggtttagcacttaagatcagattcaagagaatatagattcctgataaatttcactgtttgcaaattgagcagtgctgcaacatgtactgtatgaaggccataaaatagagctagtcatggataacagactttaaccagttaggtgctagatcctaagaggcactcacaaggccagcaggtgcttccttggctcccatgatcgatcgaggcatagtgaaagaagggcaaagacagctttccagagctttgtgctcaggctactaaagtagttgttataggtgtgttaacgaagaagcttagtgaggagcagaatgtggtactatattcatttaactcaacccagaaccattggtcagaattggtgggactggcatcttccctcagacttgcagttgatagaggctgtggtgttctcactagactttgcagagcagtaggcatctcaaggtaacagattcttattgagtaggtctattaggagtcagaaggtgttggggaggagtctctggcttatgactcctggttcccattagtcttaagtcttctggttcccataaaagactcagttttattgaggtagatacaggtttagaagagaaaagagcaacagattttcagcgttgcagtcactcggttatctatgaagggttgtgcaaaacaggaaggtctgggaatgaccagatatcttgttggcataaatgttatgaaaaggcagaatactggcaagaaatgaggaagagagagaaaaacaatataactttcttgagtgcaaaggtactagacaactaggagcccagctgggattggtgtagggagggccgaacgctgactagtgtggcctcactgccccaggcttcctttcagaggaaggcctgtcctgctggaactggagccaagggaaggctgcctatgaaggcagaagatgtggatgaattcaggcactcggggtgggggggttatttataaacacaaggtggttggtttaagccaaaaggagataccatcctgataagctctgtgaaagagaaggtgtgcctggtgtgtgtaatgcggctggggtatgaaaacactgagaaggagatgaaggagtgtgtgtagcatgggggtgtgtacaacttaacacctggacttttactgggggagtgggaaagtgattctgtaaccaacattagaattactttggatttgtaatcagattggttctatgatttgtctttgactattcacagataattgtaaatgctggttttataagcccaagtcattttacatttgcttttccaaaatgtattaaattggaattttttaatcctttatatacaaaaaaaatacgatcactcagtgtgtgtttctcttccccttcttagtcagcacacccagtcctttattttattctattctatttattttattttaataagtacttagcctcttctgacttctcaaaggacaatcggatacatatcttcctgaaaagaagtagttaaagttcccttgggaactagctacttggtagttacaattcccaaatgcagaacttgtcttttcatgttaaaagccttaatctcatttgggtactcaaaagagaaatcagagtttattctggttaacttgagaagccaagaaagatcatttttagcaagtatgccttccatccttggcagaggcttcccagcatcctaggctcagcttaccgggtgataggccccataagacacacacatgagcagggtgagaaatgcttgctttatagctgctccaccctcatctccagagattttgtgtctatggttgtgggtctggaaacctggcaggaaccacttctagagtacctttgcctaaactcttttagaattgaggccccaactttgatggcacatttaatacccaatttcttccataatagatatttttaatagcaggacagatggcactgattagatcaagaactatttggaagtgcctcttatgtttttttcctgcattctgtacataaagttttaagtggcaggtccagatatgtaaaatcatttctctctattttccagctggttttgttaatgattctctaggacagcaggtaaatgagttaagtcgttggcttggggcaagtgaagtttgtgactatgcttgatttaataagctgagagtctcttgtttgtctgtcaaggtgccttcctctgctgaagccttacctccttctcacccagtaacggttaactcttctcttgtgtatatgcaaataaacctattattcacttgaaaaaaaaaaaaaaaa

SEQ ID NO: 24461 - DNA, 3575 bp, Homo Sapiens
gtggtgaagctgtactaccgggaagaggcagtggctgaggacgtgctcaacgtggatgcctggcaagacggcgcggtgctgcagatcggcgatgttaagtacaaggtggagcgcaacccgcccgccttcaccgaactgcagttgccgcgctacatcatggccgggttccctgtgtgccccaaactcagcctcgaatttggggatcccgccagctcccttttccgctggtataaggaagccaagcccggagcggcggagcccgaggtcggtgtcccctcgtcattgtctccctcctcaccttcttcttcttggactgagactgatgtggaggagcgtgtctacaccccgtccaatgccgacatcgggctaaggctcaagcttcactgcaccccaggcgatgggcagcgctttgggcacagccgggagttggaaagtgtgtgtgtggtagaggctgggcctggcacctgcacttttgaccaccggcatctctacacgaagaaggtgactgaggacgctctcatccgcactgtctcttacaacatcctggcagacacgtacgcgcagactgagttctcgcgaacggttctgtacccatactgtgccccctacgccctggagctcgactaccgccagaaccttatccagaaggaactcaccggctacaacgccgatgtcatctgtttgcaggaggttgaccgcgcagtgttttctgacagcttggtacccgccctagaggccttcgggctcgagggggtgtttcgaatcaagcagcacgaaggcctggccactttctaccgaaagtctaagttcagccttcttagccagcatgacatttcattctacgaagccctcgagtccgacccacttcacaaagaactgctggagaaactagttttgtacccatcagcgcaggagaaggtgctccagagatcttctgttcttcaggtttcagttcttcagtctacaaaggactcttctaaaaggatatgtgttgctaatacccatctttactggcatcctaaaggtgggtatattcgcctcattcaaatggcagtagccttggctcacataagacatgtttcatgtgatctgtatcctggcataccagttatattttgtggggactttaatagtacaccatcaacaggaatgtatcattttgtcatcaatggcagcattccagaggatcatgaagactgggcttccaatggggaggaggaaagatgcaatatgtctcttacacatttcttcaagctgaaaagtgcttgtggtgaacctgcttacacaaattatgttggtggctttcatggatgtctagattacattttcattgacttaaatgctttagaggttgaacaggtgattccattacctagtcatgaagaagttaccacccaccaggccttacctagtgtttcccatccctctgatcacatagcacttgtatgtgatttaaaatggaaatagatgtgtgtttaatggaattgaagtctgaaaaggaagtagttattttagcagaaaatttaatatgaatcaaagcttatatgtaaacttcaaggaggaatggtaaaatgttcagccctcctagttatgttcctgatgtcttcgttatgaaactgttgatgtttgcatcatacatcttctctttccttgttttcctctacaattggaggagaaacaaatatatttcttactagcaaaatagaaaattgaattatttttctccaaattgagactctcagaaaaggaagattgaattagcgtgttttttgtttgtttgtttttgtttttgtttttgttgttttgagatggagtttcactcttgttgcccaggctggagtgcaatggcacaatctcggctcactgcaacctccgccccctgggtttaagcgattctcctgcctcagcttcccgagtagctgggattacaggcgtgcgccaacatgtctggctaatttttgtatttttagtagaaatggggtttcgccacgttggccaggctggtcttgaactcctgacctcaggtgatccacccacctcggcctcccaaagtgttgggattacaggcgtgagccaccgcacccggcccttgtgtacatttttataagagaatttttttagctaggagttcagaatttttaaagtaccatttgaatgatcttaatttttctttcatgacaacacattccaaaatgaatcatgcttatgtactaagagggaaaatgtatttaagttaagggtgagagacttaagttataggtgaccttagagacctaaggtgagagacttgacacatggaaggagtaacattagggtctacctctacctcaatttagttagcgatttactacaatttcagagctttaacaaaagataaaaataaatcgtcaccaattgttattgcttctcatctttcatttttcaatgaacaagtaaggtattttcattcttatttttaggattttagtttttagtgtatggtacaaatgaacacagtttatattctaattcttactgcagctcattttaatttttaggatgcaagcacaatttagtattcaaagtgagtagcaacatattcaacttgatcccattgtcttcagttactcttgcccatgaaaaatgttcataaatgaacagggtatttgaccatatgatattagaaaatacagcacattactttatgagaaactacctactgatatgggcttgaaattttggatgaatcattgagcatttctacactagaagtaatttcaaaattgttggtttttataaacaggaaaaaggttgagtagtgggacttttaagcatctctgaaataaaaaacttctttttacagacaagcattatagtttgagttacagacaacagtgtgtatatatgtaatatatatatagtaaaatgaaatttaaatatgaagccaaactttttaaaattagaaactacaaatggttatactgattagtgtctagcctagagtggtaaccatgctttactaattcagttatgaaatacattatttataatgcattagctgtattagctgttgcttttttgatgttcaggataactatgttatctcatttctgcatttaattaatagctcgagtattaaaagcccactcccttcaagaaaagctttgattttccccagtcatgaaagcccttgtttcaaattctttaatctctgaacctagtatcataagaatttcctcttttgataacatctgtactttcatattctgctcactatcaaatgtattgttaacacttagtaagtttgaaaatgaaggggttttatctgcatttgacattgaaccttgaagtactttaagtactccaaggggaaaattaaagtggaagtttcttcggatcttgtttagaaaaaactataaataaaaaattgatgctaccaaattgtgccttcctaaataacatttttgagagcattttaacagcagtttacaaatatgtaaataatagattaaaaccaaatcttgaaaaaaaaaaaaaaaaaaaaaaaaaaaaaaaaaaaaaaaaaaaaaaaaaaaaaaaaaaaaaaaaaaaaaaaa

SEQ ID NO: 24462 - DNA, 2225 bp, Homo Sapiens
agagaaggtaagcttcctggaaaagaaggtgacagagctggagaatgacagcctgaccaatggggacctgaagagcaagctgaagcaagagaacacacagctggtgcacagggtgcatgagctggaggagatggtgaaggatcaggagaccacggccgagcaggctctggaggaggaggcgcggcgccaccgcgaggcctacggcaagctggagagggagaaggctaccgaggtggagctgctcaatgccagggtgcagcagttggaggaagaaaatacagagcttagaacaacagtgactcggctcaagtctcaaacagagaaactggatgaggagcggcagcgcatgtctgaccgtctggaggacaccagcctgcggctcaaagatgagatggacctgtacaagcgcatgatggacaagctgcgacagaaccgccttgagttccagaaggagcgggaggcgacgcaggagctcatcgaggacttgcggaaggagctggagcacctgcagatgtacaagctggactgcgagcggccaggcaggggccgcagtgcctcctctggcctaggcgagttcaatgccagggcccgcgaggtggagctcgagcacgaggtcaagcggctcaagcaggagaattataagctgcgggatcagaacgacgacttgaatgggcagattttgagcctcagcctctacgaagcaaaaaacctctttgctgcccagactaaagcccagtctctggctgcggagatagacaccgcctcgcgcgatgagctaatggaagccctgaaggagcaggaggagatcaacttccggctgaggcagtacatggacaagattatcctcgccatcctggaccacaatccctccatcctcgagatcaaacactaaggcacggggctggctgcagagcagccttaggaccctgggaccaagggcagaccctgcccaaggatgcaggcctaagccgggcctcacactcacactgtaaatgtctctctggccaccatgcgttacgtgtacccgtgtatatgtggggaggctgtgcacacgagcgaggggtgagtggccgtggctgtgggcagcatccacacggttagccgtgcatgcactttgtggcccctttgcaaggggcagagggtactggaagtgggaggaggcaaggtctgctatcaggagttactgtaaaaacaagaactggaagctcgtgtttccggtactgggtaaaatgattctacctctggggataaggattcacattcgctctagtacgatgggctctttcaccccactcctagtccccttgggagtgggagcaaaattgtgatctttcctaggagtttgaatgccccatatttgtgtcctcgccagctctttggccacctttcaagccccagtgttcaagctcagagaggatgaaggggcatctggagggtccatgagatggggccctcaccaaatgccttggccaccggccagcagccctctgtgatgtgtgtgcagagtgaacagaggactcaggtttcatagcagctagtgcggggcatcctcatcctgtacctatagagttcgtgcactcccccatccatgctacctacctccccgtttctgtttcagttttaagacaatgaagcagcattcactgcgtcattgtaacatgaagggataaaaatgaaggagaaggagggtttgggatgggtgtctaaggcaggagttgacatcgggcaaccaaagaaatgagttttggggaggaacacaactcccatcccagtcagtttccttcccatggctgcatcttaagatggatgcacggagaaaccgtctgcctggctccctgtcttcattctccacgcagcctggtgatggcaggcctgggtttggatttcagaatcctagctccgggctccactcgtgtggcagcaagactgcttcgttccagcgtttagaaacacacctgtatttgattctcagccaggggagcactcgctgcactggtgggaggcggttgggaaagttgcaggaaaaccttagtcttccatccttctgacccatggtggaaattcacaccatggatttttaatggatctttgttctaggcagctgggaatagacatggtacttaccttagagttttccaatttatctcaattttatatggcttgtgattcattttcttaatccaaatatatataaacgtgtgtggtcttaaaaaaaaaaaaaaaaa

SEQ ID NO: 24463 - DNA, 2355 bp, Homo Sapiens
tggacatattcatgagactgtctcacacaggcatctcgaacccagtgtgtcccacaattctcttcctatccatgcctgttcctcttccactgcctcatatgtcggtgactgtccaccttctctctctctccccctctccgtttggctcataggaaaagtgtcaccaagggctgtaagtgcagatttctaattatcccctaaatttgaacatttttcctctcgaaagtgtatggccattaccctattacagatcaacatcttcaatcactggaatgatggcaataatctaattgggttcattttatcctctatctaacaatgacaactcattgcctacacagcaggtagaaggagtttgttttcagaattgccctctgacctatttaagacgctcagatattccctgaggcgccttggcatggccacaaaggccctacacattccggctgcttcctcctttccagcatcctcgctcacgtctcctctcctcagttccaccctcaggaggcaccagaattcctcacttctttcactacaaggcaccgtcttactcccaagaccagtgaatccgaaggtggaccaccagctgagggactagattccagactgaatagaacaactttccctgtctctccacataaagtgtgtttgtttttcctcttacaggtttccttaatgacaacaaaaaagggagtaatcctacccactgtaagagtcatgactcttgattgcagctgacagaaactcatgacagcctgctttagatgaagggggagagaaggactggaagaatcttggagttgggaatgtcacacgtaattgaaggaagaacaagaaaactatagtaaagaaccctggggtggtgatgtagtcatgggccaagtgtcctggaaccctggggtggtgatgtagtcgtgggccaagtgtcctggaaccctggggtggtgatgtagttgtgggccaagtgtcctgggttttgggtggagaaagagtcccctagataagttattaggtgggtgcaaaggtaattgcagtttttcccattattttaattgcgaaaacagcaattacctttgcaccaacctgatggagtcccccttgccatgcttctctctgtgaaaaaccccaagccgaagtcagcataacatccacaggactctatgtttgcaaaagccagcttagctatattacatgtataagcacattttttcaataagtcagccttagcttactgtaactttttaactttataaacttagtattttaactttttaaacttttttgttgaaaactaagacacaaaaacacatgttagcctagatccacacagggtcagggtcatcagtatcactgtctttcacctccacattttgtctctctggaaggtcttcaggggcaataacacacatggagctgtcatcgcctgtggtaacaatgccttctacagtacttcccaaagggcctgctagttcacttaattcttttatagagagaaggagtacactctaaaacactgatcaatagtatattatagtaaatacataaaccaggaacacatttattatcattatcacgtattgtgtattgtacagaatggtgtgtgctgtgctatccaggaacacatttattatcattatcaagtattgtgtactgtacagaatggtgtgcgctgtgcttttatgcaagtggcagcacagtagctttacacgagcatcactagacacatgagtagcattgcactcggcaacaggaattttttcaggcccattattataatcttatgggaccgcatcctatatgcagtttgtcattgaccaaaatgtccttatgcgatgcatgactatatttgcaaaggactagtatctagaatacatttaaaagtcttaaaatagtaacaaaacaaagaatgcaattagaacatgagcaaaagatacaaagcaacatttcactggagaagatatacagattgcaaataagcacatgaaaagatgtttgataccattagggaaacgcttctttaaaccaggagatatcaccacgtgttagaatcaacaaaataaggccaggcgtggtggctcacgcctgtaatcccagcactttgggaggctggggcaggcagatcacatgaggtcgggaattcaagaccagcctggccaacatggcaaaaccctgtctctgctgaaaacacaaaggttagccaggtgtggtggcacacgcctgtggtcctagcaccttgggaggctgaggcaggataattgcttgggcccaggagacggaggttgcagtgggctgagatcgtgccgctgcgctccagcctgggcgacagagcgagattatgtctcaaaaaaaaaaaaa

SEQ ID NO: 24464 - DNA, 3036 bp, Homo Sapiens
ggagaagcctttgtccatgggagagtctaggcctgtgtccccagctctgtccaggtgagaggcacgtgccaagaacctgcaaggcaggtctgggccgcagcccagctcatgaggttccacgggaagagtgatgtgcaggctcgggagcgtgctctgtggtgaggccctgagtgtcagccagccggaaattgcttgtgacatttcaatcaaaccgccaaagcatcagctcacacatcggggatccgctcttcctggcggggctgcaacccagaggccgcctcccagccgctgcaggcattcatcagacagcacagatctcgctcggagaagtgcgcatttccggcctttcctcttctcccccgtcttctggttggaacatcattcagtaccagcaaaaccagacagatcacggcattgctcagggaagtgagaagtactgattttctggctggtttgtctaaaaccttctccaaagtggtgcttcctggaggggggtgcccatcgaaggggtgggcaggcagtgagtggcctggactcccaggtcagcatctgtatcgcactgcagtttatctgtaaagttcctgaacctgagccaaaggtggctcaccaccagcctcagagcggctgctggcaccatgcatggtagcaggcggggtccaggcagtacggctgcgctccccaacaccgccagctggttgctggggccgggcgccagtttctccagaggctgccacagtgaaggcccctgtcccactgcagcgaacagcaccctgtgccgcccggcctggggaccgtccttcagcctctcagacgccatgggcttgagatgaacgtcccttccagacagcagcgtgggtcccctcatctgaattcctggcagccttcaaacaagtgactccccacactccccttataaatctttgtaatggtatttacttctaggagaaaaagccgatcaatagcagagctttttaataattaaaagtgtgtacttctgtaatctgccattgactccctcatttattctgcaagagctcgcagaggaaaccgagttccgggctttctccgtgcctggtgtctggggccgcgtcctgtcaccactgatgactttgccgcaaagcctattcatcatcccaacgccttctaattgattgttggataatgttgacagcagtgacacaggggacagacaccgtgagtgtggaacgaagccaccaggatgcaggttttctcgcaggaacataatcttcttgtcctaaccgagcacattttctcttctaggccttggttcataggagggctgggggagtgaggtccttacactgtgagagcttggctctctgctgccatcacccccattcaatcttggcattccgggggcccagctggatccctgaaggctctgagtctgatgtctgcctgacgcatgcctgcaggcctggttctccaggggagagacagggagccgtcacttggccttagagcaggtggtcagggaaaagcctttccgaagccggctcaaataggataaaggaatcagtaatggcatttactttactttcttaacttttctttttttctagagatggggtctcactctgttgtccaggctggtctcaagctcctgggcataagtgtttctcttgtcttggcctcccaaaatgctgggattacaggtgtgagcaccatgcccggcccagtaattaggtttttttttaaaaagccccaaaccttaattttatttgcccctcatttcacggagctcccagcgtagtggggagaagctggcccagagaaccccacgtcctgcacagtgagggccagcccttggggaccccatgtcctgcacggcgggggccaggccctggggccacgtgtgttccccccccacccctattttctgccgcgtgctcgttctgctgcacgtggctgtcacttgaatgggaatttaaaaatataacttaatgcacactgacttcccttgattggtgcaattaattatttgaaaagaaaaatatcacagtgttcttaaggactggcatttttccaagctgtgtcagttttgattgatgtctgacgccgtggctggcttctgaaagcctcaccagttctgatggcttattggcgacttcagtgtatccagcaatctctgctcatctttctgggggaatatataatgatcagcaggcctgagaactcctacaaatcagagataagaaaacaaatggcccgatgaattcggcgtgaggggcttgagcagacgcgttacgaaggagctgcaggaacgaaagccatggttcagtgcccagcatcggtagaagtcagaggcagccagctgggagacaccgccagccccaggacggccacgtcagaacaccgccaccagatgccagtgaggagggcgcagctgcacgctgctcccagccggggtggatgcagggcggtgccatggccatggaaaaccgttcggcattttcttggaaacggaagcatgtaccctgtgccccagcgatgccactctgtgcatatttactcaggagaaatgaaaacatatgtctccagaaagattggtacataagtgttcttagcagttttcttcacgagagccccaaactggaaacagcccgcacgtccatcaacaggaggatagataaataaataaccatagatccacgcgcaaccgagtactgtttagaaatgaaaaggagcggtcgcctggtgcacaggacagtgggaacaaatctcagaaacgcacgccaggtggaagacaacaggcacgtgtccctgccgtacaacgccattcatgtgaaccactaggagggaacgaggtctgtggtgactgagagcgcgtgcgtggttcggtggggatggcctggtagagggctggtaggaggggtgcctgggggcccggcatgttttgttcctgtctggatcagtggttacgcccagaactccgagcagcctgtgatccctgcgttttactggatgttaaataaagatgaggagcccacttgacttcaaaaaaaaaaaaaaaaa

SEQ ID NO: 24465 - DNA, 2803 bp, Homo Sapiens
gtccaggagctcgaaaatgcatcaattaccagtgggtgaaatttgatgtgtgcaaacctggagatgggcagctacctgaggggctgccggagaatgatgcagctatgagctttgaagcctttcagagacagatctttgatgaagatcagaatgatccccttctgccaggatccttggacctcccagagcttcagcctgcagcctttgtctcttcttaccagcccatgtacctgacacatgaacccttggtagatactcacctgcagcacttgaagtctccatcacagggtagcccaattcagtcttcagattgaacaagaagggatcagatgccacatcgtttttgtcgtgattaatttaacttaaactaaaattttgggtatatgaaagaaggcagcaattcagaagtaaagaagatactaacgtatttcatcatggaaggtcctgtggtgatggttttccctgggaaaaccttcagctgctttatttttagtaataaatttctcttgtcaattctgtttactttcatcttgtaatcgggatgtaatcttttttgcttagctctgcctgaggtaaagtaaacttcagcctcttataaacaagagtgatagagagctgcaggctgctacaacaaataccatagacaggttggtttataaataacatgaatttatttctcacagttctggatgctgggaagtccaagttcaaggagcgcagattcaatgtctggtgagggcccacttcctagttcttagacagctgtcttcctgcagtgtcctcacgtggtagaagaggaaggcagctctccggggtcccttttataagatcactaagccggttcatgagaggtctgctctcatgacctaatcacctcccaaaggccccacctcccaataccatcacattaggggttaggatttaacatgaattttggggacatataaacattaagtctgtagtagcagcagctgactaacgagggagatagggagattctgacaaacttctactcttgattgtgatcctaattcaaggaatatcaagtcccagcccctgcaacccaggctgctgcttaattttcatgtcagtatcatcaaaatccaatgttctgcttaaactcaagatggaaagtccagtccaaggtacactgttcatctttttcttcacattttgcacatccttcaaggggatctttaacctctttaacctttgtattgcacctcagataatgtgctttttagctcagtacactgaaaccatatgataacacaaattcacatataattgggggttagtcccatactctataacagacttagtcctgtcttttcattagccatgtaataatataactccatgttccatgcaactggatttttggaccctgttaatagcattaaggtagaggtttactctatcacctaacacctcaacactacctgtgggatgccttagttacccagcagcaggttaccaagggctgtctggaaagggagggacaaaaggacccagaagtagaagaatggggatggagtggtgagaattgaatggttaatgcactgccattcataattgccaattgaggacaacacaaatgggattggtactttatagtaataaatctgaccagcagagggagggatcaggcagcagtgtttagagcacaccacactggccactgtaaactgagaagctaagttaactggtattttatgattttgagtatagtctttttataagttgtatacactttacaatgtaaaagaaacaaactttgtataatagcaaatcgggaaggggactgcttaaaatgttaatgcagtgtttttctttttttctctgcataaatggcttgagcatactggcatttacacagaaatgatatatgctgcttttatcatataacaaatattttcccactattacagcctgagtaatacccgtattaaaagagcctcattttagaaagacatttaaaatttttggaacataccacatgtagaaaggttgaactggtttttcagctataatgcatatacaactatagtgtgtacgtataccacatatacatatacttgtatgaagatatgtgtaaaatgtttttactatggatcatggatttaagaaacttgaaaagctgggcacggtggctcacgcctgtaatcccagcactttgggaggctgaggcgggtggatcaagaggtcaggagatcgagaccatcctggctaagtcggtctctaataaaaatacaaaaaattagccaggcgtggtggcacgcgcctgtagtcccagctactcgggaggctgaggcaggaagaatcgcttgaacccgggaggcagaggttgcagtgagccgagaccgcgccactgcactccagcctgggcaacagagcaaaactccaactcaaaaacaaaaacaaaaacaccttgaaaaacactgccttagtatacttaaactatcttttcatctatcagattgttaaggattttttttaaatttgacaacatccagtgtcaatgagggtgagggcaaaaaaaaggactaccttggtgagaatgtaagttgtttaatcctttgggagggttaagctgtagatatctaaattttaaatatatatttatcctcttccatgttaagaaccctaagaaataactggacgagtgtggtatgatgtttgcatgtgatattcattacagtattattttaatagtagaaaattgttaaaaatctatatgtccattaataggaaattggttaaataaaatgaggcttccacaaactaaaaaaaaaaaaaaaaa

SEQ ID NO: 24466 - DNA, 1886 bp, Homo Sapiens
gtcccagctgacttagggtggatatagcccaccagcacagcacagctgctgtacaaaagcatggccagactgcttctttaagcaggtcccggattcattcctcctcactgtttgggacttcccaactggggcctccagccacccccactggtgttctcctgctgacagtgatttcagttttttcttggctggagctccctgatggaggggcaggccatcatgtttgctgtttttgcaacttaaccacttcaaccttcagtctttggagtgtccaaggagaccaggggctgatgtggaccctcagcatagcacagatgctctataaaaatgtggtcagactgctttttaagcactttcccaatgtcattccgcctcactgggcaaaaccccctaactggggtctccagctacctcctacaggtgtgtttgggccagcaacaagttcattcatacctccctagggcaaagcttccaaagggagcagtaggctgccaacttttctgtttcacagccttcactgatgataactccaggtactggaaaatctgaggctactagagactgaagtgggccctgggcatactgcagcagccctatggaaaagtggccagactgttacctgggttcccattcctgtatcttctcactaggcaagtcttgcaggcctgggcctctacctaacccccctgccagagctgtcgagccagtagcaactcagccactccctggacagagcctccaggggcaactgaaagcctctctgccactgcttctgcagtggaactgtccttgctaccctcagactgatgaaggagctaacacccttatctacaccttcaacaagctttaattgaccaaagcccatctcccacgggttttacacactccccactgctcataacagacagggaacccctggattggcccccacagcatgaattctccatcctgcttgctgattgcaataaacagttgctgacctgtattctccgggggtagaaccctgaggagacaaacaaaagacccttggctacaaccactactaatgtcccttcctcttcttccccaaagttagggaagaaatataaacactgagattgccccagagctgcagtgggcagcctaggagtgccaagccatgatctacagccagcactcaaggaggagagaagcacattttcagatcattgagagtgaacatggctgcaactgtgaggaaacataggggagccacatgaccaagcaagactctaccaactgaccagtaagcccaagtgccacctactggatcacatcccaaagcttcagcaccaaaaataccttactaatatactcccctctgaaaccagaaatgagaagtcagcttcaaataaagaacctgcacaaagcctcagcctggtgaaaacatctgaaaataagtctacggactgtactcaatctacactgcaattaaaggaaaacccataggtggaaatgagaagaaaccaatgcaagaactccagtaactcaaatggcctctgtgtcatatgtccttcaaacaaccacaccagttctccaacaagagttcttaacctggatgaactgtctggaattacataaatataattgagaatatggataggaaaaaaaatcatcaagactcaggacaatggcagaacccaatccaaggaaaataagaataacaataaagtgttataggagctgaaggacaaagtagctggtataataaaaaaagaaactaactgatctgaaagcgccaaataacacaatacaagaattttacaatgcaatcacaagtattaacagcagaaaaaaccaatctgaggaatgaatctcagaacttgaagattggttctctaaaataagatgaaaaaaaaaaaaaaaaa

SEQ ID NO: 24467 - DNA, 4070 bp, Homo Sapiens
aataaatagcgaggtaaataatgtatcaatctaatagaatattatacaccaattttaaattattgctgtcaagcccatgtggtgacatggaaagaaatattttaatatgagcttttaaaaaacctaccatttggccaggtgcggtggctcacacctgtaatcccagcactttgggaggccaaggcagacagatcacgtgagctcagaggttcaatatcagcctggccaacatggtgaaaccagtctctactaaaaatagaaaaattagttgggcatggtgctatatacctgcagtgccaggtagtcaggtgtctgagacacaagaatagaatcgcttaaacctaggaggcagaggttgcagtgagctgagatcgtgccactgcactccagcctgggcaacaaagggagactatctcaaaaaaaaaaaaaaaaaaaaaaaaaaaaaaatgaaatttccagctgggtgtggtgattcacacctgtaatcccagcactttgggaagctgagatgggaggatcccttgaggccaggagtttgagaccagtgtgggcaacatagttgagacttgtctcttttattaaaaaaaaaaaaacaaaattttagcagggcatggtggtacatacctgtagtcccagccactctgggctaagatgggaggatcacagaagcccaggagaggagggcgaggctgcagtgagctatagtcataccacctcactcccacctgagcaacagagtgaggccctgtccctttaattaaaaaaaaaaaaaaaagttaaaataaaaattcagatttccctgtctcattgaaagttttatttttattttttaaaaataaaagtattagtctttgtttaattgaagggagatatttattgagagaaaacttgagatgacatttacatggatgagaagagtgcctatggttttaccaaacaataaagtcgtgaaatggagtcacttttaaggagggccaggcagtttctggctgggtgtgtttgttctcattgtcttttttatgttttgcaaaagccagccagtgccagtcttatcaaagcagagtttctaagaaatattagttggttttaaaatgcaattgccaccatcggtgccttcccttccagctgagacatctgaatttatgacttctaatattagttggttttaaaatgcaattgccaccatcagtgccttcccttccagctgagacatctgaatttatgacctttacaatcctttatctatatgatctcagaaacatggattttcatcttcagaaacaggagcaaagctggattgaaaataagatcatctatttatttttaattacaaagacatcccgtcattaaaatgggcatctatttgtttaaatatagtttgtcccctttgccagttaacgctgtttcaaaaactgaaatagtgccaacagtattttctcctttgagttttatgtctacatttggactaattcagggtcacttagccctttttgtcatattctacttgctatttataatagatttgttcataaactgtgttgtacaaaaataaggcattgtccttaattacaggagttttcctttgctaatatatatttattatttgaaaaacttaaacgtttcaaagaaaaagaaaatgcttttaaaaaattattttgttatatatggcttatatctcaacatttcattttgattatttgctttttaaactcatgacactgttttattttttttcattgtcctgcaatttcagagcatgtaacttctaatgccagcgatagtgaaagtagttacctaatcttgattacagatgagtatggctgctcaaaaggtggtcaagaagaatacgtcttatcttatgaaccagtgaatcaacaagaagttaattatactcgaccagtgatcatattgggacctatgaaagacaggataaatgatgacttgatctcagaatttcctgacaaatttggatcctgtgttcctcatacaactagaccaaaacgagattatgaggtagatggaagagattatcattttgtgacttcaagagagcagatggaaaaagatatccaggaacataaattcattgaagctggccagtataacaatcatctatatggaacaagtgttcagtctgtacgagaagtagcagaaaagggcaaacactgtatccttgatgtgtctggaaatgccataaagagattacagattgcacagctttaccctatctccatttttattaaacccaaatccatggaaaatatcatggaaatgaataagcgtctaacagaagaacaagccagaaaaacatttgagagagccatgaaactggaacaggagtttactgaacatttcacagctattgtacagggggatacgctggaagacatttacaaccaagtgaaacagatcatagaagaacaatctggttcttacatctgggttccggcaaaagaaaagctatgaaaactcatgtttctctgtttctcttttccacaattccattttctttggcatctctttgccctttcctctggagtctttcttgagtactgatttcatgttgaattgtatcccacacatcatggtctgcagcttctttttcacatgtagtgtctccttcaagttacatcgtgtgtattatttaatgtcactattggttagtggccatttttcagaactgaagatggaatggcctgaccagctattaagaatgtggggagacgcagaaattgtggtaaaattccttaatgtttaagggaaagtaactttaagagatttttggaaaagctttatatacattcttttcaaatttcagtacaaatgaaaaagtggttttaatcagtgatttagtagactttgagcaactgtgcacgcttcagtttaatagcatggtttggccagtgtattactctcaagtccttttctcaatcaacttctatcatcaaagcaattgtttcattatagataaataaggacattttttaatttaaaaattcatgtctgagttgactttcataagggatttcattttttcctcaacattcttaaagccttttagtatttgacggttcttttttcccaggacatttgctaggaataacaacgtttcaatgtttttaatctacttgagcaacactatcgtgtcttacaaaagttgttcatatgtaaatgatcatcacatttcgtgaattgaggccatgttcaggtgctaaggaagttcgccttttacacagaagattgagaaaatttcctagatataaatacagataaatcagacgttacagtggtgacgtagtaaccatcatggcaatggaaaggagtccaattcatagcctaaaacttcaaatgtattcttaggagtcagattttactgaatattttacccacaatagctgcctattttgttataataaaatatatataaatatatatataaaactttctttaaactgtaactatgggaattattttctttacatagttgcgcacacacacaaacatatatatatatttaaaatatattttgtttcttttgccacctactcctaactttttgtttggttttaaattaaatattaattgaatagacttatcttaatcatgtgaactgaaaatgggggcatggtggtcatgaggaggaaacatttagggaaattagattataagtaaaagtgtgggcatattctcctcttttctacaaaggttttcaaatggttcctgaggttttttgttgttgtccgtgttgttactgttgttcttgtcatcaggtttgattttggtccttgccctttccttctagttctccttttattaataggaaggcaggcaaaagccccatttatgtgtgtgttttcccctcagacagctttcatccactgctctgcactagaattgcacaaatcttcatggtgagcaattttaagaaatgttagtgaaaggtagaaattatttcacaaatcagtttctctgctccttcatattaataataatatttggcttcccattgctctttggagttgtttattaaatatgtgtttttgacaacctcaaaaaaaaaaaaaaaaaaa

SEQ ID NO: 24468 - DNA, 3667 bp, Homo Sapiens
ggccgggcagaggggcttctcacttcccagtaggggcggccgggcagaggagcccctcacctcccggacgcggcagctggccaggcggggggctgaccccccgacctccctcccggacggggcggctggccgggcggggggctgacccccacctccctcccagacagggtggctgccgggcggagacactcctcacttcccacacggggtggctgctgggcggagggtctcctcacttctcagatggggcggccgggcagagacggctcctcacttcccagacggggtcgcggccgggcagaggcgctcctcacatcccagacggggcggcggggcagaggcgctccccacatctcagacgatgggcggccgggcagagacgctcctcacttcctagatgggatggcggccgggaagaggcactcctcactttccagactgggcagccaggcagaggggctcctcacatcccagacgatgggcggccgggcagagacgctcctcacttcctagatgggatggtggctgggcagagacgctcctcactttccagactgggcagccaggcagaggggctcctcacatcccagacgatgggcggccaggcagagaggctcctcacttcccagacggggtggcggccgggcagaggctgcaatctcggcactttgggaggccaaggcaggcggctgggaggtggaggttgtagcgagccgagatcacgccactgcacttcagcctgggcaccattgagcactgagtgaaccagactccgtctgcaatcccggcacctcgggaggctgaggctggcggatcactcgcggttaggagctggagaccagcccggccaacacagcgaaaccccgtctccaccaaataaatacgaaaaccagtcaggcgtggcggcacgcgcctgcaatcgcaggcactcagcaggctgaggcaggagaatcaggcagggaggttgcagtgagtcgagatggcatcagtacagtccagcttcggctcggcatcagagggagaccgtggggagagggagagggagagggacaggaaactcattttcttagttttgctttttcctccttcccccccaaacacattaccgtggaacaatggaccttattcccaaaacacattgctctgtcatgtgtatacacgcatgtgtgcatgtgtgtgcacagagacggaataatgaagtgtcagggacattgctgctctggtgtgcctgagctcttgttctgaaacacaaagcccctgagctctagaacagaagacacagttgatacaacggtgacccagaaccccgcaagggtacgcctcaattccttactaattctgggggctcagggaagggctgatgtccactgcttgtgcatatggagctgagacacagatgaccagtgtttttcagagaatacaccaagatgttcttatgtgtgtatctctgcaaacaaaagagccctgtttattcgctgggagagcccacagtgctgtgggtttagaaaagtcacctgccaggtggttagtatgacgttctccctctgggggcctggcagttaggtggggcttaaggactgccaggttctctggcctggagtttatacagctcctgtctccacacatctgacatagaagcagcaagaaaaaccgattgagaaggagacctgtctggcctcacggtattttgttcctctccctgtcttctctaagcctaacaattacagtttaaaattagaaccaggcgtccgggcgcggtggctcacacctgtaatcccagcactttgggaggcctaggcgggtggatcacgaggtcaggagattgagaccatcctggctaacatggtgaaaccccgtctctactgaaaatacaaaaaaaatttagctgggcatggtggcaggctcctgtagtcccagctactcgggaggctgaggagggagaatggcttgaacccgggagacggagcttgtagtgagccgagattgcaccactgcactccagcctgggcgactgagcaagactccgtctcaaaataataataaataaaattagaaccaggttttcttatgttcttagaaactagcaggaatgacacagaaactttatggatctaacccagggcaaacttccgttagcaccagtaaaccaagatttatatatatgtaaatttatatatgtaaatgtactaattcattcagcaattatgtattgaaattctgttatgtgccaggcagtcttctaaggctacagccatgagctaaacatgaaagtctctgcactccatgaagtttatattgtagtcatgggagacagagcataaacaaaatagaaatgcaaattataatgtatattcagaagtgagaagtacagtgaagaaaactaaagcaggggttggggcagaagggagaaagggagtactggagtggaagttggattttaagtagggtagctggggaagaccttactgagggggtgacattgcaaagacttaaatgagcgaagctcctggaaaattgtgttgtaatattgtgaaagtcctggtgttgcctcagttctgcagctaagcgagggggacataaagcgcttgaggggtaggaatcatctcgctgagtcaaggtgaagctgggaccagaccgtggtgacgctgatacctgtcatctgcccctgcttctctgctacaaaaggcatttccttggccgggtatggtggctcacacctgtaatcccagcaggcatgagggaggccaaggtgagtggatcacctgagctccggagttagagaccagcctgtccaacatggtgaaaccccatctttactaaaaatacaaaaattagccaggtgtggtggtgggtgcctgtaatcccagctacttgggaggctgaggcaggagaatcgctcgaacctgggaggcggagattgcagtgagtggagattgcgtcattgcactccagcctgggtgacagagtgagactgcctcaaaaaagaaaaaaaaaatcattttcttgtctttggtcgttcagtatctcttctctgcttctgtatttcctaggaacatgcttttgaaagcagccagaaatataaagaaggcaaatacatcattgaactagcacacatgatcaaggacaatggctgggactgattggacagcatctacccaacccagtgtccacgtgaacgccattcaaccgaacattcttcccaagcgtgagagagtgactgacacttggttccatccatttaggggccttgccatccggggcatcctcccaccctgacgccatctttctggtgaccggcctctaaatcgctgtctctctgtctctttgctttgtatctgtttgtgagttgatcctggcttctctctctgttctagttttggctgaaaacaaaacaacaaaaggaacagatccttgaccgcatggcggcagcccaccttggtaagggccccagggcccatgcgagagctgcctgatggcctcttgtcaggagagcagtggcacgggggcgtgaggaagagggaaaggggaaactctaagggtcctggcgcggggaaggggtggaagggtggaggtaggaacaaaattgcgccgctcctggagacctgataacttaggcttgaaataattgacttgtctaaaaggacaaagaaaaaaaaaaaaaaaaaaa

SEQ ID NO: 24469 - DNA, 4815 bp, Homo Sapiens
gaggggaaggagaggatgtcttctataaaaaagacctaaaatggttgacagctccttaattcgctttatcccaagtgcaaagtgatctctcctgatgcctgccctgaaagtgtaggtcggggaggggggcgaggttaccgctctacaaagtttgacggcaaactcttcctccgcgtactttaaaaggaggagatgaccgccgggttctgctatggcacatggaacaagccatccactccagggtcaagcccatacagctgaaaggagagcaccattccaacattttttgcctggctttcaacagtgggaacactaaagtgttctctggaggcaatgatgagcaagttatcctccatgatgttgaaagcagtgagacattggacgtgtttgctcatgaagatgcagtatatggcttgtttgtgagcccagtgaatgacaacatttttgccagttcctcagatgatggccgggttctcatttgggacattcgggaatccccccatggagagcccttctgcctggcaaactatccatcagcctttcatagtgtcatgtttaaccctgtggagcccaggttgttggccacagccaattcaaaggaaggagtgggactctgggacattcgaaaacctcagagttctctcctgcgctatggtggaaacctgtccctccaaagtgccatgagtgtacgattcaacagcaacgggacccagctcctggccctgaggcgacgcctgccccctgtgctctatgacatccattcccgcctgcctgtgtttcagtttgacaatcagggttacttcaactcatgcaccatgaaaagctgctgttttgcaggagatcgtgaccagtatatcctttcgggctctgatgacttcaacctgtacatgtggagaattcctgcagatccagaagcaggtggcattggtagggtggtcaacggagccttcatggtgctgaaagggcatcgatctattgttaaccaagtccgatttaatccccacacctacatgatctgctcttctggtgtagaaaagattatcaagatctggagcccatacaagcagccaggatgtactggagacctcgacggtcggattgaggacgattcccgctgcctctatacccatgaagagtacatcagccttgtgctgaacagtgggagtggcctgtcgcatgactacgccaaccagtcggtccaggaagacccccggatgatggccttctttgactcactggtacgccgagagatcgagggctggagctctgactcagacagtgacctcagtgagagtactatcctccaactgcacgctggggtcagcgagcgctcaggctacactgactcagagtcttcggcctcattgcctcgctccccgcctcccacagtagatgagtctgccgacaacgccttccacctggggcccctgcgggtcaccaccacaaacacagtagcctcaactccaccaacacccacgtgtgaggatgcagcctctcgccagcagcgtctgtctgctctgcggcgctaccaagacaaacggcctcctggccctttccaatgagtccgattctgaggagaatgtctgtgaggtggaactagacacagatctctttccccggccacggtcacccagccccgaagatgaatccagcagttccagcagctctagcagctctgaggatgaggaggagctgaatgaacgccgagcctctacctggcagcggaatgccatgcggcgccgacagaagacaacccgagaagacaagcccagtgccccaatcaagcccaccaacacttacattggagaagacaactatgattacccccagatcaaagtggatgacctctcctcctccccaacctcgtcccctgagcggagcacttccacgctagagattcaaccaagccgggcatcaccaacttctgacatagaatcagttgagcgaaaaatttataaagcttacaagtggctccgctactcttatatctcctactcaaataacaaagatggagagacctccttggtgaccggggaggcagatgaagggagagcaggaaccagccacaaagacaacccagccccttcttccagtaaggaagcctgtctaaacatagcaatggcccagaggaaccaggacctgccacctgaaggctgcagcaaggacacttttaaagaagagactcctagaactcccagcaatggcccaggccatgagcacagcagccatgcttgggcagaggtgccagagggtacctctcaggacactggcaatagcggctctgtagagcacccttttgaaaccaagaagctcaatggaaaggccctgagcagtcgggctgaggagccgccttctcctcctgtccccaaggcatctggctccactctcaacagcgggtctggcaactgtcccaggacccagtctgatgacagtgaggagaggagcctcgaaaccatctgtgccaaccacaacaatggacgcttacaccctcgtccccctcaccctcacaataacgggcagaacttgggggagctggaggtggtggcctactcttccccaggacactcagacactgaccgtgataactcgtccctgacagggacactcctacacaaagattgttgcgggtctgaaatggcctgtgagacccccaatgctggaacaagagaggaccccactgacaccccagccacagatagtagcagggctgttcatggccacagtggcctcaaaaggcaacgaattgaattggaagatacagattcagagaattcctcctcagagaagaaattaaaaacatgataaatacaaagggaaaacaaaaagctacaaaagtagccttacaaaaaaaaaaaaattgtttagtgaatacagaggaaaggaaaaacaagtattaaaggcacatgaaaccagggcctgaaattttgtgtctgatgctgctcccttctatccaacattcaacaacgggtctgaatgtctagctggccattggcttgtgctgtgttaagaaaggggaaaaaaaaataacccaagtgactcctttctagtgagacgtgagcgtagtgtgccgcgcagggctctgtggaagtaaatctttgttgagacgttcgacttgttcttgtgtacgcacaatggcacgtgtgcgcttattgtctcataagaccttccttttagttctccatcagaaaggacctatgaatttgtactttttgccatctcaccctgtttacatgccataggtgttctggtctggatgatgggtgcctgttaaatcaggttgtgctgccagtgagttgtagatttatgctggaagaatggagaatggaaacaggccttcagcccattggctgcgctggagaggaaagcatggttcctttcttaaagaaatcttccatgttttctctaagtaacacttctttattgagcatttaatgtggacatactataaaaaagaatttttaatgctaatgagaggtttagcacttaagatcagattcaagagaatatagattcctgataaatttcactgtttgcaaattgagcagtgctgcaacatgtactgtatgaaggccataaaatagagctagtcatggataacagactttaaccagttaggtgctagatcctaagaggcactcacaaggccagcaggtgcttccttggctcccatgatcgatcgaggcatagtgaaagaagggcaaagacagctttccagagctttgtgctcaggctactaaagtagttgttataggtgtgttaacgaagaagcttagtgaggagcagaatgtggtactatattcatttaactcaacccagaaccattggtcagaattggtgggactggcatcttccctcagacttgcagttgatagaggctgtggtgttctcactagactttgcagagcagtaggcatctcaaggtaacagattcttattgagtaggtctattaggagtcagaaggtgttggggaggagtctctggcttatgactcctggttcccattagtcttaagtcttctggttcccataaaagactcagttttattgaggtagatacaggtttagaagagaaaagagcaacagattttcagcgttgcagtcactcggttatctatgaagggttgtgcaaaacaggaaggtctgggaatgaccagatatcttgttggcataaatgttatgaaaaggcagaatactggcaagaaatgaggaagagagagaaaaacaatataactttcttgagtgcaaaggtgctagacaactaggagcccagctgggattggtgtagggagggccgaacgctgactagtgtggcctcactgccccaggcttcctttcagaggaaggcctgtcctgctggaactggagccaagggaaggctgcctatgaaggcagaagatgtggatgaattcaggcactcggggtgggggggttatttataaacacaaggtggttggtttaagccaaaaggagataccatcctgataagctctgtgaaagagaagatgtgcctggtgtgtgtaatgcggctggggtatgaaaacactgagaaggagatgaaggagtgtgtgtagcatgggggtgtgtacaacttaacacctggacttttactgggggagtgggaaagtgattctgtaaccaacattagaattactttggatttgtaatcagattggttctatgatttgtctttgactattcacagataattgtaaatgctggttttataagcccaagtcattttacatttgcttttccaaaatgtattaaattggaattttttaatcctttatatacaaaaaaaaaaaaaaaaaaaaa

SEQ ID NO: 24470 - DNA, 2180 bp, Homo Sapiens
gaagctgacctcacagaggcttgggggtgaaagggtgggtggtcatttgaccccagaaggctgttgcaggtccagaggacacttgaggtggacgtcagtttctggctagacccgagctgaagggatggaggccagacccgggaggcgggggggggggggggacagtgggctcccaggggaatgcaggttgaccacatctggctcctgccaggcaacgagcagcatctggcagagtaaggggccaacgcccatgggggatggaccctctcagttcttgggaattctgccccaaaagtcctttccctggggtctcagagggcccccgtccttcccttcttggtgtcactgtggcccctcactgctcttttcctattcaaacctgagtcccaccaggcccagggcttcacctgctgagctgttgtgtccttgcctgtgacgaggcctggccaggggtgcaggagcagaaggtggggagggttatagacgctgcaaaggccaagagaacatctgagagtggcagctggtgacctggccagaggggctggtgaggggcagagaacctggctagaggctgggtccctcaggtgggaggcgagcagcaggtgtgggtgaggggaaggttctgatgacagctgcagaggcagggcccagtgctggcaggtggggggccaagaccctcccctggtgggacgttgaagccaaggatggccttggaccctgtcaggcccagcatggtcccgccacctcccccacccacaggtggtgttgggacacctgggcgagatgtgagggtgggctcacttgagccactgaaaccagccaggtcttccctcaggccggacagatggcgcctgaccaaagttcctggcacctggaaaacccacaggtcagagtaaggggagaaaggaccctgccctccctgttccacgtctgtggggggagaggacaaatgccaggcacagggtaggcggtgagaacaaggcactcaatgtgtagctggggcagagactcggcctctggggagctgagcgggttccctccacccccaaccgtggtggaaagacaagctcgctggggcggggtgggggtctggtctccacctgcccctcccactcagccactgaggacaaggtggggcccaggcttctgggagggggagctggcacaaaaggaagtcctggggttgatgtgtttgagcgttaggcgaagtggttccccccatcccccaaacggaaaaatgtcagtatttgctaagctgtagagacctgatgccgtgatgtggcctgttccgcctccacccattacacggggataacgctggggggtggcgggcccacaaaagaggtgctggaggagactctcccacccctggccgggccggggctttggggccggaaggttcacagtacgcggtttgtccgaacgtcacggcttttattgggagttgggggtttggggtgccctgtcaggtgatcagaacattaaaaatggactcaacgtaaaataatcttctggacccttctaggacgacatggccgtgaccggtagtgctagaaaccagtcttcgagcccccagtgccacaccatgtccccccacctgcatacctgtggtctccccctgccaggcaccctgtgctgggcacagggacatccctgccaggcctagagggccttgtgtttttaaggcagtcaaatcttgcagcctggttcagtgccagctccaagggctattgggtagctgcaagggtcaattatgcattcctgtgagtcaggtttttccaacccaggcccttgactctgccctgagcttgcagctggatacaaagtgcaaaaaagcttggctccttctgtattctttaaaaacaaaacaacaacaaaaaaaaaactgtaaaaacagcctccatgtccacgcccttcctggcccatcaggtcctggtggcatctcagggtcctgcccccccccacccccaccccggctcctgcaggccgaccttattgctgtgctctgggcttgggggcggctgaggtgcccctctgtcctccagcagggcacgagtgacctgagaggcccactcaggcagaagagacgcaagctgggccgtccaactggtttcaactgccagctttaccaatgcagcatttattttaaaattaaattaaattaaaaaaaaaaaaaaaaa

SEQ ID NO: 24471 - DNA, 4032 bp, Homo Sapiens
gcctccttcggttggcggcctcgggcttcgggagtcctccaagaggccaggtgaggccgtcccgtgatgccccgcgccccggccgctctggcctgcaacgtgtctctggggcggaggcagcggcagtggggttcgctgcgcgctgttgggggccacctgtcttttcgcttgtgtccctctttctagtgtcgcgctcgagtcccgacgggccgctccaagcctcgacatgtcgtacaactacgtggtaacggcccagaagcccaccgccgtgaacggctgcgtgaccggacactttacttcggccgaagacttaaacctgttgattgccaaaagcacgagattagagatctatgtggtcaccgccgaggggcttcggcccgtcaaagaggtgggcatgtatgggaagattgcggtcatggagcttttcaggcccaagggggagagcaaggacctgctgtttatcttgacagcgaagtacaatgcctgcatcctggagtataaacagagtggcgagagcattgacatcattacgcgagcccatggcaatgtccaggaccgcattggccgcccctcagagaccggcattattggcatcattgaccctgagtgccggatgattggcctgcgtctctatgatggccttttcaaggttattccactagatcgcgataataaagaactcaaggccttcaacatccgcctggaggagctgcatgtcattgatgtcaagttcctatatggctgccaagcacctactatttgctttgtctaccaggaccctcaggggcggcacgtaaaaacctatgaggtgtctctccgagaaaaggaattcaataagggcccttggaaacaggaaaatgtcgaagctgaagcttccatggtgatcgcagtcccagagccctttgggggggccatcatcattggacaggagtcaatcacctatcacaatggtgacaaatacctggctattgcccctcctatcatcaagcaaagcacgattgtgtgccacaatcgagtggaccctaatggctcaagatacctgctgggagacatggaaggccggctcttcatgctgcttttggagaaggaggaacagatggatggcaccgtcactctcaaggatctccgtgtagaactccttggagagacctctattgctgagtgcttgacataccttgataatggtgttgtgtttgtcgggtctcgcctgggtgactcccagcttgtgaagctcaacgttgacagtaatgaacaaggctcctatgtagtggccatggaaacctttaccaacttaggacccattgtcgatatgtgcgtggtggacctggagaggcaggggcaggggcagctggtcacttgctctggggctttcaaggaaggttctttgcggatcatccggaatggaattggaatccacgagcatgccagcattgacttaccaggcatcaaaggattatggccactgcggtctgaccctaatcgtgagactgatgacactttggtgctctcttttgtgggccagacaagagttctcatgttaaatggagaggaggtagaagaaaccgaactgatgggtttcgtggatgatcagcagactttcttctgtggcaacgtggctcatcagcagcttatccaggtgataactgagaaaggggcaggtgttaccatatacttgaattgacctagatgcagtacagagcaccactggattttaaaacaaccaatttttatggctccaaaaataatgtaaaaattctagggaaaaaattacagataatccactactcagaaatcacaactcttaaccttagagttgctccttttagctttatttttcttctgcaaatgtctgtgtatttatttacattttcttttatagactcgggtcattatatatataaacataaaaatatagtttcggatcctattttagcactaattatatcctccgagacactcaaattttttccctttgttaaactagtgatacatccttatttataaaattagaaaatgccaaaatgcacaaaaaaagaaaaaatcatgatgctaccatccaatatgactcttggcagccctttccacatactaattataaccgaagcttaccctattctgatccttactttcaatctatctgcaatacgggggcagatagccttctggcatattgttatccacgagagccactgtgcccggccctgattaagtatttttagagactcccaactcaaactctgactaggctccatctctgggcagttggcaaccaaatgggctgcgttggcagagaggtcggggagaatccctctagggtgacacttgttgaacaccatgctatatcttctgcagggtggggccttgctcctgaataaaggaaacacaagtcccagaactggattccgtgcaaactgctgattatgctttcttctttcaccttgtctgttttaagattgctcgagactttaatcccaactggatgagtgctgtggaaatcttggatgatgacaattttctgggggctgaaaatgcctttaacttgtttgtgtgtcaaaaggataggtgagtagtggccagctctgggagtggtgggggggctgggagttccttggtctctggtggatgcaagcattgggttctgtgtcaggttcaggtgctcctgtttacagagatagaactttcctcgtcagagaataaaaggtgacagaaatccacctctttagactggctcccctactgtggagtatgtcagctccccagggaaattgagcaccgtgaccactgcacgtggtcctgtctcagggcctgtggtggaaacaggaggttcagaaagtgactttcttaccgcctttcagcgctgccaccactgacgaggagcggcagcacctccaggaggttggtcttttccacctgggcgagtttgtcaatgtcttttgccacggctctctggtaatgcagaatctgggtgagacttccacccccacacaaggctcggtgctcttcggcacggtcaacggcatgatagggctggtgacctcactgtcagagagctggtacaacctcctgctggacatgcagaatcgactcaataaagtcatcaaaagtgtggggaagatcgagcactccttctggtgatcctttcacaccgagcggaagacagaaccagccacaggtttcatcgacggtgacttgattgagggtttcctggatattagccgccccaagatgcaggaggtggtggcaaacctacagtatgacgatggcagcggtatgaagcgagaggccactgcagacgacctcatcaaggttgtggaggagctaactcggatccattagccaagggcagggggcccctttgctgaccctccccaaaggctttgccctgctgccctccccctcctctccaccatcgtcttcttggccatgggaggcctttccctaagccagctgcccccagagccacagttcccctatgtggaagtggggcgggcttcatagagacttgggaatgagctgaaggtgaaacattttctccctggatttttaccagtctcacatgattccagccatcaccttagaccaccaagccttgattggtgttgccagttgtcctccttccggggaaggattttgcagttctttggctgaaaggaagctgtgcgtgtgtgtgtgtatgtgtgtgtgtgtatgtgtatctcacactcatgcattgtcctctttttatttagattggcagtgtagggagttgtgggtagtggggaagagggttaggagggtttcattgtctgtgaagtgagaccttccttttacttttcttctattgcctctgagagcatcaggcctagaggcctgactgccaagccatgggtagcctgggtgtaaaacctggagatggtggatgatccccacgccacagcccttttgtctctgcaaactgccttcttcggaaagaagaaggtgggaggatgtgaattgttagtttctgagttttaccaaataaagtagaatataagaagaaaaaaaaaaaaaaaa

SEQ ID NO: 24472 - DNA, 4469 bp, Homo Sapiens
cggacgcgtgggtcgcccacgcgtccgacggctgcgagaagacgacagaagaataacagcagaagatacgcagcctgtaatggactgaatatctgtgtccccctaaacccacatattgaaatccttcccccagtgtgatgctgtttggaagtggggcctttgggaggtgattgggtcataggggtgcagccctcatggatggatgaatgcccttctaagcccaggccagagggctagcttgctgtttctcctccaggtgaggatacaactagaagccagcagtctacaggctggaagaaggccctcaccagaacccaacccttggacttcagcctccagaactgtgagaaatacatacctgctgtttgtaagacaccagtctatggaattctgttacagtagcctgaactcagacatagcccttttccatttataaggtggttttaccttatattttatgtaaaaggtccattttatttatttttgaattgttgatttttttttaagagacacgtgtttactatgttacccaggctggactccaactcctggactattgatcctcctgtctccacctcccgagttgctggaactacaggctaacagctctgttttaaagatgagaaaatgggccccacgcagtggctcacacctgtaatcccagcacttagggaggctgagccaggtggagccacttgaggtcaggtgttcgagattagcctggccgacatggcaaaaccccgtctctactaaaaatacaaaaaaaattagccgggcatgatggcgcgtgcctgtaatcccagctacttgggagtctgaggcaggagaattgcttgagcccaggaggcagaggttgcagtaagccgagactatgccactgcactccagcctaggtgacaaagagagactctacctcaaaaaataaaaataattaaaaaataaagatgagaaaatggaggctgaggaggggtaaaagcgctaacttgacatggagttgaggactagcactcatgtcacctcactccaaatgccaggcttttcccactacaccagcagcagttcctcctggggaaacaggctaggttagaaagggagtgagggaagggacagggaggggaagccctctagtagggagatggaggatagggggtcatgttttgtggggagagacactgaaggggctgccacttggactgaatgacctcccacctccagcattaggactccttccaattcctagggggttcggaggcaacaatatttatttagggattgggggcgagagtgctattccaaccttctttggtatttgtaatttcttctccttattctttaataaaagtagagtccaagcaaagtccaaaccaacatataacctgtcctcctttactctagattcattcagcttttccagaccaggcatcaccgagcggagagaggggaaacaccctggcttctctttggcacatcagcccctagttcttgagagagaagggcagggtggtctactcaccatgtctgtatcctgccgttcttcatttgactcatcctggatttctaactcttcttcctcgtcctcttccataaggctgagtctgatgtaggggcaaagagactggcttttcaaactgttctttgaggacccctgagagtttctcagacacccggggtgggggaagtggggagcagtaagtacagcatagtagtttcccgattgtgctgacaggaagtgctctgtggctaaaacaagtccaaaaagcacccacagagaggcaatgggtgagacaggaatcccctcacagtgggcgacagatctgaagtgaagacaggagatgatgagaaaagctcaccgcatcagctggttgcccaggccaggacctgaagggttgtgtggagtctggaaatattgtggacccaagaaccttgacctctcggtgcctgcgacgggctgactgctgggaatgaagcaggatcaatgatgggataaaaatcaagggtaagaagaggatgtaaggcagctggtgttaatggggagaaaagctcagagagatgcattttaaagctaaacaatggagaagggtttgagaagaacccaacaatgtgggagtgctacagcagggaaccatgaaacagaaacagcaagatggaggcagccagacaccaaactgggaactcagacacccagattccctccatggcctcacccctgggcaaaatccaactctgagccatcttcttcctccatctctttcaacccccacaggggctgcctgctcttcacagctgtggaggtgagggtgggcgtgggcgggatgctgttcagctgcagactttcttcctgggacggggagacgtcctctctgttaggcttggcaggccctgccaagcagatgcatacattaaccacagcccagggcctgcgacaggtgtgctctctttccaagacctgcccaggatttagtaagggaaagtcaatcaggaagagaatggaaaacttatacagcttcattctgttgccctcaaatgggcatagccctatgtactaaatacatagccctatgtaccaaaaagtaaggcttagagaattgtagctaggccttgtccaagaagaacttgctacacagcctagaaaacaagatggaaagatatataaatatacatttcacagataaactgtaacaggtgaacaggtgaacacaaacatgagggagggttggagtctctaagattgagaggtctgagttagccaatgaagacatctgagatcctatccaagatttctgtggtcagaaaaagctgtaaatggcaatagagttttggtaccagaggctagagtggacaaatgagggccagggaggaaccggaaaatgggagacaggattttctaaaagctagaaaaaaatgaagtgattgcaatgccagtataactgatatgatatgaagggggacttatctcctgcagagattggagaaggtagaggaggagaaagaatccaaagattctcactgcctgagaaaacccaggcaatactattttaaagcatcagtcaaattgacattaacatctgttaactgtaaacagtcacactcccattaccccccttctccactaaaaacaataatcccaaagtgagcgctcagcctatgggtttaagcagagggctacagaaaacagggaagagacatacccctgggcttggattcccagagaggaaaccttggggccccagatgtgtcctcctgatctccctgagctattaatggtgtgatgcccgagggctgggcccttgagtctctcctcttctccatcttcactggcttccccagccactcacgttcatgtccttaaatatcacctatactctgccacatcccaaagggatctcaagccttcagctctcccctgaactccatcttaacagcccccatggtttgttcaacatctccacctgtaatcctgtggccaacaccaatgccccaaccttcccccacagctatcttcactctctgccttccccatctcagatactgtcaactccatccttctgtcaggccaaaatccttggagccaccctcaactgctctttttgtcttacatcccacatccagtttgtcagaaaagcctattagagataccttgaaaatgcacccagaatctggccgtttctcggcacctccaccattgcccccggcctaagaagctctcttatcttgcatcttgggctggactcctacaacagccacaacctccctgctggtctcccagcttctagccttcccccatctcctgtcgttttcgacacagcagccagaaggatcctttaaaaacagaggttgatcctgtcgttcctcaaaatcctccaatggttttcctactgcactcagagtaaaagccagtctctgccttagatgctctgggatcctgtaccctctttggtctcatgtcctacaatctgcattctggccataatggtcttctctgctgttccttgaacattccaggaacattccccccatcccctcgtggcctcaggactggctgcttcctttggtatgctattctgatacacactaagcaccctccctcacctgttataaaaaattcgctgggaggccaataggctgaaatggctcctgcactttgggttcctaagtcagcaaactgaaactcaactcagagtgaaagtgttgtgtgtaacctaggagcaggaaacttcagcttaaccagtcagaaactaccgactaacctctaacaagagatttatggtcagttaacctctaaatatgaactttccactctaaccaatcaaatagtttctttgtcttgctcccagagacaccttgtaagtgtcccctctggtttcctcggtggtggcgccctgaactgctggcggtctgccactgcctgattgataaaattgctgaatgctcaaataaacctgttaaaattgtaaaaaaaaaaaaaaaaa

SEQ ID NO: 24473 - DNA, 4882 bp, Homo Sapiens
ggccccgggggggtagggataagatggcaggttctccccttcacccagatcttgggagcgatggaacgccgctgctgctgctggtgacccgggcacgccaggtgagggttggagggggttgtgggcaggaagtcccctgcccccactacgatggtgggggctctgggcagggcagaggcccctcagtacaccatccatccactcacccccatctcaggataacggaaatgattttggcatagagaaagaggagggcttgggactgttatcagctccctactcttttagagggaactctgctcaactcttcctagactgtcttctgaatacaggtaaactgaggcagtggaagggaaaccgcactggccttggcctgtcttgggacctgaacttggcctgctgttcaccctgccacctccaaagtttgggtgaggggcaggggtctccaattcttctggaccttcttccagaatgagccccagtagatgagggagtgccggcccccacaaactctccctgtgaacaccatctgcaggatgggatgcctttgaagagtcagcacgggcagcaccagccccttccaatcagagctgggctgtatcaaaccagagcatggtggaggcaacggcgtgtgaattctgaggctagggataaaaataacacgttggcttttaccctgggcccttgaatctcttgctctggggagaagccgagcgccatattgtgaagacactcaagcagccctgtgggttggcccacctggggaaggactgaggcctcctgcctacagccaggcctcacttagaagtgcatcctccaatccttagctaagatttcagacaacagcaacctcatgagtgaccctgagccagaactgctcaaactgttcctgacacctttgcccccctccagagtagttctgacaagtggggtgaggccgtcctaccagagacgccccaccctctcccctggagccagggtctgcattcgagtcctgccctcactcacctaatcatttctgcactcaaggcctgacaacaagactgctactgagaactcaaaatactccaagagccagtcccatatctcaggtgtgggctctgcacacgtgcacgcacacactctaatgcataggaacacatccacgctcacacgtacatgcacaaacgtgtgcataaacacacctaggcctgcacccccactcctagcacacaggccaccctgcacttccaatttccatagctcctcttcccttatagtgacagccacaagctctctcggccaccaggctgtccctggatgccatggctcaggcctcaggctcctgcctctgctccaggctgctcctggctggcttccttccctggggcctctttcgttattttcttgtagaggcagggtcttgctatgttgaccaggttggtcttgctatcttggcctcaagctatcctcccaccttggtctcccaaagtgggcggatcacctgaggtcaggagttcaagaacagcctggccaacatagtgaaaccctgtctctactaaaaatacaaaaattagccgagcgtggtggtgggtgcctgtaatcccagctacttgggaggctgaggcaggagaatcacttgaacctgggaagcagaggttgcagcgaaccgagatcgcaccactgcactccagcctgtctcaaaaaaaaaaaaaaaaagatccccccattgcagggctgaggtgctcttgccctaaagccccctctcttagctggggctgggaaaagccctggttgtcaccacatccagatctctaggctcagaaaggggcccagggtggccttaggactccccagggtatccctggaaaatgtggccaggaggagggggccagtgggaggtggcctgtgttcacctttgaagatcaccaaatagtgccctgggctttaacaggggcctggcccttcctgtcttcccagtcttctctcctgacctccagggcatcctctgtcacctcagaggggcaagcccctccagaccaagcctcctcctgctgaacaaatgtcaccctggctacgctgctgcttccggaggccacactggaagcctctgatcccccagctccttcctttcccaccagcagcctggtgcctggaggtgagaggaggtgagaatgccagtggtttggagtgaggctttgggtccccgcctctgaatcttggggaggggaagctaccagggtcaggcctgcaagcctctccagctcagatgcatgcctcgggctgaggacggtggtgtgggcagtgccccttgaaggagggcggtcctggagatgcccatggaggaaggaggtgcagagtcagcaatgcccagatccttgctgggttaggacgacgggctgagggaggaaggggtgtcttgggaaccaggggagccccacgacgaggcagaacttatcagtggcagggaggggtggtcactgctctgttcctccccatccttcagctcccactggtactctgagtgcagcaaggggagagggtggggttgagactatctgagcttttcttaatggagaaccacacaggggccaagacacacactccaggagctcaagtggcagccccagggtcacctgctcacccctagaaattccatgaggccgggcacggtggctcatgcctgtaatcccagcacttcgggaggccaaggtgggtggatcacttgaggtcaggagttcaagaccagcgtggccaacatggtgaaaccccgtctctaccaaaaatacaaaaattagccgcgtgtggtggtgagtgcctgtaatctcacctacttgggaggccaatgtaggagactcgcttgaacccaggaagtggaggttgctgcagtgagctgagatcatgccacagcactccagcctgggcgacagagcaagactccgtctcaaaaaaaaaaaaaaaaaaaaattccacatcatagagagccctcttcctcccccgccaggcacctgccccatccgccagcgccaagacaacaggcccactcctctgattacctccgggggatggacggcaaacaggtaaggagttccatgcaactgcggatggagcccctctgagaaacacatgcccctccaagtggggtctggggcctggagagaccctcccacccagcagaccaggagatagctgggggacaagggcagacggcccctgcctgggaaaaaccacactcacaccccaccccgaagagctgtggagaccagaccaagactacgctacacacagaacgccgagaagataaaccaagctttacacgagcaggatggggatgggaaaactaaaggggccccctgtgaccgaggagcagggtccccagggggcagctcccacggagcgggcttgaacagggaccacccctgcagagccagacagggcggagagccataccctggccccagcgcgccccgacacacatgcttttctccatgacacgaggccagtccccaggagcagccccaggagcacaacctgagatttctaagcttgcaggttacaaaaaacaaaaaaaacagagaagctgcctgcgtaaaaagtgccacccacggaggcaggacacaggcagcgtgtggcccattcagcaggcccaggtcttcagggtgaggctgctggcgagggcaggggagagggggcattctggttaaaagcaagaaattccaaatactcctccctcgggatcaacatccccccaaataagggcgcccagggatcttgcctggggaaagtggggtgcagaaggcatgacctacgccacagcgggctctcagcacccttcccacgtcccatgtcacaggctctttgagctgctggctttgttctctcaagtcaggtctgagggaacccatcggcttctgtaataatcgtattgcctatatacttgaattaaaaatatatggtggctcaaatgtgcccgcgtgtatggcagacggtgcggggtggaggccgtcacgcccatacacgtgtgcacacacagcggggggctgtgtccacggactgcgcacacagtatatattaacatatatattgctcaagtatatatgctatttacagtatatatccctatcaacataaaacacaggtatttataggtgtgtacaatagatacgtcctaggaagtctaggggacacacgactctggggtcacggggccgacacacttgcacggcgggaaggaaaggcagagaagtgacaccgtcagggggaaatgacagaaaggaaaatcaaggccttgcaaggtcagaaaggggactcagggcttccaccacagccctgccccacttggccacctcccttttgggaccagcaatgtacgagttttgttctggagttttgtgcaaaacaaattaacttaaaaaaaaaaaagttggtttctaattaatgtggtgggccttcaacacccacaaggattttaaagaacagcttctccttctggtgggcttccagggctcagagggtcccactcagagaagcagggaacactttgtcaggactagaaaatatcccttctcctctgaccacagaaacagcacaactcggctgggtgtggtggctcacgcctgtaatcccggcattttgggaggccgaggcaggcggatcacttaactcaggagttcaagaccagcctgagcaatgttacgaaatcccgtctctattaaaaaatacaataactagccagacgtggtggtgcgtgcctgtaatcccagctacttgggaggccgaggcaggagaatcacttgaacctgggaggaggagggtgtagtgagccaagatcgtgccactgcattccagcctaggcaacagagccagactcccatctcaaaaaaaaaaaaaaaaaaaaaaaaaa

SEQ ID NO: 24474 - DNA, 4205 bp, Homo Sapiens
gggagcctagcggctctccccgcgtccaagatggcggcagaggcagctggtgggaaatacagaagcacagtcagcaaaagcaaagacccctcggggctgctcatctctgtgatcaggactctgtctactagtgacgatgtcgaagacagggaaaatgaaaagggtcgccttgaagaagcctacgagaaatgtgaccgtgacctggatgaattgattgtacagcactacacagaattgacgacagccattcgcacataccagagcatcacagagcgcatcactaactcccgaaataaaataaagcaggtaaaagagaacctgctttcatgcaagatgctgctgcactgcaaacgggatgagcttcggaaactgtggattgagggaattgagcataagcatgtcctgaacttgttggatgaaattgagaatatcaagcaagtgcctcaaaagctggaacagtgcatggccagcaagcactatctcagtgccactgacatgttggtgtcagcagttgagtctttggagggccccctgctccaggtggaaggactgagtgaccttcgactagagcttcacagcaagaagatgaaccttcacttggttctcatagatgaactacaccggcacctgtacatcaaatcgactagccgagttgtgcagcgtaacaaggaaaaagggaaaatcagctccctcgtgaaagatgcttctgttcctctgattgatgttacaaacctccctactcctcgaaaattccttgatacctctcactattctactgctggaagctcaagtgtgagggagataaatctgcaggacatcaaggaagatttagaattggatccagaggaaaacagcaccctgtttatgggtatcctcattaagggcttggcgaaactgaagaagatcccagaaacagttaaggcaatcatagagcgcttggagcaggagttgaagcaaattgtgaagaggtctacaacccaggtggcagacagtggctatcagcggggggagaacgttactgtggagaaccaaccaaggttgcttctagaactgctggagttactgtttgacaagtttaatgctgtagccgctgcacactctgtggtcctgggatacctgcaggacactgtagtgactccactgactcagcaggaagatatcaaactgtatgatatggcagatgtatgggtgaagatccaagatgttctacagatgctattaactgagtacttggatatgaaaaatactcgtacggcctctgaaccatcagctcaactaagctatgccagcactggacgagagtttgcagccttttttgccaagaagaaacctcaaaggccaaaaaattctcttttcaagttcgaatcgtcctcccatgccatcagtatgagcgcctatctgcgagaacagagaagggagctctatagtcggagtggagaactgcaagggggtcctgatgacaacttaattgaaggtggaggaacaaaatttgtctgcaaacctggagccagaaacattaccgtcatattccacccattactaagatttattcaggagattgagcatgctctgggtcttggcccagccaaacagtgtcctcttcgagagtttctcaccgtgtacatcaaaaacatctttctcaatcaagtcttggctgagatcaacaaggagattgaaggagtcactaaaacatctgaccctttgaagattctggccaacgcagacaccatgaaggtgctgggagtgcagcggcctctcctacagagcacaatcattgtggagaagacagttcaagacctcctgaacctgatgcatgacttgagtgcatattcagatcaattcctcaacatggtgtgcgtaaagctccaggagtacaaggacacctgcactgcagcttacaggggtattgtccagtcagaagaaaaacttgtcatcagtgcatcctgggcaaaagatgatgatatcagcagactcttgaaatctctaccaaactggatgaatatggctcaacccaaacagctgaggccaaaaagagaggaggaagaagatttcataagggcagcttttggcaaggagtctgaagttcttattgggaacctgggtgataaattaatccctccacaagacatccttcgtgacgtcagtgacctcaaagccttggccaacatgcatgaaagcctggaatggttggcaagtcgaacaaagtcagctttctccaatctttctacatcccagatgctttctcctgctcaagacagccacacgaacacggatctccccccagtgtcagagcagatcatgcagactctcagtgaacttgccaaatcgttccaggatatggctgaccgctgcttgcttgtcttacatctggaagtgagggttcactgtttccactatcttatccctcttgcaaaggaggggaactatgccattgtggctaatgtggaaagtatggattatgaccccctggtggtcaagctcaacaaagatatcagcgccattgaagaggccatgagcgccagccttcagcagcacaagttccagtatatcttcgaaggcctgggccacctgatctcctgcatcctcattaatggtgcccagtacttcaggcgcatcagtgagtctggcatcaagaaaatgtgtaggaacatttttgttcttcagcagaatttgaccaacatcaccatgtcgcgggaggcagacctggactttgcaaggcagtactacgagatgctttacaacacagctgacgagctcctgaacctggtggtggaccagggtgtgaagtacacggagctggagtacatccacgctctgaccctgctgcaccgcagccagactggggtgggggaactgaccacccagaacacgaggctgcagaggctcaaagagatcatctgcgagcaggctgccatcaagcaagccaccaaggacaagaagataactaccgtttagcagggcgtactgcggttggtgacgggggtcccctcagtcacactcacttttttccttggtatgttattgagtatattctgagcttagttttctctacagtgatactttagtggagaggaggtgtaaggattctttctctctggttttggcttttcatataaatgctaaaggaaggcgacagtacagagtgttttggttgaacaactactttaatgcagtcaaatctaacgggactagggtgggatagggaggaaggtggtatcaaattgttggactctgaaaaacaagtggatggattactaatatttgatttattactcaatatatatataattccagccttggaaagtaggaaagtaggctgctacctaacttttagtcccttccaaaaccatttagtagggttctattacataaacagtagggtttttcctctcctgaccttatccgtttacagttcaatgaagtaagtgtatgtgcattgctgtctgtctctattgccaaaatcaaataaatggcttctcagctgctgtttacaacaaacttccctaaccaaaacagaacctctaatttagggctaggaatagaagtcttttgatcccagtccctgggacagttttgtatgctgtatcttgtacacaggttgtaggttggtttattgccattttgttttatttctgctgtataaaaaccaagagccagacaattagacaactatggaggaatgaaaggcaattcaaacatctgcttgattcccgccccgccacccctaatttctgagagaataatggttagagaacattgcatctcacttgaaacatcctttgggggtaaatgattcttaggtgctcacttggtctgagctcagctgaatgcagggaagatgggacagagtgacatttctcctctgtgcggcctccagctgagcctgtctctgaattgttccctcccccgcaatgtgggcacttaccatgttcctgacacaccggacctcaccatgtcccccggtcaccagtcctcttgctgcccatggttcataggtcatagaaggcagcaatgcactgactgggccacatcttgaaaactcgtggaaagggaaaggggaggagatgggactttgaccacacacagtgatgcctcacaccctgaaggtgggggattttgtacctgtttgtacaactttggtcttgatgggaaaaatggagaattaaaaagtgttttgagaagcttaaaaaaaaaaaaaaaaaaaa

SEQ ID NO: 24475 - DNA, 3965 bp, Homo Sapiens
tattgaggaggcgtggagcctaccaattcccgcagagcttacctccaggcagggtgccatgaacacagcacagcaggcatgtaaacctcatcatccaaatactgaacctgtattaggcctcagtcaaacaccaatttcacagcaatccttgccactacacatgattccttctagccaagtagatgacctgtccagtcctgccaagaggaaaagaacatctagtccaacaaagaatacttctgacaattggagtggtggacatgctgtgtcgcatcctccagtacagcaacaagctcattcatggtgtttgacaccacagaaattacagcatttggaacagctccgcgcaaatagaaataatttaaatccagcacagaaactgatgctggaacagctggaaagtcagtttgtcttaatgcaacaacaccaaatgagaccaacaggagttgcacaggtacgatctactggaattcctaatgggccaacagctgactcatcactgcctacaaactcagtctctggccagcagccacagcttgctctgaccagagtgcctagcgtctctcagcctggagtccgtcctgcctgccctgggcagcctttggccaatggacccttttctgcaggccatgttccctgtagcacatcaagaacgctgggaagtacagacactattttgataggcaataatcatataacaggaagtggaagtaatggaaacgtgccttacctgcagcgaaacgcactcactctacctcataaccgcacaaacctgaccagcagcgcagaggagccgtggaaaaaccaactatctaactccactcaggggcttcacaaaggtcagagttcacattcggcaggtcctaatggtgaacgacctctctcttccactgggccttcccagcatctccaggcagctggctctggtattcagaatcagaacggacatcccaccctgcctagcaattcagtaacacagggggctgctctcaatcacctctcctctcacactgctacctcaggtggacaacaaggcattaccttaaccaaagagagcaagccttcaggaaacatattgaaggtgcctgaaacaagcaggcacactggagagacacctaacagcaccgccagtgtcgagggacttcctaatcatgtccatcagatgacggcagatgctgtttgcagtcctagccatggagattctaagtcaccaggtttactaagttcagacaatcctcagctctctgccttgttgatgggaaaagccaataacaatgtgggtactggaacctgtgacaaagtcaataacatccacccagctgttcatacaaagactgataactctgttgcctcttcaccatcttcagccatttcaacagcaacaccttctccaaaatccactgagcagacaaccacaaacagtgttaccagccttaacagccctcacagtgggctacacacaattaatggagaagggatggaagaatctcagagccccatgaaaacagatctgcttctggttaaccacaaacctagtccacagatcataccatcaatgtctgtgtccatataccccagctcagcagaagttctgaaggcatgcaggaatctaggtaaaaatggcttatctaacagtagcattttgttggataaatgtccacctccaagaccaccatcttcaccataccctcccttgccaaaggacaagttgaatccacctacacctagtatttacttggaaaataaacgtgatgctttctttcctccgttacatcaattttgtacaaatccgaacaaccctgttacagtaatacgtggccttgctggagctcttaagttagacctgggacttttctctactaaaactttggtggaagctaacaatgaacatatggtagaagtgaggacacagttgttgcagccagcagatgaaaactgggatcccactggaacaaagaaaatctggcattgtgaaagtaatagatctcatactacaattgctaaatatgcacagtaccaggcctcctcattccaggaatcattgagagaagaaaatgaaaaaagaagtcatcataaagaccactcagatagtgaatctacatcgtcagataattctgggaggaggaggaaaggaccctttaaaaccataaagtttgggaccaatattgacctatctgatgacaaaaagtggaagttgcagctacatgagctgactaaacttcctgcttttgtgcgtgtcgtatcagcaggaaatcttctaagccatgttggtcataccatattgggcatgaacacagttcaactatacatgaaagttccagggagcagaacaccaggtcatcaggaaaataacaacttctgttcagttaacataaatattggcccaggtgactgtgaatggtttgttgttcctgaaggttactggggtgttctgaatgacttctgtgaaaaaaataatttgaatttcctaatgggttcttggtggcccaatcttgaagatctttatgaagcaaatgttccagtgtataggtttattcagcgacctggagatttggtctggataaatgcaggcactgttcattgggttcaggctattggctggtgcaacaacattgcttggaatgttggtccacttacagcctgccagtataaattggcagtggaacggtacgaatggaacaaattgcaaagtgtgaagtcaatagtacccatggttcatctttcctggaatatggcacgaaatatcaaggtctcagatccaaagctttttgaaatgattaagtattgtcttctaagaactctgaagcaatgtcagacattgagggaagctctcattgctgcaggaaaagagattatatggcatgggcggacaaaagaagaaccagctcattactgtagcatttgtgaagtggaggtttttgatctgctttttgtcactaatgagagtaattcacgaaagacctacatagtacattgccaagattgtgcacgaaaaacaagcggaaacttggaaaactttgtggtgctagaacagtacaaaatggaggacctgatgcaagtctgtgaccaatttacattagctcctccattaccatccgcctcatcttgatattgttccatggacattaaatgagaccttttctgctattcaggaaataacccagttctgcaccactggtttttgtggctatctcgtaaggctgctggctgaaaactgtgtctatgcaaccttccaagtgcggagtgtcaaccaactggacgggagagagtactgctcctactccaggactctcacaaagctgatgagctgtacttcagaaaaaaataataatttccatgttttgtatatatctgacaaaactggcaacatcttacagactactgacttgaagacaacctcttttatatttctctatttctgggctgatgaatttgttttcatctgtcttttcccccttcagaattttccttggaaaaaaaatactagcctagctggtcatttctttgtaaggtagttagcaattttaagtctttctttggtcaacttttttttaatgtgaaaagttaggtaagacacttttttactgcttttatgtttttctgtcttgttttgagaccatgatggttacacttttggttcctaaataaaatttaaaaaattaacagccaagtcacaaaggtaatggattgcacatagactaaggaataaacttcagatttgtgatttttgtttctaatcttgatgtaaatttacactatttataaatacatatttattgcttgaaaatatttgtgaatggaatgctgttattttttccagatttacctgccattgaaattttaaggagttctgtaatttcaaacactactcctattacattttctatgtgtaaataaaactgcttagcattgtacagaaacttttattaaaattgtttaatgtttaaaaaaaaaaaaaaaaaaaa

SEQ ID NO: 24476 - DNA, 4639 bp, Homo Sapiens
ctctgttttcatttcagtcttaatgaaaactttctaacttatatctcaagtttcttttcaaagcagtgtaagtagtatttaaaatgttatacttcaagaaagaaagactttaacgatattcagcgttggtcttgtaacgctgaaggtaattcattttttaatcggtctgcacagcaagaactgaaacgaatggggattgaactgctttgcctgttctttctatttctaggaaggaatgatcacgtacaaggtggctgtgccctgggaggtgcagaaacctgtgaagactgcctgcttattggacctcagtgtgcctggtgtgctcaggagaattttactcatccatctggagttggcgaaaggtgtgataccccagcaaaccttttagctaaaggatgtcaattaaacttcatcgaaaaccctgtctcccaagtagaaatacttaaaaataagcctctcagtgtaggcagacagaaaaatagttctgacattgttcagattgcgcctcaaagcttgatccttaagttgagaccaggtggtgcgcagactctgcaggtgcatgtccgccagactgaggactacccggtggatttgtattacctcatggacctctccgcctccatggatgacgacctcaacacaataaaggagctgggctcccggctttccaaagagatgtctaaattaaccagcaactttagactgggcttcggatcttttgtggaaaaacctgtatccccttttgtgaaaacaacaccagaagaaattgccaacccttgcagtagtattccatacttctgtttacctacatttggattcaagcacattttgccattgacaaatgatgctgaaagattcaatgaaattgtgaagaatcagaaaatttctgctaatattgacacacccgaaggtggatttgatgcaattatgcaagctgctgtgtgtaaggaaaaaattggctggcggaatgactccctccacctcctggtctttgtgagtgatgctgattctcattttggaatggacagcaaactagcaggcatcgtcattcctaatgacgggctctgtcacttggacagcaagaatgaatactccatgtcaactgtcttggaatatccaacaattggacaactcattgataaactggtacaaaacaacgtgttattgatcttcgctgtaacccaagaacaagttcatttatatgagaattacgcaaaacttattcctggagctacagtaggtctacttcagaaggactccggaaacattctccagctgatcatctcagcttatgaagaactgcggtctgaggtggaactggaagtattaggagacaccgaaggactcaacttgtcatttacagccatctgtaacaacggtaccctcttccaacaccaaaagaaatgctctcacatgaaagtgggagacacagcttccttcagcgtgactgtgaatatcccacactgcgagagaagaagcaggcacattatcataaagcctgtggggctgggggatgccctggaattacttgtcagcccagaatgcaactgcgactgtcagaaagaagtggaagtgaacagccccaaatgtcaccacgggaacggctctttccagtgtggggcgtgtgcctgccaccctggccacatggggcctcgctgtgagtgtggcgaggacatgctgagcacagattcctgcaaggaggccccagatcatccctcctgcagcggaaggggtgactgctactgtgggcagtgtatctgccacttgtctccctatggaaacatttatgggccttattgccagtgtgacaatttctcctgcgtgagacacaaagggctgctctgcggaggtaacggcgactgtgactgtggtgaatgtgtgtgcaggagcggctggactggcgagtactgcaactgcaccaccagcacggactcctgcgtctctgaagatggagtgctctgcagcgggcgcggggactgtgtttgtggcaagtgtgtttgcacaaaccctggggcctcaggaccaacctgtgaacgatgtcctacctgtggtgacccctgtaactctaaacggagctgcattgagtgccacctgtcagcagctggccaagcccgagaagaatgtgtggacaagtgcaaactagctggtgcgaccatcagtgaagaagaagatttctcaaaggatggttctgtttcctgctctctgcaaggagaaaatgaatgtcttattacattcctaataactacagataatgaggggaaaaccatcattcacagcatcaatgaaaaagattgtccgaagcctccaaacattcccatgatcatgttaggggtttccctggctattcttctcatcggggttgtcctactgtgcatctggaagctactggtgtcatttcatgatcgtaaagaagttgccaaatttgaagcagaacgatcaaaagccaagtggcaaacgggaaccaatccactctacagaggatccacaagtacttttaaaaatgtaacttataaacacagggaaaaacaaaaggtagacctttccacagattgctagaactactttatgcatgaaaaaagtctgtttcactgatatgaaatgttaatgcactatttaatttttttctctttgttgcttcaaaatgaggttggtttaagataataataggacatctgcagataagtcatcctctacatgaaggtgacagactgttggcagtttcaaaataatcaagaagagaaatatccttagcaaagagatgactttggggatcatttgaggaatactaactctgttgcattaatgcttcaaaaaatcatcaaatgattcatgggggcctgatttgcatttgaaaaatgtttgaaactagagtctcatttgtttcaggaatgcagctacctgagttttttgtctcggcaaagtcacaaagcccatatactcacattgtgtgtctatacttgccaattaattctaaacttgtaggaaatatgccctctcttaaaggagaattttttttaaatctctgagaaatgagattctgagtttatttcagctaaaaggttgcaattcttctgaagatatctcaaatataaggttgaaagttaagtgttaataatttttgtgaatttatacacacctaaacgttaagtacacaaatattttatttgttttacaaataaggaataagtaatttataaattaagaagttacctataaaaataaaaagataacaaccctatcatatagcttatttttaaattacctgaaaaacgatattctacactgtttcctttttgactctgagttttcaaactgttacttctcccatatttctcaatccatttcactcagttgcacagtcttttaaaccctgtaattgtcataccaaagtttctttttaaaaaaaaattactttaaatgcttagtttattcaaagagcgatccaataatataaaaggaacatgtgttaaacacaataaaattttaaatggctctaaatcaagcacatcaagagtatacaagtcttaaaggctttttaatacatactcttttcccatctatgtaacccaacttgcacatttcagctgcatgtggtgaatatgcatcatatatttactttaagaggtaagattttacttgcaaaatacatgtgcaaattagggatccatcagttgatggaagagatggactctagaatattatttcttgtggttattactcctttacaaagcactttcgtctcacttgatcctcataaggaaactaaggctcagaatgagtagagctgggttcagaatctagctcttctaactccaagccatctcctctttccactgcaggaaactgcctcttttgtcagtgaaataatagaaagattgtgttagttaagtgataactgtcatttgtttgaaaatgttcgagactgaacaaatagcatttaaactgctggcatatagatgagatattgtacttttgtgcaatgtttattacctttgattaaattgtaatgtgaagcttttactaggtgaatagttcattatgtagtggaggcttcgtggttgtccattgaattgtcacagcaaaatctataagtttcttcaattctacaagatagatccatatacctttgatcacttggagactctttttttgctggtttctagataactcaggtaaatcagacctttacagagtacagggctaggtgaaagaattactgaaaaatcaccttgaaaatccgaagggctgatataccctttatgttcctgactgatgcgcagaacctgggggaaatctacagcaatatacaggttgcaatgctgataacacaacagcaatcctctcctctacgtggacttactgttgtttttttaattattattggaatgggattttagaaaatagaagttacctttgtgtgtgttttagggaaggtagagaagaatctgctctttctctgaatactgttttgaccccaggcaggaccttggaaaggccaaaacattaacagtagtacttctgttcactgaagagttatgttacatgaggataaaatggttttgtcgtgtttattattgtattttgtgttgatataaataaacatggtaatttaaacaataagaaaaaaaaaaaaaaaaaa

SEQ ID NO: 24477 - DNA, 4653 bp, Homo Sapiens
agatagcaatgattgcccaaggtgtggcaaccaagttcatgagacaaatccattagaaatgttgaggttggacaatacattagaggaaattatatttaagctggtccctggactacgagaacaagaacttgagcgtgaatctgaattttggaagaaaaataagcctcaagaaaatggacaagatgatacttcaaaagctgacaaaccgaaagtagatgaagaaggtgatgaaaatgaagatgataaagattatcacagaagtgacccacaaattgctatctgtctagattgtttacgaaataatgggcaatcaggggacaatgtagtaaagggtttaatgaagaaattcattcgatgttctacacgtgtaactgtgggaactattaaaaaatttctaagtttaaaactaaaacttccaagttcttatgagttggatgtgctgtgcaatggtgaaattatggggaaggatcatactatggaattcatctacatgacaagatggcgactaagaggcgaaaactttcggtgtctgaactgctcagcttcgcaagtctgctctcaggatggccctttgtatcagtcataccctatggtactgcagtatcgaccaagaattgatttcggttagaccaaggggcccagacctcactgagatgaatcctgcactatttgtttactcgtcaacagattgcacagttaacggtgtgtggactagaggaacacaaccagattttcagcatgcaaataaggccattgtctatctctaaattgtcagttgcattcatgttgtttctattaggagcaaaccaagtgccattctgctactgaaccatctgcataaggtatttgtgttgtctcaaagtgtgcaagtcatggtaaaaatcagttagctgtgccgccatgattcacccttctgaatattttgcttgcctgttccaagattgttctaatgtttaattacactagtaaaatggctcaatttttgtggtgttgcagttttcacatacttactcttttattcttgtttaaatagcgtactctacaagaaactaataattatatcttgaaattattttgtatggaaatatatttagaaaagtggtttttgagccactgtcttgttcttgataagctttttgtgtgaaaaaaagttcgttcttgagtgtgcaagtccttttgccaagaattccaattattctgtaacattagagcacaatataattgtagacattctaagcatctgtccgtgtagtctaccaattgcacaaggaaggcatgttagccctccagattgaaaatgtatgtgacctcttgaactgaagttagattcccaaccattcaaaatgttggcagctgatcacatttacttctgataaaagtaatgtgtaagtaaggttaatcttctttcataatgccttatgacaagcaggtgctgcttcatgaaacgtcattgtatagcccatttcatgtatcattacattgttgctgttatttaatgagtgcattatttctctttttaagttggccttaggtatatgtcattgtggcatgcagagggttatgacgattttaaatattaggatttttagagcacataacattagctattttatggatttcaaaagtctcaaaacagttgtagattaaaactgttagttacctttcacatttccaaactatgtgcataaaatagaataaatgcagtatagaactatgctaaccaaaattaataggttaagggtattttattttaaatcctgtagtaattggggaaatgagaagattattattttatacatgagttcattaagatcagaaatacaaaatgtcctgtattttgcagttttgttaagtcttccattcgttttaggattagtctgcaagtcaaagaaagtcttgttaccttaaattatatgaaaactgtcattttaaatcttttaatatttacagttttcaaaaaccttacttggaaattgctttgaaacaaacaagctaacctttgaaacttaggaaaaaatcttgaaagttaggaaaaatatttgagaaatatgacgagcacaatctgtgtgttacacacatttagtttttatactgcatatgtggtaaatgtgtcacattttccagtaaaatgtatcagaaatcaatgccttctgaatttcaaaatgattcttagaaataagatattgtacaactctagcaaacatacaaagtacagctaaatcttaatatatttcactatgtaaaaggctgaaacttcataattatctgttccttctatctttttttgagtcaaaaagtctattaaatttttctgttgttgttccaactttggtgaaaaaggttatggcaatactttaactttgttttgttacattgtttttgttcttggaatggctcacaagcagaatttaaaaggcagattttcattaactataaatggctgaaaaaactgaatttactatctagctacagaaattatttttctatggtgtgaaactgttcccagacatccctaagaacttttacaaattattataaatttgtcacacctaggtcagcgattaaaatagtgttttgcaaatggaattttaattaactcaaaatgaattaagagtgcattttaaaaatcacaagtgagactttgatgttttggccccccagccaaaacttaatggtcataaatgaattttatctacaaaatctctttaaatttggctggttgccttgtcatatgtaatttcactattttccaaggaaatatataggaagcaattatgaaactgagaatagttttatatagaattcttttatttactgataatgcattaacatttttattgaaatgcaatggaatatgtgccaaaacacgtgaaaagcttacataaagaaaggcatcagttgtcgtttggagaaaggtacacatttttttgatggtcctaagtgatatggtattactactagaatcacagatttcttcaactgacttattttggtatattcaactacagctttctaaggataggactactttcatgtctagtaatacactgtattccccgttaattatcccttaagtcagattgtagaatttgcaagaaactaggtatagaaaaaatgtacaggcaacttttgtggttagctttataaatttagggtgcttataaaatgataaaatgaattctttaaataacctataggaatcatctgaatctgtaacatcagagactaaaactaaaagttttctttaatctgttgtttcttaagcaataaactgaaagacctttacttccataaaagattttgttatctcttttatctgccttagaaattataagtataaaagggtcaagggaacttagatataaagaatgactgtggtttataaacattactttaattgaagtaatcacatcagttaatagagaaatcaaaatatgtatggccttttctctagattagcaaaacagctttacaaagtatgaaaaaataaactaaaatgctcattgatgaggtaatactcagtctggagtacaggtaacttgggtaatgccttttaactactcttagaggagtatattatttctttatacattaaacatctatcccatagtaatgtgccacattttataaacgtaatgactttgctcaactacattacacactcaaatgtaatctaaatttaaactgattatttaaggaaaaaaagtgtgttatataatattgtgaactgtttagctttactgaaatatttaagagaaagtgcctcattactaaagtgcatttctgttttaaatttactgcataaagtttgagttatctgtacctgtctcttatgaatggtttcatatctaaataggctcttgtaagttaatttttttggaagattttcataagaatatagatatcaccaaagacattttacagtaaattaataaccatgttggagagacggttttaacagtttggaggttggaaatttttagattgcaatttaattttatatagttaggcaataaccttgattaattgctaaaatatcaccaaagaaaggctttaaactgaattttcttggtgagatcagtcaaatgcaggcttttcttgcaataatcagaacacacttcctttcaaatatgttcattgtttttcagcatcatctaacagatcttagtaaatctaaatcctcaaagatgagaaagaggtaaacacaacaaatagccttcctctgcatgaaaagtgggagaaatacatactttgaaaagaaagttcagatttttaatttgagagggtttttatttcatggaggcagtgttaactaaaattaagcttagatttagctcctgtattattcataatatgagaaattttattaaaggcagactttggtaaaagtgccaacacacttacttgtatagaaaagacttcactctatgggattcatataagtaagtgctttctctatattcaaaatatttcataaggacctgtggtttttttccccttaaaaagcaactctaggccgggcacagtggctcatgcctgtaatcccagcactttgggaggccaaggcaggtggatcacttgaggtcaggagttcgagaccagctggttaacatggtgaaaccccatctctactaaaaaaaaaaaaaaaaaaaa

SEQ ID NO: 24478 - DNA, 4862 bp, Homo Sapiens
gacctccgagaaatgaccccgtcctgcccctgactctggccatcagaagaggcctctccattaagagccgcttctcccgccggctttcatactctccttcctctgcaaacctggattaactctccctgatgtgtgctgggttgagaggtcagggcactttcaatccctcacctagtcctgctgcacagggcaggaggcctcacagaagagatacttgcagttccaggcctggccaccaggtgacgccttccttctctcctgggctctcctgtccctccggcctctgctctccccacgttcacccaccctcctcccaactgtttccccttcacactcctgcactggtcctatcccccaggactgattctttcccggagatggggtggccacttatctgtcctctggatcaggtcctttctccatcccactacctcctgggtccaaagcctggtgagagcatagggccttctggggtggaaggggggtctggggcagcctctcttcccccaacatactcactagagtggctcctgtgaggcagagaccaaagttctgacttttctttttcctttttttttttttttgagatggagtctcgctgtgtcacccaggctggagtgcagtgacgcgatctcgactcactgcaacctccgcctcccaggttcaagcgattctcctgcttcaacctcctgagtagctgggattacaggtgcgtgccaccacaccccgctaatttttgtatttttagtagagacagggtttcaccatgttggtcaggctggtctcgaactcctgacctcgtaatctgcccacctcggcctcccaaagttctgggattacaggtgtgagcgaccacatccggtcaagttctgacttttcagggcagtgggatggtgacttctgagctaagcctgcaagggaagtggctgttcccagacctggggtcccttggcttttcgaccaccctagcactggccctaggaggggctgagttatcagagcagcaacccttctacccaccctactgagtccccattctaccgtcgaatcccatgtattatcttccataagtgccagaaattggtacaaagtgcagtgccagctgctccccagggcatggtccggctctctgggctgctgggctgccagcccctttcagaaagcatggcagtgggaaccagcaacttgggctaccttaggggaagcagcactctgcccagggttcttgctataaataggtcagtgggcagagaggcagatgtgtgcaaaaagcacaaccccaatcacacacagaaacccgtaggcacggacacacccagtctcaatgcacgaagttggagaacctgacagggctggtccaggccacagaggatggggttaggcttcatgccttcatgcccaggcagccacagaaacccactcttccccgcctcacagggctcctccggttggcctggatccaaagcgatctccttgtttcacctctttccagcccttccctagagcctggccccaagttccagagtcaaatcccagttttgcagtcaactattaacctggggccctggcagattggggtatccacccagtcatgtaaaggcaggagacctgctctgggcctgactcaaagcaaacacgtgggtgcagaagacccatgggaggaggaggtggggcccactcaacacacctaagccagtggccctctaggaggggcagaagagccaaccagagggttcctggaggtcatcgggttcctccttctgcttccaggcagcaacagacctaattcatctcctgtgaggatggagcaagggcgaatataggcatagacatatctggagcgcaaggattgagaggccctgtggacaaggggaaggagagcttgggggtgggagagggatctatggaaggggctgttgtagccaagaatggggcctgggccgggggcctggcctctggagagccctgattctactccagtcttctctcaccatggagacaacgccagtagagctgggagctggggcctgccactgagtaacagctcacacatgtagcacacttatgcgtcaggcaccagcatgtacaccttaattcatttaactttcacaacaaccctaggagaaaggtacagctactattctcatggtacagtggggaaaactgaggcacagagaggttagggacttttcatgatcacacagctaataagtggtggtcccaggattcaacccaagaagtctgttagaatccatactcttatcgactattttaataacagcatttcaataatagtaatatgtgatgttaaatgctttatctgagttatatcattgcattctcacaaaaatggtacatttgttagctaaatggaggcctggagagttcaagtagctcactctaagttacagggtttgctagctgcagactggagactagatctcaggtcactctgccttggggttgcccttttctgagatcagactggccttaacagagcccaactttcttggaaggacacagctgggggtcgagggtcctgcatatgcacctggggagtccccacacacccgcaccaaaggggaaacattcaaaggagatgcaggtgacatacagatgggctaaggtgaggccttcctccaacatggggccctggctgagagtggagggatagggtgctacttgggggatatctattactaatcagcacacaatagctgggtgggcaccccctctctctgcagctggtggagatgggcctggtgctcctctctgcttggtaggaatgaccagggcaggatgccacctgctacactcttgcctgtcccagagcccttgggagaccagctgttgctcccacctttccccacagggtgcccggtccccacggcgcaaggaggccaagctcagctgtgtgtctgagcccactcagcagcaggcatgatcagggcagggcccagcgctaagggctgctggggctaaagtgccttgctgaaggaggggcagagttaaacattagccacaatggccccccgcgaagtgagtcatactccccacaaggctctgggctgggcagccgggggcaggggggttagcttcgttccaggtgggtgaccaagctgcggaagcccaggacagttcgctgggaccagtgctaatggcagcttctgctcctgacccccatcaggtctctttcctcagacatccccaaagcttgtctgcctgtgggtctttcattaaaggtgacgggcaagggttttctcttccttccaagacacacttctaggctggcttgtgggtcccctgagacgaaggctgagcagggtgggcctcgaaaaccccatagcactggcccagagcactgcggtcaatgtccgaaggaccagagagggagggtgacttgctcaaggtcacaaacctaactggagctaggaagtaggtccccagactcccagtctgaggaaattggatgtggacagggctttggtctcctggccagaggcaaacgcccagggatctgaacaggctgcccatctctggcctcaactcagcaccccaactggctccagtgccaaccattggcctctctcactggttggcacaggctgggtgagcctggccctttgccctgggttcaggagagaggtatggctttgcctggcagtcaagggaggtgttccaacctgggagcccctgggggaggagcgtgtgtgtgaacgcttgtgcctgttcatcagaaggggtgagcatggtgtgtatgcgtgggcatgcagaatgcagggtgatgacctgtctgcccgccctgagtgtcacagacacctgtgtgtcccctgtactagtgcctcccagatgctcttctcctgactggctctttgtgacctaaatttcaactgttccaccccacaaggaggaaaccagggccacaaatgtagtgagattttcataaagctaaatgtattcagtggaaacgaccttcctctgatctaaaagcatgcatgcctttgttttattactggagtattaaattagcccttacttatggaataggaggacagtaggtggcaactgttttctaatgctcttacttcacaaaataaaatggtggcagcacaatgtcagtatttatattacacaatattattagtttgtaaaaaccgaaagccagggagcttactgccctggattctttagggcgtgggtcttatcacctcattcatttcttcccttcccctaagagcgccacaagcatggcagttgctcagctgagacacatgaatgggaacagaactgaaatatcaggatgtgacctcgagccagctggttggggctggggatccccctggatctccactctgtcctgtccgagaaaggggaagctgccctatgagtcttttttctgggggattccagaggttgaacgtctgttctgaggctcctcagaacctcgagggaggggacgagagagatgaccccttgcccaaccactggctgaaaaatcttgaaattccctgactttgaccagggaattcccagttgtgctaagccctgcctggtggaatgtccctggaggaagtaaccaggacacgcatacgtttttaatgtacgtataaagaatcgtaaagtgaacacccatctgccaaccactcattttaagaactaggatatggcacatacttttgaagcccttatgcgtccctccccaatcacaaccccttcctctccacaaaggtaaatacaatcctcaattttgtgtttgttattctcttggttctcttcataatgttactacgtatttatgaattcctaatacatcattcagttttggatctttttgtaaaccttaaaaaaaaaaaaaaaaaaaa

SEQ ID NO: 24479 - DNA, 5342 bp, Homo Sapiens
aatgagacctgtgtgccaaccctggcctagtcctcatgcccccacaactgtgaagcgagagggctcaacagtttcgaattcaattcaaccaccacctcctgaataccaactaggttccaggatctggctagaagcagagacaccaggacagaaaagacagtgttctgctttcatggagttcacagaagagtcgaggagacacagctggatcctccctgtttaccccagtggatgctaaatgctttggtgaagaggagacatccctgcacaaagcagagctgtggattctctgacctccttgaagactctcttctgagctgcagtggacatttgccatatttttattaatgggtgtctgtcatcaaatctccctctgtaagggttggtcactgttgtggcttctctcgatgtgaggtcggactcaccttccatatcaaaagtggacaaaatcacactcacactctcttgttcacacataaacacacaaccctggcacaatctgagggtcagtaactgactttggctcagcccaccaagtggtctttccctgaagtgtgaatctcagggaagcaatacaagaacaggcagggggtgggtggctacctctggagacagctggaggtcgtcctttcaaaagcaggctggcgggcacgctgaccaaactactcctgccaaggagccattgctgtggttcctttggactggacttctgactctcccctaatttctactcatttctaaggttaattctctttactctccaaccactccaatacatttccttccatttatgttctctagagtctgttttcattgctgacacctaagatggtgcataattataagccagtgtgatttcatttcctatctgaagccttcgaaaaaaatggctctcaagcagtatctcagacacccaaatccaaggctttactttggtggccatggaaagacacctgaatgggtgggcgtgggaatagggtaagagaagtagaaaagaggaagggaaaagagaaagtactgcatatttcatacctactatagtctaggactgaggatacagcaatgatcaacataggcagaggctctaacagatgccaggagccagctaggcatttgtccggctatcttatgataatattatagggagggaggtgctcccataccccaagtgggaagagtgcggctcagtgaggctgagaaacttgccctgggtcacacagcagatgactattggagctggaatctgaaccagatctcattcctaccatatctgctctttccactacataaatttgttaaacaatggtgggtaaaccatgcacctttttttcttttcgtattttgatttcagtgttgtatccatgatttggaacgagcccacctgagcctaatgatgcgacgagatcattggattatatatgtatttactttaaaaacacaaggtagaaaactttactgagtccatgaaaagaaaagctggagacacgtcaaagcctgttttgatttaagtggaatagatccagcttgagtgtaaattcgagactgtgtttgcttgtgtcacactctatttttcaaattactttcatatgtcctgtttcatttatttcccccagttcggaatgggaaaactgaggcctgggacttgaaataacagatgtatgtttgtacagcaaatcatcatgagagccaaaactcaaacccatactctctcaccgaaccccactgcttctttcagcacacaataattattattatgccaagtaagtttaacaaggtgacttggatcgattcattctgatgatttgagttggctcctgggatcatctgggtaaatattaggcccacatctctttccaaacatattccatctctctctctctctttggttttttcttttttctacattttcacctctgctccctcatcatacctccctccctttctctgttgaactcctccccttctcttctttcctcccttcctctcatcctctcacccacaaaaacatttgtttgtcttacatagggatagtgtcatgtgactgggtggctgaaaggagaagtatcttttaagctcctggaagcagaatattttcttatggattttttattgtttggattgttttgccaggctaatgaaagaagactctgaggtccccttatctcaggccaactagaggatgccttcaagtttttgtttttcttcccaagctggttccttacaaatgcatccagaaggtcattcccaggtccccaagatagtggtgggtaatcaatcacatccaggacatcagcatcacagcagataagctcatgcatgggaggatttgggaaaggagagaggggatcctaaactatccctgaaccatgtgctccagcaagggcaagtggagggattactttttctaggagttcactgggacagccacaagtatattctagctccaatgaccattcttcccttttgatttttgactcaaaacaaataaaaatacacatacataaaatccttaaacatttcctatataatctgataattgcaattcagcaagcaataaagattgtgtgattgtgtttaacagctccaagggatgggtccacacagggcccccaggcaataactaatccctctgaaacaaacagagaggactccagacctggctttgccaaggacaagttttgtaagcttatttaagtcacctgacttctctaggcctcagattcctcagctataaaataatgggctagtttattatttcaaccaatgcttattaaacatccactttgtgtcaggctttgtgcaagaagctggaaatatttttaaagtatagacacagtatctgttctcagggtctcagtgtttaatgcgggaaaagatgcatcataagagaaaagtgctgtggacggcaaaggcaaaaacaactcagcccaggagcttatctttaggattcttcccaaccccaaaagtctacgtgtatggcatttttttgtctgttcattttgttttggttgtcttttcacatgaatgttatttcattctttcttgactagttgttttcaaatcattgttgcattgttgtcattatcatccattaccaattactaaacacatactgttaccccaaatgttgtaattaccccaactgttggtaattaccccaatgactctaaaagttagacattataatcactattttttatataataacactgaagcccagagaggttaagtaacttacccaagctcacatcgctagaaagttacggaactgggattggagttgacccctgccaactccaaagtacatgctctttctactacttggtgctgccttaggtatatgtagccacttaggacaaacatcatttacaggagcaggtgtgatataaaaatatgaggccctttgttcaaatattattgaaaatttcaagatagcaacagcaaagcattaaacaaagcacaaggcctgtctaagcacagggctctgaatgactgcccatgttgcaaacccaggaatccagccctgccagccacaattcagtttgcaatggcatctcccactgaagcagaaaagcttcatagcaatttgcaggcccagatcacactcgcagaatgtttcagtgatcatgcttcacatgtaggatttctggcactacccagagggttcattgtgaaccacctggcaggacttgggggctctgtgtggtggctttttcagagtagccctggcacctaacctaaagaatattaatatcatttctggtaatgccaattactttatttttttttgagatggagttttgctcttgttgccaggctagagtgcaatggcacaatctcagctcaccacaacctctgcctcccaggttcaagtgattctcctgcctcagcctcccgagtagctgggattacaggcatgtgacaccacacctggctaattttgtatttttggtagagacaaggtttctccatgttggtcaggctggtctcgaactcccgacctcaggtgatccgaccacctcgacctcccaaagtgctgggattacaggcgtgaaccacagcgcccggccagccaattactttttttaatgtggggaaaggtatataatcttgctgaaagagttttgctccgtgtgatggttcatacctgtaatcccagtattttgggaggctgaggcaggaggatggcttgagcccaagagtttgagaccagcctgggaaacagagacccctgtctctacaaaaaatacaaaaaattagccaggcatggtggtatgtacctgtagtaggaggctgagctgggaggatcacttgagcctgggaggttgaggccacagtaagccatgatcatgccactgcactccagcctgggtgacagagtaaagaaaaaaaaaaaaaagagttctggtcatacccttacacccttactcttacatttagaacatttagaacattaatgctgcataaatggaacatgtccaaaagcctcttaggatgcaagcctcttttgaaattgcaaactgggaccagtacatgtgccctaatagagggcagtaggaaaaaaagcaagagctttgcagctgctggattacgaacctctctactgaggcactaactcctattaaggtgttagctcctactgacccagcagaggctgagtaaagattgtcattttggtcaatgattcttaatcagtggtatttaatcttttgagatcacagaccccttctttgaaaagtatgaaccatctcccagaaaaaagacaggtgtatgtaaaatattcttgcattcaattgtagactctctgccttagccctagattttttaaaaccatattttaaagcatggctcccctaattatagaattgtcagaggcgtctgaaccagagcaactccatcttgagtaggggctgggtaaaataaggctgagacctactgggctgcattcccagacggttaggcattctaagtcacaggatgagataggaggtcagccaagatacaggtcatcaagaccttgctgataaaataggttgcagtaaagaagccagctgaagcccaccaaaaccaagatggccatgagagtgacctctggttgtcctcactgctacactcccaccagcaccatgacagtttacagatgccatggcaatgtcaggaagttaccctatatggtctaaaaggggaggcatgaataatccaccccttgtttagcatataatcaagaaataaccataaaaataggcaaccagaagccttctgtcagtggagtagccattcttttattcctttactttcttaataaacttgctttcactttaaaaaaaaaaaaaaaaaaaaaa

SEQ ID NO: 24480 - DNA, 4708 bp, Homo Sapiens
cactccttgggcaaaatgtagagaacatttcacaacaagagagagaagatattcaaaacagctctaaggagctgctaggaatttcagatgagtgccggatgatttctccttctgactgccaagaagaaaatgctgttgatgttaaacagtacagagataaattaagaacttgctttgacgccaagttagagacagttgtttgcacaggatctgttccagtagacaaatgtgcattgtcagagtcaggcttagagtcaacagaggaaacatggcagagtgagaagttgctggattcagacagtcacacaggcaaagcaatgagatccacaggaatggttgtggaaaaaaaacctccagataagattgtgcctgcttcattttcttgtgaggctgcccagacaaaggttactttcctgattggggattctatgtcacctgattcagatactgagcttcgaagtcaggcagtggtggatcagattaccagacatcacaccaaaccattgaaggaagaaagaggggctattgatcagcatcaagaaactaaacaaacaaccaaggaccaatctggagagtctgatacacagaacatggtttctgaagagccctgtgaacttccctgttggaatcattcagacccagaaagcatgagcttattcgacgaatattttaatgatgattcaatcgaaaccaggactattgatgatgttccatttaaaacaagtacagatagtaaagaccattgctgtatgttagagttttcaaaaatattgtgtacaaaaaataacaagcagaacaatgaattttgtaaatgtatagaaacagttccccaagattcatgtaaaacctgctttcctcagcaggaccaaagagatacactctccattcttgtcccccatggggataaagagagttcagataaaaaaattgctgtaggaactgaatgggacattccaagaaatgaaagttcagacagtgcccttggggatagtgaaagtgaagatacaggtcatgatatgactagacaagttagcagttattatggaggagagcaagaagattgggcagaagaggatgagataccttttcctgggtcaaagttaatcgaagtgagtgctgttcagcccaacattgccaacttcgggaggtccttgctgggtggctactgctcatcttatgtgcctgactttgttcttcaaggaattgggagtgatgagaggttccgtcagtgtctgatgtcagatttatctcatgctgtgcagcatccagttttggatgaaccaatagcagaagctgtctgtattatagctgacatggataaatggactgttcaagtggccagtagccagagacgagtgacagataataaattgggaaaggaagtattggtttccagtcttgtttccaatctgcttcattccacacttcagctttataagcataacttgtctccaaatttttgtgtaatgcatcttgaagaccggttgcaggagctatacttcaaaagtaaaatgctgtctgaatacctgagggggcagatgcgtgttcatgtcaaggagctgggagtggttctggggattgaatccagtgatcttccacttctggctgctgtagcaagcactcactctccatatgttgcacaaatactcctttaatatacctaaaaattgttagaaattggtgggaaaataggtagaaaccaaggaagcagacacaacatgcatttatggagattctttttcccttttagacttccatctgaatgagtcagtcaccagggtattctgcatagcattgtatattctgtgtatgtcagatggctttttctttttgactggacttttgggtggtggtagatttttaaacaaatgaaattaaagcaacaataattttgaagcatttgaacaagccaaagtgtacggtagaaatttctacaaaatgaatattatcaagagtttcatgtgatcactgcagtgttgtcacagctcataaatagcaacagtgtctcatgatttaatggcccagaaatagttattcattagtttttaatttttaatttctaaggtacagagatctataaaaccttgattatttgttagttttgcaattcaaaacagctaatgtctggttatttctcaaagtaagtattttaaacagcctgttaattataagaaactcagaataatgagtgtaaatgtgttatgttatccacccaagtgtacatatgtacctatttttttttaaaaagcagaaatagaaatacaagactggtaaacatgcctttaaaaatatatatattttcaactagtattgtctataatgctgaaatattacttattggtgatttttctgtttcacacactctaaaatataagtaaagccaaccttttttttaaggctgagattcccaaaatgagaatactactttataccatttgtttataagtatgaactgttcttataaatattaatatttacatattcactaatttaacataaatgaaaattaggattaaaaattgcaccaaagcatcggcaaaaacaatactatattctttaaaagtgctcaggtagccaaggcccttgcttttggtatcaaccctcatgaacccataggagctgaatatttgtttcactgcttaataatcctcaatttacactattcataactcttaaaattattctctttttttctaagagtccctcccttccaaaagtgtatttttttcaaagattttcacttctcaattgttgcctttgtacatactatagagtgttgcttgtaagaaaggctaatatggaaccaaactcttgtaagtaatgtaaatagaaaggtgggtggataaagttttcaatactttctactacctcagtttacttgagtactacattatagtttattctttgcttatctggtctaagagacttttaatgctagtagtaaagttggtttctgctttcattgaccattttcatcataatttcatcattgattaaaaaaagaaaaccacttgtttattcagttattaaatatatttactatataacacatccattcttgctgtttaaattttcaatagttaatggaaagttgtctttgaccttgaatttacagcattgggtcacattttgccttgctgtgtatgtattcaagagacttccaactagacaaagaaaaaattgttgttttaatggaatgtaaacctgaaattggtgtgtctgcaatctgtttggcccatgaccttttacctagtcccagttattacctgagtctcccatggatgacttgctgccaaggagtgtttgtggatatattttctttggcttaattttcttattctgtgcattaacaaaattatccagttgtctgattttggaattctatgagtcaatctttttggcagaattcagaatattaaaaagttcatacatttgcgggccattgtacctttttttttttttttttttttttgacggagtttcactcttgttacccaggctggagtgcaatggtgcgatctcagctcactgcaacctccgcctcccagttcaagtgattctcctgcctcagcccccaagtagctgggattacaagtgtgcgccaccacacccagctaattttttatttttagtagagatgagatttcaccatgtgttggtcaggctggtcttgaactcctgaactcaagtgatccacctgcctcgacctcccaaagtactgggattacaggcgtgagccactgtgcccagccttgtactttttttttttttattgtagctctgtatagcacttggataatgtctgggtgtctccttaaccatcaaactgttctttatttaaaatgtttaattaccgtttagaaattctagtcctcaataagtgggtggctcatgctattgttgttcctaaagctaagctttgctgggaaggaaatgacctatagtttcttaaagaatcattaatccttataggattcctgagttactgttttgttcctccccactgcttcccattcctgagttttgtaattcctaatccttctataatttctattaccttcaccatagtcattctttccttacgcaaagcccaaggaatgagctgctgctactttaaagtgtggtcattatgatgaatgtgaaaagagttttggcttgttctaaataatttttacaagttatggtacagacagttgttacatatcaaaaaaaacctgtttattgaaacaggaaataaaaaagggatcttttacattatagaattaaaactaattttttcttgtatataaactaattggtttgattttaaatatttctggcttttattaatatgtcttaattttgagtttgaaaatgttaagtgcaataaaaacatactagtacagattttgttttgttccaattggcatactctggggatgatcacttaaaaaaacagattttacataatgcctacttctggtagatgtcttatgagattgttctgctttttctaagttacttagatgttggatatgtacatagctgtttcttgttctgtatacatttctcaaatgtacacttgtattataataacctcccagttctaggggatatttgtgcaataaatacacatgtcaacttgaaaaaaaaaaaaaaaaaaaaaaaaaaaaaaaaaaaaaaaaaaaaaaaaaaaaaaaaaaaaaaaaaaaaaaaaaaaaaaaaaaaa

SEQ ID NO: 24481 - DNA, 4821 bp, Homo Sapiens
gatggatctgtagaactggaatctcaagttcagaaagatggtgtagcggattctacagttatttcttcaatgccctgcttgttgatggaactgagaagggactcttctgagtctcagttagcatccacagagagtgacaagcctacaactggccgagtttatgagagtgactcctctaatcactgcatgctttccccttcctctagtggtcacctggctgattcagatacgttgtcttccgcagaagagaatgaaccctctcaggcagaaacggcggtagaaggagacccttcaggagtgtctggtgccacagttgggcgcaagtctaggcggtcccgatctgaaagtgaaacttccactatggctgccaagaaaaaccggcaatccagtgataaacagaatggccgagtcgccaaggttaaaggtcatcggagccaaaagcacaaggagaggatcaggctactgaggcagaaacgggaggctgctgcaaggaagaaatataacctgctgcaggacagtagtaccagtgatagtgacctgacttgtgactcaagcacgagctcatcagatgatgatgaagaggtttcagggagcagcaagacagtcactgcagagataccaggtcatttggatccaggattcctagcaagtgacaaaacatctgctggcaatgcgccactcaatgaagaaattaacattgcgtcttcagatagtgaagtagagattgtgggagttcaggaacatgcaaggtgtgttcatcctcgaggtggtgtgattcagagtgtttcttcatggaagcatggctcgggcacgcagtatgttagcaccaggcaaacacagtcatggactgctgtgactccccagcagacttgggcttcaccagcagaagttgttgaccttaccttggatgaggatagcaggcgtaaatacctactgtaatacaatgtcactgtgtttcctctgcactgttcccttccacttcctcatcctctttgtgacatggaagttcattgtcatagcttcagcttcagaagctgtttgtggcatttgtaggattcaaactcatggaaaattccctcctcttcccccctttttttaattaaaagaagtcacttaggaaaataacatcacagagaaaagaatttcttctttccctcagtaggaatatagaatgatgaattttattagacaactttattttacttggtgacttttaatcttaggaaactctgccttccttttagaataatattttaattgccaggcaaaatgggtttcagtttttgaatcttgtatttatttttctgtataatgaaattaatatctagacttgaccactatctgcccaccccattggcactcccatcttagggcattcgcacacatatcagtcaggtccttattggcacctagtagggcatgtgcatttaaaaacttgtccttaaaaatagaagacagaagtattaaaattatattttcttttattttaagtcttctgccttctttcttgagtttgctcctgttgacttcccacagcacagataattgacatgtccctttgtgtttataaatactactaaggtgacctagttggtctccttgttgcaataattaataactctttgcaaaatgtctcctttgagacagaggcatttcagatagatacccaccatgaggtgttctgggcatctgaaggtattaagagttcagtgggaaaaatctctctccctcgcctttttttctggtttagtcaaataacgggtgaacatagaaacctgttgggaagaatatgaaaagttatgtggcctctgaggctacaggcacttgcaaatccgagaggaaagtgccgtctttcatagctggtctctgtataaagagtatgtagcaacaactgtttaacatccgagatgaagtggacctgatgctgtatttgggtatttttctcctctaccttctaaaaaaaaataccataagaagaatcagaatgtaccataagaaatcagatgcaaagcacgttaatgtcattggtaagttttacagagtctaaaaggattagcaaagggtagcaggagcttcagggaattcaggaaatgccagcattggaattttgtggcattagttactaccttctttcttataatatgttgtagttactagtgaattcttttaaaagcaatacctagagttagaacactatgcactctgcacagggggagtgaagtaatattggcttagaagacttcaccttttgtttttcatggtttttgtttgttttgtttttgtttttgtttccattgttaccgttgctatggccctttgcctgtctctccaaatcccctggtggctcttcttatcattaagagtatgagaattaccattttcagttttcattcagcaaacaaatttaccaagtgcctgctctgcataaggcactgtgaggggtgggtgctctgggggctgctgagatgaatgacacacaccgcacatacacatgcatcagtgtctgcctgcctccccctgcccagcctgttcttcttcttcttcttcatcttcttcttttttttttttttgtaaagacaagtttattcctttacgcttcttgttgcattagttctcctgtatgttccttcttccacaggaatgtatttgtgcatatgttctttgatcttctctgatagcatctcatttgatctggcctctgtccttcatcagcttttattttttttatttttattttctgcttttgttagataaggcttttaagatcatgaacctccagctttagcaactcatatatcagtctctcacatggccacaattctagacaaaaaccaaagacccagaggccagagcaaagtaggaccttctgaagattcactactggtgtatccttggaccttcacattttactttaggattaatttattgaattttactgttacacatagtttttgacttgaattaaaatactagacaaagcagaaatgtacaatttctggtctgtgttttccaggaaattcatagagaagagaatagagtggatgatgtgacttgaagtttttgcagcttattttttcccccactgtcagggcagaggcccattttaatgaatgtttttgcatgatctgttcttatgttaaccacatattttttttcccaattccacacagcaggtgatttcccgtgtgacatattttcttcatagtccctaatatagtcatcctctacagagttggcgtgctgtgtgcactgtggattaggaacagagtggagctgtaaccagtctcttctctggccctttgcctttatgtcagcttgcacttttgcctcacttattcctagtccagctcccaactgcctgacttaatggaccagaacggagatttggatattaagatgcagagggggaggggaagggatggtagagatagacagctctcccctactaggttgggtcatttcccctaataactatagagagactgtgtttcaactctcttttcattgctgtttccagaagagtggagagtgtggtttcaggcaaggtattaatgatacaattccgtggtatacagctcctgtgacatttgaagtttcttttaaaggggtttttcttaatcaaagttttacatttggtagcataagtagttctttatgcttcacaggacattgtcttcagagtaatctctctgctaaaatggtacatgtgggtcacagattggtttatgccactgacggttaagtttccaccccctccaatttgtgaaaaacagagcagtgacctagctgttgcatcatcatgactgccatgtaacctgtaattgctgctctccagtaattgtcttttcattttgatggtaggggccagactgaatgaataatgcattcttttttattcaatttatttcattcagtttattcttggcaatcaaacatcccataaactttgcttttattatcaattatgaatatgaattgtctggtttactaatgtagtcatttgttcatctttacttttagcagattagcaccataactaacttaaaactaagtttgttacctgctttttatactgtcacaaaggtttttgaaaaagctggggacactattttgtcttttagttttaaacttttttaaggcaaagcaagctccccaatccctgttctccaatatgtgtatgatgtgacttccatgtagatataaaaatgattgtgccctaaccaaacttcctcagattgtgcactgtttgtttaaaataatcacgtattttagtctgatgctgttgtattttttcattttatttaaaacactacttacttcttattctcttaacaaattttaaaaggtagtgatcttaaaaaaaaatcactggataactaggaaatatttttgttgttgttttgtttcttaaagagtacagaggccattgaagccttttgctcctcttaccgtgaaaatgaaatgttagccattgtatggctaggaaccaatgcacttggcagttaatggatctgctgttgctggagtgtgagcgtggacttgatgcagtgatgacaaatcattgcttagaattaatgttttcaaatgtgcaactctagtttttaaaacaaaatttggttctttacattcattatttcgtttttgtttccctttagtatttaatggtctttggagaaaaaataataaaacagagtgttatatatatattttttggtgcaagataagattttccgttttttgaaataagtctgtagcataaaggttaaactattttaagacaaaataaaatagagtgtatttaaacaaaaaaaaaaaaaaaaa

SEQ ID NO: 24482 - DNA, 5157 bp, Homo Sapiens
cacaaattcgcagcaggcggctggggcggcggctggggcagcggctgcagcagcggcggacgctctgcattacccagtcttgcgtcctcggcaggcgcccgaagctgagtgcgcatcctctaccgcacccaagcttcgtctgtctcgtcaagctcttcatgctgcccaactaaaaggaaaacatgggcacaggggattttatctgcatttccatgactggaggggcgccctgggggttcagattgcaaggtggcaaggagcagaagcagcccttacaagttgcaaagattcgaaatcagagcaaagcctctgggtctgggctctgtgagggagatgaagtggtttccatcaatggcaaccctcgtgcagatctcacctaccctgaagtcatcaagctcatggaaagcataacagactctctccaaatgctcatcaaaagaccatccagtggaataagtgaggctttgatatctgaaaatgaaaacaaaaacctcgagcatctcacacatgggggttatgtggaaagtaccaccctgcagattcgaccggccacaaagacccagtgcacagaattcttcctcgcccctgtcaagactgaagttcccctagctgagaaccaaagtggtcccgactgtgcagccagcttgaaagaagaaacaggcccgagctaccaaagggctccccaaatgcctgactcccaaagaggacgcgtggcagaagagctgatcttaagggagaaggtagaagcggtacagcctgggcctgtggttgagctgcaactgtccctttcacaggagagacataagggcgctagtggccctttagtggctctcccgggagctgaaaaatctaagtctcctgacccagaccctaacttgtcacatgacaggattgtccacataaattcgatccctactaatgagaaagcagaccctttcctgaggtccagcaagataatccagatctccagtggcagagagttgagagtgatccaggaaagtgaagcaggagatgcgggactgccccgggtggaagtgatcctcgactgctctgacaggcagaagacagaagggtgcaggcttcaggcaggaaaggagtgtgtggattctccagtggaaggagggcagtcagaagcacctccttctctggtatcctttgccgtctcatcagaaggcacagagcagggagaagatccacgctcggaaaaagatcacagcagacctcacaagcaccgagcgcggcatgcacggctcaggaggagtgaaagcctgtcagaaaaacaagtgaaggaagcaaaatctaaatgcaaaagcattgcccttcttctaacggatgctcccaaccccaactccaagggggtgttgatgtttaagaagcgacgtcggagggccaggaaatacaccctagttagctacggtactggcgagcttgagcgagaggcggacgaggaggaagaaggtgacaaggaggatacatgtgaagtagcatttcttggtgcaagcgaatcagaggtggatgaagagttattgtctgacgttgacgacaacacacaagttgtgaactttgactgggattctggactggtggacattgaaaagaaactgaacagaggggacaagatggagatgttaccagacaccacaggcaagggagccctcatgtttgccaagaggagggagagaatggatcagatcacagcccaaaaagaagaggacaaggtaggtggaacgccaagcagagaacaagatgctgcccagaccgatggcctgagaaccacgacttcttaccaaagaaaggaggaagagtcggtaagaacgcagagctctgtgagcaaaagctacatcgaggtgagtcatggtcttggccatgttccccaacagaatggcttcagtggggcatctgagacagcaaacatccagaggatggtccccatgaatagaacggccaaacccttcccagggtctgtgaatcagccagctacccccttctcgccaacccgaaacatgacgagtcccattgctgactttcctgcacctccaccttactctgcagtcactcctccccctgacgccttctccagaggggtttcaagtccgattgctggcccagcacagccccctccatggccccagcctgccccgtggtcccagccagccttttacgattcgtctgagcgaatggcttcccgagatgagaggatctcagtgccagcaaaaagaacaggaatattgcaggaggccaaaaggagaagcacgacaaaacccatgtttacttttaaagagcccaaagtaagcccaaatcctgaactcttgtcactccttcaaaattcagaaggcaaacggggcactggagctggaggtgattccggaccggaagaagactacctcagcttgggggcagaggcttgtaatttcatgcaaagctcctctgccaaacaaaagacccctcctcctgttgctccaaaacctgcagtcaagtcctcatcctcccaaccagtaactccagtttccccagtctggtctccaggagtggctcccacccaacctcctgccttccccacatccaacccatcaaagggcaccgttgtctcctccatcaaaatagcccagccttcttaccctcctgcccggcctgcaagtactttgaacgtggctggtcccttcaaaggaccacaagcagcagtagccagtcagaattacacacccaaaccaacagtttccacaccaacagtcaatgctgttcagcctggtgcagtgggaccatccaatgagcttccaggaatgagtgggagaggagctcagctctttgctaaaaggcagtcgagaatggagaagtatgtggtcgattcagacacggtgcaggcccacgctgctcgagctcagtctcccactccatctctcccggccagttggaagtactcctccaatgtccgagcacctcctcctgtggcctataatcctatccactcgccgtcttacccactggctgctctcaagtctcagccatcagctgcacagccctccaaaatgggcaagaaaaagggaaagaaacccctcaatgcattagatgtcatgaagcaccaaccgtatcagctcaatgcatccttgtttactttccaacctccagatgcaaaggatggcctcccccagaagtcatcagtcaaggtcaattcagccctggccatgaagcaagctcttcctccccggccagtgaatgctgcctcacctacgaatgtgcaggcttcgtcagtgtactcggtaccagcctatacctctcctccttccttctttgcagaggcctcctcaccagtcagtgcatccccagtgcctgtgggcattcccacctcgccaaagcaagaatcagcctcatcatcttattttgtggcaccaaggccaaagttctcagccaagaaaagtggtgtcacaattcaggtgtggaaaccatctgttgtggaagagtaatcttgtagctgaagctgagtgtccactttgcttgaaatgaattgtttgcagtgtttcttgagtccctgagaatgcctagcaaagtcctcaacttacttaatttcagatatgtcacctcctaatctgggtccaaggagtataatatttttaatgagtcaaaaatccaactcagattgacctaaaatatatttatcttctttgcacacttaaaaaatccaggagcaccccaaaatagacatgtaccgttatattaagtaagcaggagacttaggatttgtgctgtagccacaagaaagacagtgatcagtgatatcaaacatcaggaatcagcctttatgtaacataacagctgtcctcctatggtgaaaggttcaaatgtagtgaaggtataacctatattgactgagatttcccttttaggtagtgccttatctctattactagtgttaaaggaataaggaatctatgaaggacagggagcagctctggtctgtcaatctcagccacctgtttgatatcacagagaagatactcggaggattgttggaatgtatatagtttagtaagaagtgggtaagaaagagggtcttaattactgagcacttattatgtattaggttctttgccagatgtttttacatatataaactcatttcagaaaacttatttaaagtaaatggggccgggtatggtggttcatgcctggaatcctagcactttgggaggctgaggtaggaggactgcttgaggccgggagttggagaccagcctgagcaacatagtgagaccctgtctcaataataataataataataataatagtaataatgaagtaaatgggataaggaaagaaggataattatctttaaaggttgattcccaccctccctccccagttacttaaggaactaagtgagtacatctccagttgcccatgaaagcataagtttgttttcctcagctgaggcaagtggtagagtatacaggataacgaagtaacatgtaaaaggcaggacgcacataaaggtgtacatggctattgtttcacctggagaaaccacatgattgggacctgaaggtttactgactgactacaggggctgattgtgaagcacgaggaaccccatgtgtgtggagactgtagggtgagagcacacaattattagcatcatttctgagtgatctcacagattttttttcttgtgtttgttttgctttttgacaactgcttctcccacgttccttgcaattctattctctcaccttcactttactatttgtattcgatggaccaggataattcaggcaaggttaccttgtaaacttgaattggccacacaccatgttgtcacccagctggctatgaagtgaataatggtactgaaagtaaacctgaagacctttctcagatctattttaagtctgagtctgaccaaccatggaaaatattcgacatgaattaatgtagagaactataaagcatttatgacagctccaagaaaagtcatctactctatgcaggagatatgtttagagacctctcagaaaaacttgcctggtttgagggtacacagtaccattttaatcttctgaaaatatctgtattcctgctctttttctgctgtcactgtcaatctgctatatttttcactatcctattaaaatattactgtctcctcaaaaaaaaaaaaaaaaa

SEQ ID NO: 24483 - DNA, 6110 bp, Homo Sapiens
gggcagctgttacgctcagattccaaatgataatgtttgagagcgctgactctacagccacaagatctggccaggatctctgggctgaaatttgttcctgtctgccaaatcctgaacaagaagatggtgccaacaatgcattctcagactcctttgtggattcttgccctgaaggtgaaggccagagggaggtggctgactttgctgtccagccagctgtaaagccttgggctcccttgcaggattcagaagtgtatttagcatctctagagaagaagctaagaagaatcaaaggtttaaatcaggaagtgacttccaaggacatgcttcgaactctggcccaagccaagaaggaatgctgggatcggttcctccaggagaagttagcttcagagttctttgtggatggacttgattctgatgagagcaccttggaacatttcaagaggtggctccagccagataaagtagccgtcagcacagaggaggtccagtatctgattcctccagagtcacaggttgagaagccagtggccgaggacgagccagcagccggggacaagccagcagcagcagaacagtaaattacacacacacacacacacacacacacgccgagcagctgtctcgggtccagagcgagcaacgtggagctcagtgacagcagcagggagaaatccactgaaggaaaaaacccaaatttccactccacaaagaaaacagctgcaagcccccagggacttacctggggctggcatgtgtgaccgtctcggatgaagtgactgacccagtgcacactggatcaaaatgctgctttcctctgtgtctcacagcttggctgagctctgtctctgcaggttagaagtctgctaaagatcaaatgtgaaagtacttggagaaactgaggcctcttatgtgtaatgtgtaagttaagtgagccatatattttcttgcctcttccggacattcatgcttgtgtcccaagcattcccttggtgaattgtcacgtgagtggggccagtaagagtgaagtctgctccttgaatccaagccccatctggggcttctctaacaaatctgtagccctgtaactccagaacccctggcagcagcagcttttctgaggatggagcgtgggacagccaccagtgtgccgagcagaggtggcgaaggacatttccagcccagcagtcgtcatggtaacagccagggcgggccaggcagggatgtgcagaaccatgtgggattgacctttctgtggtgtcaggtttgagcgggagctggggagaaacagcaacaactacttccctctggcccagccctcagggcttctgggctgggctgaatgaagaaagggagaagctgagaagtgggacagttggcgagagagccaagagagagacagggctttagtcagagccagctagagaacccatgggaagagggacaggctggtcaccagcaggctcctgcggtgagcccacctgtggcaagcactagacctcaggcccccagttggcagcgctcatgggtgggtactaaaggtcagttccctatactcagagctcccccagactccttcagatcaaatgtcaccttttccatattgcaaaagcctttattgctctaaggaaaacatgctaaattaaaaagaaccaaattattcttttaaaaatagaaatattttaaatggaaaagttcaaagaaaataaaaggctttccaatcctccctctgcttctcccagctctaaaattcctccacagttgcttcccatgcctgccaggttggaggaaagggacaggcctgggcccagcggcctcttctctgacaagggcacagaaagggaagccggattggtcgttgcctgaatttgaggggggcttggactcacaggcttcccgctaattcgaaccagtgaaggagactcatttccctctatgccccctctttctcctattggggcggacatacaggcagcagaaagaggtgcccacaggtgccctgtgaccccttgagggagaggcgaggggtgcagggcagcctcaggtgagctccatggagaacatagcttaccagtggatcccatttccagactttcaaatcatggccatgcaagagatctcgagctttctgggacacactgctatggaaaacaagaccatagcctcagaataaaaaatgtggtcttcttatttactgaaaatctaccttcaggaaagacatgaagggggcactcaccagccaataggtgggtaacttaacacagcagcaccacaggctttcttttatacaggagtacagtccccaaatccccttggagaactgcctctgggccacttgtacaggggaaggggacacttggcaggagaggggaccgcagaccttgtagtcataagttagcatgctgctaaaagactatttgaaatgagtgctgattacatatatttaaaagtggtcagcattactgaagctccagcttttttttctgaggcggagtcttactctatcacccaggctggaatgcagtggcaccatctcggctcactgcaacctccacctcccaggttcaagcaattctcctgcctcagcctccccagtagctgagattacaggtgcccactgccatgcctggctaatttttctatttttagtagagacggggtttcaccatgttggccaggttggtcttgaactcctgacctcaagtgatccgcccacctcagcctcccaaagtgctgggattacaggcatgagccaacgcgtctggccaagagccagcatttttgagactcgaacctttctctgactgacatgtattgtggagctcaaaataaacattctgtattttgggagttggtcatcactctctagttatgctcctgtagagctattactgaacctctggcctcttccctgggttctggaaaccttcatgtacccgtggcccccagagcaaggggtaggagacaggaaggctgctagtgccccgatggtcccacacgaggctgggaccttgggacacaggcactgcatcattcactgttccctgcatgggcttcaggagtggatgagagcccagggccaagccccttcctctttcgttctgcccaagccccttccctccagctgccttccctccttgagtcccttgattcctctgtgatcccccctccagctcagcacctggggctggcaccactccccagggatactgataaagtcacagagcatctgcccagcgcctgaggtggtgtaagttggggaaggtgggtcatcctgttagttgctcctgccaggcctggagcccctggtggtcctttagaattctagattctcttggttcctttctccagaatccttcccttctcgctccactcatgctctgggccaggcccaccacgtctcctggcagctgactatctcatgccacctgcctttgttctctattccctttgccaaaaccatattttccggtgaatccctcttctacttcaaggttcagttcaagtgccaccatataagtgaagctgtcctcagtcgaccctaggtgactctgtggccccatggaactttttctcatcaccatcgtagcagtcatgactctgttttgacctccacttctccactggagagtgtgttccgtggaatgaactggcttgtagtgtgacctgtgaacctccagagcttggctctgtgttgctcattgagtacttgttcttgcagtgggcccttgccaagagaggcccctgttctgggatgtgagccagagaaggtccgagactcataatttcatgtgtcatactcgtcctccacccagctccccctggccagatcacagccccctcctgctgcagggcctgtagtgccaggctggttgcaagacaggggtcctcacctctgagaaaatcatggcttggcccattggcaccccacctgggatgcagaatggagcatcaacagctggctggtgtctgaacgctatttccccagccctgggcagccatctcctgtagctgttccctcatcccatggctttaccaacccctccttgctgcactggagagcctgagagcaagtaggttcagagtgggaagacagggctaaaggcatcttcccggtcttctctccttccccttcctcccagcagttgcagctgtgctgcgtgatgatgtggaacagagcacagtcttaattactgctcagccctgctcattagtgcttctggaagcccaagaagccagagttaggaagcctcaatcacagtggagacccaggctgcaggcctcctgggtgatcgctagtcctgtgtctcctggtgacttgggacccctttgggggactccagcaaaagacactccctccaaccctgagactggggaagggctgaagctggagggagtcactgctggattaagggagtcgctgctggattaaccttcctcatgggcagctctgatcaaatacctatgtttctcttgctgacagcatagagtctggagtccttggcttagcagtcaagctcctccacaatttggtcccacaggactttcccaacctgatttcctccttcaatcctggcagacaaggagggaaggcaaaggctaggccccctcatgggctctcactagtgtgtgcagagcatttcagggacagcatatggtggaacgtgtgaaactccactgcaatcagagaaagatgaacgaatgattaaataaaccacatgtgctcaaatcccgcacactgatgacttccctgcttttggagagacttagcaaggagcctggtgtgttgttcagcatgcactattttttttcttttttttttttggttgtgaaaaggaataaagaaccatgaagtgcctgaagactgaacgaaaggaagctgagtggaggaggagagaaggggcgggccctgaaaactataaatctataggcccaatttcaatatgtggaaaaactccttcaaaatataaatttgtaaacaccctagatcaaatgagagaatgctcatgaaagcactttttgaactgcaaagggttagaaatataaagcattattctgtaatatttctgttcagtgcagactttaaaacagatgctatggagaggctggagatctatgataatggctcatcacctacaaggtgctcatacagtttgggctgtttcatttaattagtcattgcctctcatgtagactactgcagaagtctcctaagtggcctccccacctctgcattctcccccattccattcatcttatatgccaccgtcacgttaatcttcctgatgcacagctctgatcaaatacctgtaatgattctcctgctgactgcacagagcctggagtcgctggcttagcagtcaagaccctccacagtctggtcccccaggactttcccaaactgatttccttccatcacggcaggcatgggctcgggaagatcaagtcactaaacccaagaccacacagataccaagtggcagatcatacagccaagccttcagaccctgacatctgactccaagaccattctgagcccatcacttcctcactttgatggtgcaatggactgtgtgtttgtgtccctctaaaatatacatgttgaaacactaatcctgatgtgatggtatatggagatggaactttggggaggtaattaggtcatgagagtggaccctttatcaatgggattagtgcccttacaaaaaggggccagagacctagctagttctcttctgccatgtgaggatacaatgagaagtagacagttggtgatatggtttggctgtgtcccaatccaagtctcatcttgaattgtagttcccacaatccccacgtgtggtgggaaggacccagcgggaggtaactgaatcaagggggcagtttccctcatgctattcttgtgatagtaagttctcacgagatctgatggttttagaaggggcttcccccttcagtcggctctcattctccttcctgctgccctgtgaagaagaacatatttgcttccccttctgccatgaatgtaagtttcttgaggcgtccccagccatgccaaactgtgagccaattaaacctctttcctgtccaaaaaaaaaaaaaaaaaa

SEQ ID NO: 24484 - DNA, 4804 bp, Homo Sapiens
gagtgagcgtggcggccatcttcgtcttctgggcacgtcagctgagccggttagggctgaagaggagcgttgcgcaagcgcacccaagtcggtcacaggtaactcccatctgacgagcgaggcgtcgccgtcgtcgccggaagtttggtgtttgcgccgcgggggaggcggcggccgcagcagaagcagctgagtgtctcctgatacccggatgtgaggcgatccgctggcgctagtctgaccctccgccaggcaaaaggaagattgtctttggctatagagtttttttttttaaagattactaaacatacaggaagtgataagaagtatcattcatcagaagcatcattcatcaatcaacttgaagaaaaaggtgatatattatttctttaaggtgctgtgtgatgtgttaagagcatattagaaggaatggttttgtctaattttcttcatgagttatggtggctgagacatcgagtctatattttggggcaaaaactaaacggcagcacaaaaggaaatctatattaatagaatattttgttgaacaaaggaggttagataagaactgcaaaccaacagactcagcaaacaaggaaagaaacgtgttagccataagacatgtttcaagtgaatcgaagtccaataactgtagacttcagaagaaaaaagttttcaaaaattttatcaaaacaggtcactgataaataactcctccagtaatagagctaggcctgaaaccaaaattaattaaaaaattaacaaaacagattgaacctgaattaaatttcttttgataaaaaaacttattaaaaataatcaaaattttcctcaaatttttattaccttgtccaaagtaaagcaagtgtcttttagcattcatgccagcttttctcatgttctaggaatgacagaaaccttacttgaagcaaactagtatttttgttgaaaatgtatatcagcatcagttaaagttgatttttcagacctgctcctcagtaataatactagctagtcagcattcacgcctaccaggacacaaaaatcctcttcaaaactactcagaaaagaaagtcattactcaggaatgatgtccattcaggagaaatcaaaagagaattcctccaaagttactaaaaaaagtgacgataagaattcagaaacagaaattcaggattctcaaaagaatctagcaaaaaatcaggtccaaaggagactataaaatcacaggctaaatcttccagtgaaagtaaaataaatcagccagaattggaaacacgcatgagtacaaggtcatcaaaggcagcatctaatgataaagctactaaatccattaataaaaatacggtgactgtgaggggatattcacaagaatctacaaaaaagaaattatctcagaaaaaattagtacatgaaaaccctaaagcaaatgaacagcttaaccggagatcacaaaggctacaacaattaacagaggtttcaagaaggtcgttacgcagtagagaaattcagggtcaagttcaagcagttaaacagagtttgccaccaactaaaaaagagcagtgtagcagtactcagagtaaatctaataaaacaagtcaaaaacatgtgaagagaaaagtactggaagtaaagtctgactctaaagaagatgaaaatctagtaattaatgaagtaataaattctcccaaagggaaaaaacgcaaggtagaacatcagacagcttgtgcttgtagttctcaatgcacgcaaggatctgaaaagtgtcctcagaagactactagaagagacgaaacgaaacctgtgcctgtaacttctgaggtgaaaagatcaaaaatggctacttcagtggtcccgaaaaagaatgagatgaagaagtcggttcatacacaagtgaatactaacacaacactcccaaaaagtccacagccatcagtgcctgaacaaagtgataatgagctggagcaagcaggaaagagcaaacgaggtagtattctccagctctgtgaagaaattgctggtgaaattgagtcagataatgtagaggtaaaaaaggaatcttcacaaatggaaagtgtaaaggaagaaaagcccacagaaataaaattggaagagaccagtgttgaaagacaaatacttcatcagaaggaaacaaatcaggatgtgcaatgtaatcgttttttcccaagtagaaaaacaaagcctgtgaaatgtatactaaatggaataaacagctcagccaagaagaactccaactggactaaaattaaactctcaaaatttaactctgtgcagcacaataagttggactctcaagtttcccctaaattaggcttattacgaaccagtttttcaccaccagctttagaaatgcatcatccagtgactcaaagtacatttttagggacaaagctacatgatagaaatataacttgccagcaggaaaaaatgaaagaaattaattctgaagaagtgaaaattaatgatattacagtagaaattaataaaaccacagaaagggctcctgaaaattgtcatttggccaatgagataaaaccttctgacccaccattggataatcagatgaaacattcttttgattcagcatcaaataagaatttcagccaatgtttggaatccaagctagaaaacagtccagtggaaaatgttactgctgcttcgactctgctcagtcaagcaaaaattgatacaggagagaataaatttccaggttcagctccccaacagcatagtattctcagtaaccagacatctaaaagcagtgataacagggagacaccacgaaatcattctttgcctaagtgtaattcccatttggagataacaattccaaaggacttgaaactaaaagaagcagagaaaactgatgaaaaacagttgattatagatgcaggacaaaaaagatttggagcagtttcttgtaatgtttgtggaatgctgtatacagcttcaaatccagaagatgaaacacagcatctgcttttccacaaccagtttataagtgctgttaaatatgtggttctgctcattaatcaccacgagtgtggatctgaagaagagtttattacctctctttttttgagtatgtttaacttcagatacacacaacgtagcttctccttccctattagattcttagaagggctggaagaaagaaagaattctggctgaataccctgatggcaggataataatggttcttcctgaagacccaaagtatgccctgaaaaaggttgacgagattagagagatggttgacaatgatttaggttttcaacaggctccactaatgtgctattccagaactaaaacacttctcttcatttccaatgacaaaaaagtagttggctgcctaattgcggaacatatccaatggggctacagagttatagaagagaaacttccagttatcaggtcagaagaagaaaaagtcagatttgaaaggcaaaaagcctggtgctgctcaacattaccagagcctgcaatctgcgggatcagtcgaatatgggtattcagcatgatgcgtcggaagaaaattgcttctcgcatgattgaatgcctaaggagtaactttatatatggctcatatttgagcaaagaagaaattgctttctcagatcccactcctgatggaaagctgtttgcaacacagtactgtggcactggtcaatttctggtatataattttattaatggacagaatagcacgtaaaacaaattcttgcctacaccactagaagacatctattgaagagaatggattggttgctgactttaaccaggaactagggccatttttattacaatgaactcaggactggcaacaaccatatggttgttccattttcataaaattggaaacaatgcagtaatagcttattgttttgttttttaaagaagatattttattatcttttacagaaatttatgattgatgtattttatctatagttatttagacatgtttacatgcagcagataattgttcatagtggactgaaaactaatgcaaggactatggtctcagtgataagtatattttgaagttcttaatatggaaatataccagtgtagcttggtactgtatttttttatattgatctgctgataccagtgataggcttaaagattgtattttcacagagtggaaaccaatttttttagttattgttcaaggagggtgcaatattaagtgttttggaatttgaagctaatttttaaaaggcctgaactatactttgaagaaacccctatagaaaaggaaagctccagctaaataggaagaattagaatattgagcttttttttcctgatttttctctttcctatctttgatggaaggaggaagtagaaagtggtaaagaattgaggctttccttcttggagagctgtaaatgacaagcattaggaaaggtaccctcctagattcattattctttcattctggtttcacttttaaaataaatggcaacttggcacacctaggctgttaacaaatctcaaagaggtttataaaaacgtatagaatacttggaagcaaagtatggatgactcggtatctgctttgttattcctcagaaatactgcactgagtatatgccctcattactggacttcattttgatacttgtctatccttcatagtgccctctacttttaaagggtttatatgttgaaaaactgctgtggccttttatgacctgtatataatgtagaataaaaataataaaatacttgatagctttttctaagcaaaaaaaaaaaaaaaaaaaaaaaaaaaaaa

SEQ ID NO: 24485 - DNA, 4333 bp, Homo Sapiens
gtttttttctttgctgcgtctactgcgagaatgaagactattctcagcaatcagactgtcgacattccagaaaatggtatgagacttgatgtcttttacttacatctttactgcacgttccaagcgttgtgtggcctgacgagtgtgttctctcttctagtcgacattactctgaagggacgcacagttatcgtgaagggccccagaggaaccctgcggagggacttcaatcacatcaatgtagaactcagccttcttggaaagaaaaaaaagagggtgagggtttttcttctgataattcagttgctcgttggaaggtggtttataacagcatcacatttggttgctttaacaattttcgaattgaggttcagtgcttcagctttagatgttgctgtccagaataccagcctgttcagtgaaattgaaaaaccagattctgaacacagccaattatataaagctcaaatgtaatagtggtcatcagtgacacgtcttaatggtgttagaagtttggtttattttcctagtgattgctttgtaaaaatcacaggaaccggcagtaggtcatttaaacctgatgatttaattttccagaagggaagtttgttgcaacttctacaaagcttaactgttgggaggttttataggtggttggatttttccagttgaaaaccatgtgctttgataagggttaattctagaatcttaaagtaattcggtaagtggtctgttgtcttttaagcctgcatatttctggaaagaatacattttttgttctgttacagctccgggttgacaaatggtggggtaacagaaaggaactggctaccgttcggactatttgtagtcatgtacagaacatgatcaagggtgttacactggtaagcagatgtatcagacttccttgttttggaaagggaggtttctcaaacctgtgctttatacagcgtaagtgtctctttcagagaatgggtcatgtattttatttggtgtaatacgcaagaacttggcaaaaataggcatctgtgggtctttaagcgatagagctgagagcaaagaccagatgggtacaacatgtttgtttttttctgttgttgggtttttttttttttttttaatcaaggctggggtctcgctattttgtccaggctgagctcaagtgatcctcccaccttggcctcccatagtactgggattgcaggcatgagccaccatgcatggctagatgggtacaacttttaaaaagtaggctaatgatgaattttcataccttccgaattctttaagataggaaatctacagttgcagtactagttggtagtcaaatctcaccatcaggaccccttgttgggatagaaaaagatgtagtttctgagttttctgtctgctgccataatgtatgtcattattctttccaacccaccgtctctcccctcaagataaaaagttcatgctgaaatggttttctttgcattataccttctagaatgcacctgataatggcaccctgtacatctattataaatctgttaagattcccccatctacccttgctcttagcctcaattcctgccatgtgctgtaccttagtaactcagtaaatgttagtctaatgtctaagatcagggctttggggttctcattaaaagaaggcagcattgttcattgagggcataagagctagtgaaataaagcctccgcaaggagctttacagtccactgaatagacagaacaatgtttataaggcttggttcaggtgacagttattagaaaatcttggcagtgagtgttacgttttaaaataagtataagcatcttagaaaattttaaaactattaaaaatattcctcagcattgctaatagcttgcttatttatttaacatagggcttccgttacaagatgaggtctgtgtatgctcacttccccatcaacgttgttatccaggagaatgggtctcttgttgaaatccgaaatttcttgggtgaaaaatacatccgcagggttcggatgagaccaggtatgtgcataccctcagacagaattaagaaatttttccttcatatttttttcctccttttccactcccaacttccatactttagttggctgttgttttgtgtttgtgctgagtaaaaccagatttgttttagaattatctcttgattacacttacaactgttggtgctacttaagggtttatatcattatgtcgattacaatttcagaaagttgatacattggagtagcttgcagtggtggttgtatttaacttggcaaatgaaatcttttaaaaagactttaaatttacaaaaggtgtatataatggtgtgtatttatggagcacaatgtgatgtttcaacacatgcatattctgtggaatgactaaatcaggctaattaacacatccatcactccatttatttctttgtggtaagaacctttaaaatctaaagagaaaactacatgagtagtggttaatagcctagcgtaaatttcagctctcactgtccaccttgggcatgtcatctctctgcagcttaaaattgcaaacatctttgattaaatgagttaaagttgaaaaacaacaatgcatgcgtaatacatagtaaacacggtagctttaaaaaaaatttaaagcttagtgctttttatttgaggcagggtcttgctctgttgcccaggctggagtacggtggcgtgatctcagctcattgcatcctccaccttcgtgctcaggtgtttctcccacctcagcctccccactagctggcactgcaggtgcctgccaccacatccagctgatttttgattttttgtagagactgtttcgccacgttgcccaggctgatttcaaggaatgctatggtgcctggccccagctaatttttaaattttttgtagaggcagggtcttgctatgttgtccaggctggtcttgaacttgcaggctcaagcagttcttcccccttggcctcttaaaacatacctggctcggcctcttgatgcattttgattccattggggtggggaggggtgggaagaagggagattcttagtatcaaaataatggctgtccagaaatactctgatactagctatggtcagcaacatttaatgaaaacgcttatgttaaaaataaacccctgcctcctggcttcaagcgattctcctgcctcagcctcctgagtagctgggagtataggcacgtaccaccacacccagctaattttttgtatttttactagagatgggtttcacagtgttagccaggatggtttcgatctcctgacctcatgatccgcccgcctcggcctcccaaagtgctgagattacaggcgtgagccactgtgcccggcctcaaaatcttaagaaaaggttcttttggtgcatggagttttacatggaataaattagtgcctctgcaatttaaatattttttacacagatttgatgctgtgcaaatgccctctccccttttaggtgttgcttgttcagtatctcaagcccagaaagatgaattaatccttgaaggaaatgacattgagcttgtttcaaattcaggtttgtatgtttactatgtctaactatgcctacaagattttgtctaaatcttgtttaaaatacagtattttgctaatttttatttgattagttttttaaattgtgaaaataaaaaggtcacattctgaaattttaagtacagcacataatgaaatactttctttttaagatgggttaggctgatgtattaattgctttatcttcactcctatagcggctttgattcagcaagccacaacagttaaaaacaaggatatcaggaaatttttggatggtatctatgtctctgaaaaaggaactgttcagcaggctgatgaataagatctaagaggtaagttcttacagtgtcttaagttttattactgctctagttgaatgaagctcttaatttactaaaagacttaaactgaatttgtagtaatagaaaatggtgagttaagcattctggaacacagtaaatttgacagaataaaagatggaattggcatgcattttactacgtatagtttactatgaatcagtaagtcatagtcttgaggtatgttttagattatttagaatagtacagaaaaaagattagtactttcctgggcaagtgtattgatggggatttacagattttttttctttttttacagttacctggctacagaaagaagatgccagatgacacttaagacctacttgtgatatttaaatgatgcaataaaagacctattgatttggaccttcttctgaaaaaaaaaaaaaaaaaaaaaaaaaaaaaa

SEQ ID NO: 24486 - DNA, 4109 bp, Homo Sapiens
gcgcttccgagtggcgactgcagcgggtccggtgcaggtgaggggcgcgcgcctgcccagctttgcagcccccgaacgcggcctcgcacaggagtcattgcagttttcagtagaggtgtacttctgagaagtggcttcttgggtcttcatgcagccatggatctggataaaccatctgtttggggctcattaaaacagcggaccaggccattgttgatcaacttgagcaagaagaaggtgaaaaagaacccaagtaagcccccagatctacgggcaaggcatcacttggaccgccgtctcagcctctctgtgcctgatctcctggaggctgaggccttggccccagagggccggccttactccgggccacagtcttcctacacctcggtgcccagcagtctgtccactgcagggatctttcccaagagcagcagtagctccttgaaacagtctgaagaagaattggattggagccaggaagaagccagtcacctccatgtggtggaaacagactcagaggaggcctatgcctctcctgctgagcggagacgggtgtccagcaacggcatctttgatcttcagaaaacttcccttggaggggatgcaccagaagagccagagaagctatgtggaagcagtgacctgaatgcttctatgacatctcaacattttgaagaacaatctgtaccgggggaagccagtgatggcttgagtaacctccccagcccttttgcgtacctcctcaccatacacctgaaggaaggccggaacctggttgtccgagatcgctgtggcacaagtgatccttatgtgaaatttaagctgaatgggaagacgctgtacaaaagtaaagtcatatataagaacttgaacccagtatgggatgagatagttgtattgccaatccaaagccttgatcaaaagctacgtgtgaaggtatatgatcgagatttaaccacatctgatttcatgggttctgcatttgtcattctcagtgatcttgagcttaacagaacaactgaacatattttaaaactggaagatccaaacagtttagaagatgacatgggagtgatcgtcttaaatttgaacctagtggtaaaacagggtgatttcaagagacacataagtgggaccttctattcttttgaaacctctcattttgtcgttttgaaatggctcattgcaattgtcccttgatagctagcagatgactgatgtttttgcaattattttagggggggtgcaacattttatggagtcttaaaatatctgttttttaatacaatgctcttctttgaggaaccggaaaggaaatttgttaaggaattatttcttttgtgttattaagatgatcaggcatacatttgcagcattttggtttcttctttcttcttttacttttagctaccaagttttccattgggagttcttttgggaagatacaaattttaatgttctctagtctagtacatgcaaatttctagttgatacagtacctatcaaagatgtctgtaacatcagtgaagcattagactttgtcacaatatgattgggactcttcttttgagcaaaaatgtggatacaaatcataatcttattttatttgggattatattttataattctaaggctatattagaacaaaagcatctttgatgatgacttatttgaaaagtatttttgaagccaattgaagtacctgctttttaagatgtgttataatttagcatgtttataatccaatataaaaatataaagcctatttataattaggtctccagtaatgcttcttgaattgaggcagtggggtgggtgaggagaatatttttcttttgacatcacttatgcttctagttgtagctttttatgatgaaaaccgtgattgatttactagtaaactcagagaagatagcttaaagcagtaggaaaactgtagtgtgacttttcagttaccttttcaaagattcaactaaatatctgctatttttaatttgagttccttttattacttctttttaaaaagtggcactgttgacacttgtgacctcaataaaagagatattttaatgttaaaatgtcttaaattaatgttgaaaataaaagtattttttctcatcccacctaaagaaggagggattttctttagcttcttcttgatcttgacagcattgctgctgcatccgtgactctggattcagtgtcagtgatacagtaggtgaccggtgacttgagctgggggctaggttatagcatgcaatgtaaatagttatttgtcatgtggttgacaacttgccagctgatatcgtcaaaaaatttcttatatattcaagtggggcttgtaaaggtagttgatttctccatgaaaatagctgcatattcaaatgactgcctttgtgaagttttctatagcatattagattatgtttagcagtaatattggcacttaaaagatatttaatattgtcaaaatttagagttttaacataatgccattttagtttcaatttatttcaaattgcagaacagttaatactagacacagcttggagctgtttttgtaaaagatctcaaagagactatgttttcagggctcaagaatagccatatttcctcttagtgtaggcctggtttcctctgactccccacctcccatgttgaagactttgtcagaatgtctgtccgctcactcatgtgcttccttattttcttttgtctttgtctggcagacgcctagtgtacactatattgattatatatacacacacaaatatatttttatccccatatatacacacacacacacatatatatttatcttatatatacacaaatatatatttgtctccatatatgcgcatgtttatctccatatatacacatatatttatctccatatatatacacacatacatatatatctctatatatacacatatatatttatatatacacacacatatatggatacatgtatatatacacatatgtatggatccatatacatatatacacatatagacatatatgaatacctatatatatgtacatatggagataaacatgtatatatataacatatatatatataatggaaatatagacaactgcctactcttatctcttctgattggtagtttttttccatttatatatttgatcaaagaaaattaattgaggaataatttattctgggccatgtgtggttattcagctaacagtgcatattgggagccttggggtaaaatagattatcagaatctttgttcttttcattgagtttgagttaatatttaaagagatttttatattgggattttaagtgggaataactagcacttgggactggaaatcagtagattatttgagtgagataatttgtttataaatttccattttaatttaaactctgatggagagatttcagtttaaattctcagttttttacccctttttcttccagtcatctttgaggtagcctttgttgctttagaaccaagctgacaaaaatctcagtatgtacaaaatgtttatgaatttactcttgtgtccagggacttaaatgtatatgagaatggtgcaggcagaagggaagacactggctacaaggctgacaaacatactctgtgttctttttttgtggcaaaaaacaggaaaaaaatagtagctaaaattaggagctctgttctcagactgcctgggtctgaatcctagatccaccagtggtctggttaactcaaagaattatttaacctctctaagctataatttcctcatatgtgaaacaaggataaaaagagtgtctgttttatagggttgtgaagattgaaattatcaaatatggtgcttggaattgggtagagacactcaatatatggtagttggtagcattgtaggaagtgaatagtaatagtcattttccattaatttatttacatgctttatcttgtgtaattgttaaaaaatatcaaatgcgttcctatgtgtcaaaaggcctaaatagccctgtgtacctaaaagatggtaattaattttggtggttggtttgggtgaaaatatctgtcactatttcaggaaaatacaaaaaaaaaaaaaaaaaaaaaaaaaaa

SEQ ID NO: 24487 - DNA, 7204 bp, Homo Sapiens
agccaatgaacttttgcttactgaaagagcttatgtcaaccgacttgacctcttagatcaggtattttattgcaaactgttggaagaagcaaaccgaggctcgtttccagcagagatggtgaataaaatcttttctaatatttcatcaataaatgccttccatagtaaattcctcttgccagagctggagaaacgaatgcaagaatgggaaactactcctagaattggagacatccttcagaaattggcaccattccttaagatgtatggagaatatgtgaaaggatttgataatgcaatggaattggttaaaaacatgacagaacgtattccccagttcaaatcagtggttgaagaaattcagaaacagaaaatctgtgggagcttaactttgcagcatcacatgctagaacctgttcagcggattccccggtatgagatgctccttaaggactatctaaggaaattgcctcctgattccctggactggaatgatgctaaaaaatcacttgaaattatatctacagcagcaagccattctaatagtgcaataaggggaatggagaacctaaagaaactcttagagatttatgaaatgttgggagaagaagaagacattgtaaacccttcaaatgaactaataaaagaaggacagatcctcaaactagctgctcggaacacttcagcacaagaacgctaccttttcttattcaacaacatgttgctgtactgtgtgcccaaattcagcttggtaggctctaaattcacagttcgaaccagggttggcattgatggaatgaaaattgtagagactcaaaatgaagaatatccacatactttccaggtgtctgggaaagagagaacactggaactgcaggccagttctgcgcaagacaaagaagaatggatcaaggcccttcaagaaaccatcgatgcttttcatcaaaggcatgaaaccttcagaaatgcaattgcaaaggataatgacattcactcagaggtttctactgctgagctagggaaaagagccccaagatggatccgagataatgaagtgacaatgtgtatgaaatgtaaagaacctttcaatgcactgacacgaaggaggcatcattgtcgagcatgtggatatgtggtttgttggaaatgctccgactacaaagctcaacttgaatatgatggtggtaaattgagcaaagtttgtaaagactgttatcaaatcataagtggattcacagacagtgaagaaaagaaaagaaaaggaattttagagattgaatcagcagaagtatctggaaacagtgtggtgtgcagctttcttcagtatatggagaagtcaaaaccttggcagaaagcttggtgtgtgatccccaagcaagaccctcttgtgctgtacatgtatggtgccccccaggacgtcagagcccaggccaccattccacttctgggctatgtggtggatgaaatgccaaggagcgcagacctgccacacagtttcaaactgacccagtctaagtccgtgcacagctttgctgcagacagtgaggaactgaagcagaagtggctgaaagtcatccttttagctgtcacaggtgagacaccaggtggtccaaatgagcatccagccaccttggatgatcatcctgaacctaagaaaaaatcagaatgctgaactcctccaggaccagccatggtgtggaggtctcaggacttacagctcaagacattcccagctcttcttacacatctgctagcactttatgttgaaaaatataggcccataaatgcatcttttgaggactattttcctatgtttatgtactcttagtgaaattagtgtgcagagtcattctaccgataaagttttgaaataatgtgaaaactggagcattttttgagctattccttgaatatgtgcttttttgtcttgaagaaatggtgtatcaattgattctgtcaccgtcaggttagaatgagcacttccatttaagaaatcctttcatgtcttcttctctttcacatgtaggacctggaacagtttgaaagatatacctccatgttgccaaaatagatccatggtgaaaaatacagggacagttgaggctattgtattaacttatttaatttagtttataaatctctagctgcataaatgatgtctgttcttttaaaacaaaagaaaaaggacaaattgttggtgttcagatttccgatttataaagaaaagataacttgtttttgtagaaatactcctaagaatgtcttaagtatatagcaattatgtatatatagtattaaatatatatattatacatgcttttaggttcacattcatctctaatttattttttaaatataaagcatggtttatcgtggaattgagcaatgttctaaactgaagaaatgttttggtgatttatgttttgctgattggcatttgagggtattgatatttttataataagcggtaatttatgtggcatgggatatatttgtgaattccaacagtacttttaaagtaccattttttgtttctgtgcctatttaaaacagtgcctctcttagaaggtgctattaatataagatgagggttcagttaatgcttcagtcttgattattctaagattaaagtgcattttggtcactgggacagtcaaagtcatacaggttattttaccgtttacaatcctataattattgcagtagttaacatcagcatgtacaaacattttcaccaaaacccaaactttatgagacacctgaccttttacagaactaggatatgtggaaaccacatttatcgtaatgtttttcttttccgtaagataatcgagcatggttaaataaggtctctatataatgaacacttaagataactgtatgggccttttcctttgtcggaatgaaacaaaatccacatgtgataacctatgtttggggtgggggctggtcacatgattccttgtcatgaaggctgctcttcactcttttgtacttgtgattaaaatctcacactaagtttactatttaacttaatcctttttctcaaattaaacctttttttatactgtcataccccaaacattgtcactttttaatgtaccagtctgctagaaatctacaagaatgatcccactatctttagtatgtaaggattacaccttagatatagaatagaatttgagactgccacacatttattcaggccttgttactttaagaaatatcttattttttccaccccaaaggagcaagtgaaccaattattgctgacataataggttcccttcctccataaaaggattatcagccatgatcattaacattaaaccaaatagatggagccaaaaagagataaaagtagcttcttaggccctattaaatcagggaaagactagaagaaaatttacattgcttctcttttttaatggccagcggggtatgtgtgtgatgtatactcagagtggttttttggaaaattaaactgtagctatagatgatgctttggttttcttaatctcaagaaaagagaagcaatggaaatacagaatgattaactggggaagaggacttttgtaagtgtgactagaacaatggtaatgtatgggccaatgggaagatttatgagtcagattatttttgaaaactatttttaaaagcaagaagactacactttccctaccaaaacagaagtaacatggacacacttaagttttggctcaataaatatcaatgttatttaacttagatcattgaaagaatactcatgtaaagataatgtttattatcatgctcttaacagtcattatctttaattttttaaatgagaagcattaatactagaagagaatttctggttatccggtcaccatattcactttccaccccacattcttcagctaaacgcaaagagaagcagtgaaacagccttacccgcttctctcttattaaagaatcactgatgtttttactcaatgaaaggtaaagtaatacccttagccatttattaaacaattcaaccaagagacctcaaagtgtgattgatgataagaataatcaatgccttttcccttccaacatacttgagcagtcatgacaacctaaaaatatcattggttgctttcccattaaaaccaacgttccctgtgggtcttaattctttattttcactcatttggtgctttccaagtcatcttttctttaaagtgcccttcctccaaactttaaaaagtacttccttgacaaaatttctattcattataaaacatttcaatattttaagcttaaattttgcttttgctgaaagcctaccatttggcgtgttaagtatgaaatatagtgcagacttttatcttggttttaagtggggctcaataaaaaacaccagccacttttgtaataatggcatcacagtgtcatcatgtatgcaagcaataaaactctttagggtatggttttatactgaaaatttaatatgaaggccccttcccacaagaatatagataattattaactttctagatgtgatacggtaattcgaattgcagagtataaggaagggaaatgggaaggggcatcattccttggattttaaataactatcaagaacatttttactttaacaaagaaaatggatagaaaaagcacattttgttttccctgaagtttaatttgacatcaggtttgtgtacttatcttcactaggtgacttaacttaccccaatttttttaaaaattattaaactttttacagaaactaaccttttaaatgtaccctttccccatatatatatacgcacacgtttggattttttttttttaagaacacttgttctagttataaatatataaagaaaacgataaagtttgtggtactgcagggttgttaaagattctttgatgccttctaaaaacttttgtcaaatacttttgagttcacaattctgttttacttttccttgtccttactttttggaaacagggtggttgcttttatttgttttctggttatattcaaagccttaagttcttaatctgagcatattgtctgtgataaatttccgatgatctttctggactagatacaacctgagtagcaagcaccaaccggagcaagtaaacttctagggaacaagcgtcttgggttttataggtatctttgctataatgcagaatagattaatgaagatttcctatatcatatgatatttgtgttagtgggtctaagattaagcacatgatatttataagctaaaattaactcaaaagtcaagaatgtcttaatgttttcattcttaaattttgtattctccaagaatgtattagtatatgaactgtggccaaccagttcctattcttcagactgtattgacatctgtagtggatcatgttgcttcttcattcttaccaattttattagaatcaaacttcttgttatttgcatactattatctactatagattctcagctttagaaaatgactatgatacataaagaccactaggtcaacttaaaaaaccctttctgtgaatttatacatgtatgtatatatgtaaaaacactgttgatttgcaattctgtctttccatagaaatgaactttttctatcgaaattgtttaacttaaatattttaacataaattatttacatggatctttatgtataattcatccttatatataccccttaatcacgtagtcatgagaagataactttgctttctttacagaaagggcagagaggaataagataagaaactgaaacaagcaagaatgaagagagatgtgggggagagactgctggtctccagaccacagcaatgtgttttaagataagatgaaatattttaactgcagaagggatataaaatctatgtaattacatgctgatgggatccattgcacccaggtttttgaccttggcctgtaaatgctagactatgatatcttgttattctttttctcctttgggcttttaaaaaataatttcattctcagatcattttctgtactgtttactgaggcaaaaaaaaaaaaaatctgaagtcaatcatggtcttctactttctggactgagcatttggcagaatgcagtatcttttcctgtattttgacatgaaatagcacatggcttctacaagatagttttaacttgttggggtcaccgggagttatatgatggtcaaccccttttcccaaaattcattgtggtagttttagtggaaaacgtaaatcaagaaatctcatatcatactttaataaataaataccaaatacatagtgacatataggtttgggaagaaactagtctgtggggaccattataagagaatcacattatatattacacagtatatggatattggaatgtatcacttgtggggggttctcttcattagcaaaacagtcatgtctgtctgtatataagacttttttttttttaaccaaactagcatttcattttgtgagtgacaattgacattttaaaataagcataggccgggcatagtggctcatgcctgtaatcccagcccttgggaggccgaggtgggcagatcacttcaggtcaggagtttgagaccagcctggccaacatggtgaaaccctgtctctactaaataaaaataaaacaaaataagtgtatctgggccaggcacggtggcccatgcctgtaatcccagcactttgggaggccgaggagttcgagaccagcctggccaacatggcaaaaccctgtctctacaaaaattagccaggtgtggtggcacatgcctgtaatcccagctactcggggggttgaggcaggagaattgcttgaacccgggagacagaggttgcagtgagccgagattgcaccactgcactccggcctgggtgacagagcaagacttcgactcaaaaaataaaataagcgtatctggatttttcttttgaattcttgactgataagtttgagaatgtatgtttttggaattttacagttgactcaagtgtgaaagtatacacaagtaatttttcttttctagctatgtgaatgtaaaatacttgcagataatgtatatattgtgtaatatatgtatatttggtcataaaagcagataattggaaacattgtaaaattaagcactttaattcctattaaatattaaacatttgtatcttgtaaataaacacatccttaaattaaaaaaaaaaaaaaaaaaa

SEQ ID NO: 24488 - DNA, 4930 bp, Homo Sapiens
gaggagggcgaagactccatccgccatgttggatgccgcagattcgccataacctcgccggctcttttcttaaaaaaataaaaataaaaagcgaagcgtcagcagggcgccccgcccccttggtcggcacgggagggggcccggaagagcccgaggcttttttttcctccgcggtggggcgttgccatggagacgcgggcggcagaaaacacggccatctttatgtgtaaatgttgtaacctcttctcaccaaatcagtcggaactcctctcccacgtttcagagaagcacatggaagaaggggttaatgttgatgagattattattccccttaggcctctgagtacacctgaaccccccaactcaagcaaaaccggagatgagtttttggtcatgaagaggaagagaggcaggcctaaggggtccacgaagaagtccagcacagaagaggagctggcagaaaacatcgtgagtccgactgaggacagcccgctggctccggaggaagggaacagcctgcctccaagcagcttggagtgtagcaagtgctgtcggaagttctccaacacgcgccagctgcggaagcacatctgcattatcgtgctgaatttgggtgaggaggaaggagaagcaggtaacgagtctgaccttgaactagaaaagaagtgtaaggaagatgatcgggaaaaagcctcgaaaagaccacggtcacagaaaacagagaaagtccagaagatctcaggaaaggaggccagacagctttctggggcgaagaaacccatcataagtgtggttttaactgcacacgaagcaattccaggtgctaccaagattgtgccagtggaggctgggccccctgaaacaggagctacaaattctgagaccacttcagcagacctggtgcctcggagaggctaccaggaatacgccattcagcagacaccttatgagcaaccaatgaagtcaagcaggctaggtcccactcagctcaaaatcttcacttgtgaatactgcaacaaggtcttcaagttcaagcactcgctgcaggcccacctgaggatccacaccaatgaaaagccatacaagtgcccccagtgcagctatgccagtgccatcaaggccaacctcaatgtgcacctgcgcgagcacactggagagaagttcgcctgcgactattgctcgttcacctgcctgagcaagggccacctcaaggtgcacatcgagcgagtgcacaagaagatcaagcagcactgccgcttctgcaagaagaagtactctgacgtcaagaacctcatcaagcacatccgagacgcgcatgacccacaggacaagaaggtcaaagaggccttggacgagctctgcctgatgacgagggagggcaagcggcagctgctctatgactgccacatctgtgagcgcaagttcaagaacgagctggaccgcgaccgccatatgctggtccacggagacaagcggccttttgcctgtgagctctgtggccatggggccaccaagtaccaggcgctggaactgcatgtcaggaagcaccccttcgtgtacgtctgtgccgtctgccgcaagaagttcgtcagctccatcaggctgcgcacccacatcaaagaggtgcacggggctgcccaggaggccttggtcttcaccagttccatcaaccagagcttctgcctcctggaacctggtggggacatccagcaagaagctctgggggaccagctacagctggtggaagaggagtttgccctccagggcgtgaatgcactcaaggaagaggcctgtcctggggacactcagctggaggagggccggaaggagccggaggcccctggggaaatgcctgccccagctgtgcacctggcctccccgcaggccgaaagcacagccctgccaccctgtgagctggaaaccaccgtggtctcctcctcagacctgcattctcaagaggtggtttcagatgattttttgttgaaaaatgatacctcctccgcagaggctcatgctgctcctgagaagcccccagacatgcagcacagaagctcagtccagacgcaaggtgaagtgatcacactactgctgtccaaggcccagagtgctgggtcagatcaggaaagccatggcgcccagagccccctaggggaagggcagaacatggctgtgctttcagctggtgacccagatcccagcaggtgtctcaggtcaaacccagctgaggcctcagacctcctccctccagtagctggtggtggggacaccatcacacatcagcctgactcttgcaaagctgcccctgagcaccggtcaggcatcaccgctttcatgaaggtcctgaacagtttacagaagaagcaaatgaacaccagcttgtgtgagcggatccggaaggtttatggagacctggagtgtgaatactgtggcaaacttttttggtaccaagtgcattttgatatgcatgtccgcacccacacccgggaacatctgtattattgctctcagtgtcattattcttccatcaccaaaaactgccttaaacgccacgtaattcagaaacacagtaacatcttgctgaagtgtcccaccgatggctgtgactactcaactccagataaatataagctacaggcacatcttaaagttcacacagcactggacaaaaggagttattcttgtcctgtttgtgaaaagtctttttcagaggatcgattgataaagtcacatatcaagaccaaccatcctgaggtctccatgagcaccatttctgaggttctcgggaggagggttcagctgaaagggctaattggaaagagagccatgaaatgcccatattgtgacttttatttcatgaagaatggctcagaccttcagcgtcatatttgggctcatgaaggtgtgaagcccttcaagtgttctttgtgtgagtatgcaactcgtagcaagagtaacctcaaggctcatatgaatcgtcacagcactgagaaaacccacctatgtgacatgtgtggcaagaaattcaaatcaaaagggacactgaaaagtcacaaactccttcacactgcagatgggaagcagtttaagtgcacggtgtgtgactacacagcggcccagaagccacagctgctgcggcacatggaacagcatgtctccttcaagaagcgtagcattgctctgtaatttggaaaccaagtcaaagatgtgtaagaggatgcagacagaagaaaaggcacgatctttgcataaaagcactggagtgatttagaggaaggcttgcaggctttagggacacgtatttttgctttcagatcctggattgctgcagcctttccgctgtgcccattgccattactcctgcaacatatctggctctctgaagcggcactacaacaggaagcaccctaatgaggagtatgccaacgtgggcaccggggagctggcagcggaggtgctcatccagcaaggtggtttgaagtgtcctgtttgcagctttgtatatggcaccaaatgggagttcaatagacacttgaagaacaaacatggcttgaaggtggtggaaattgatggagaccccaagtgggagacagcaacagaagctcctgaggagccctccacccagtatctccacatcacagaggccgaagaagacgttcaagggacacaggcagcggtggccgcgctccaggacctgagatacacctctgagagtggcgaccgactggaccccacggccgtgaacatcctgcagcagatcattgagctgggcgccgagacccatgacgccactgcccttgcctcggtggttgccatggcaccagggacggtgactgtggttaagcaggtcaccgaggaggagcccagctccaaccacacggtcatgatccaggagacggtccagcaagcgtccgtggagcttgccgagcagcaccacctggtggtgtcctccgacgacgtggagggcattgagacggtgactgtctacacgcagggcggggaggcctcggagttcatcgtctacgtgcaggaggccatgcagcctgtggaggagcaggctgtggagcagccggcccaggaactctagaggacatgtggcatcggatggccacagggcggggctgccaggctctgcaggcacccagggtggggaggccacccttcctgccctacccgcagaatggtgctctcctttgccctccctgcccagcagcctgataggactctcctagtccaacttggggtgggcaaggcagtcagcatcaccagcaacaccacaggaccctcaccccagcatagacacacaccccctgacccttaccatctgcttcctgaaagacttcagtgtcagctcccctacacacaccccacaccttcaccccttgcttcaagattcaaacagagactcccagtccccctcagcatcttccctgaatcacagccccagctccttgacccccatctaggtgccaaatgttcatctgcaaccgctatgcagtctggtgagagggagacagccatcacatagaaagtgaccgtacgggtttttaatcactgctgggtggggtgggggtagggggattgtcctggctttgtcgacaaagtcccacttccccgagtattaagggcccttggtatcaagtgaggtaaattcacccatcacagggtctcgccctaccatcctggaattatttcacttttaagataaatgcactatttcactgttcgcctcccattctaaggaggtgaggtggttggaataaaaacagttcctgtcaaaaaaaaaaaaaaaaaaaaaaaaaaaaaaaaaaaaaaaaaaaaaaaaaaaaaaaaaaaaaaaaaaaaaaaaaaaaaaaaaaaaaaaaaaaaaaaaaaaaaaaaaaaaaaaaaaaaaaaaaaaaaaaaaaaaaaaaaaaaaaaaaaaaaaaaaaaa

SEQ ID NO: 24489 - DNA, 7217 bp, Homo Sapiens
aatcatttcagtcttgccttataggtatactccctttctacaaagttcttccccacatttttcattgaggaggttcacaacatcctacccaaacctggttctgggtatttttgtcactgaagtcattcataatgcctctccactctcttttcctgttctatattctgctgccaaatgttcttctgcctggcaaatctttgtttacattttgtcttgctcaaagatgagaactactagcttcttgccaactttcttgtcttcttcctctacctctccctctgtctctgccccatcccgctctcctgcaccctgtgcccaaatctgtttcaagggcctgtgtccaaaatactccattttctaaagtatttgttccttcctggggtttatcttagaggtatattttgattcatcacaatatactatatgtgtagttttttgcattgagctgcattttctgcagctgtggcatgttgtagccttctcatctgctgtgcaatattgaagcaactgaaaagacaaaagacctgatcagttttttgatagttcaggaactgtcatgctgcaaataccaattgttagggaagggagacctcaggtgtatgaatctttgaactaaattaaattgtatttcctactctccataactttaaacgtgatgcaaaaacatcgtatgatgtttaagtgtttctttgtctagcctctttcttcaagcaaatgttgagtcttttaattgaacttatttttagtgttctcatgtggataaatttccctaacagtagtttgccaaagataggatagcttctcttgtgatgtatactaatgttgagtttttaaaggcttggttgtcccctttatgctttcaaccttggtcaggcttggaaaggtagattcaggattgatttcagctgttttttttcctgcggtatatgagtctaaaggctcatctctaccccataagcctgggaagcaaaggctgcagtgagccatgattgtgccactgcactccagcctgggtgacagcaagaccctgtctcaaaaaaataagcaaataaataaataaatagaaaaaggcctagaattttatacagtgcctcctcctctgttctcttaatattggtattgtgaatttctgtgtaactcactcttttctcccctaacagggttgttggtacagaggaacgtattcctattcccctcatggattacatccttaatgtggtaagattcaacacagggcaaactgagtaaagatgtatatgtgcttttctggaaaatgtgtttcgttatcagagtccagtaattaccgtattcattttaattggaatccaattaagaggggaaagatgtgccacccttttgtttttgttctagactggtttgccagaaattagccaacacaagccccattattttgtattccagatttttttgttcactgttaccattctccattagaatccagacaggaatctgtaacaggttttgttttgccagtctagtacaggctgatcatcccaaatccaaaatgctccaaaatttgaacctttttgagtaccaacataacactgaagggaaatgctcactggagcattttcagcctgtactgtataatgcaaatattcaaaaataaaaatctgaaacactcatggtgcccaagcatttcgaatatgaaatatacaacctgtaatatgttttccaaatgtgtccaacatatattttcccccttttttcccattacttcctgggtatctcaccaaaaaagtgaagagtttgaattttcccagaattgtttaccaataagggagagacctcttagcatttgtttcagcctactaatcacttccaagacttccagagatagtttgtcttgtgcctgtgtgtttattgcccacattttacttttttactcttaaaaaaattctttgtttgaaacaaactcttccagagttcagtgtttcatttgcattatgcgtttcatttgcattataagcacatttgggggaaattttccatgatgtttgcctgcaggagagaggtaggcaaggagcactaaatagcaaattaagagattaaacatgattgtaccactaattcataatgtggccctgagcaagtcacttaacttctctgttatctcgaaatatctgattcttggtgtgcttgaaaatggagattgggcagaaattgtagatattctttacttcctggatgttttagaatccgtatcatacatctggtttatctgaggttttgatactctatagaaaacactaatatcatgactagaaggctaccccatccttattccaggctggccatttagttccacctgtcaggctctaacttctttaaaaaatttttattacctagatgaaatttgtggaatctattctgagcaacaatacaacagatgaccactgccaggaatttgtgaatcagaaaggactgttgcctttggttaccattttgggtcttcccaatccgcccattgactttcccacatctgctgcctgtcaggctgttgcaggtgtctgcaaatccatattggtaagaagcatctggccaaatgttttcatttctttctggaaatcaattttgcgatacttctgtatatatgtttttactatggtctcccttcaactaaaaaaataatgaataaatttgtgttatgttgtataagtgaattttgtgactaatatatagtgtgccatgttatttctcattgaaaagtcaaagtattttttctttgttcatcggttgggtatgtagttctacatcattagagtttattggagggaaaagtgtatctccaagaaagcttttctagttgggttttattagtacctctcccttctttgttataggtgcattttaaacacattttatgtttatggttatgtttaaccatgtattttcctcccctttcaagcttggtagtcatgtattttaagcataattgacatgtagttcattgccgatacttaattccccccttttcaagcccgatagtcatgtattttaagcataattgacatggtagttcattgctcatattttgccaaaaatgaagcttctttattttttcatagtggtaaactacacataacatgaaatgtatcatcttaaccattttgaagtgtagagttcagtagtgttatgtgtattcatattgatgtgcagccaatctccagaactcttttcatcttgcaaaaatgaaattctgccattgaacttctcatcctcccctctccccagaccttggcaactaccattctattttttgtctctaaatttgactactctaggtaccttatataagtgggatcataaaatattttgtatgtgcgaccggcttttttcacttagcataatgccctcaaggttcaaccattatgtagcatgtgtcataatttccttcccttgtaaggcctaataatattccattgtgtgtatataccacattttgtttatccattcatctgttgattgacacttgggttgctttctccttttggctgttgtgaataataatgatgctgtgaacatggatgtacatgtaactctttgagactctacttttaattctaattttcccacatcctagccaatacttattttctgttttttgataatagccattctggtgggtaggaagtgtatctcattttgtttttcactggcatttccctaatgcatagtgataatgaacatcttttcatgtgcttgttatccatgtatatatcttctttgtagaaatgtctattcaaattcattgttcttttttaatcgtgttatttgttttgttgagttgtaagagttgtgtattcttgtacacgtattaatacctgatactaatttcttctcaggtatatgatttgcatatatttttcctgttctgtgagttgccttttcttggttgtctttggattcacaaacatttttaatcttgataaagttcagcttctctttttttgtttttgttgcctgtgtaaacacctgtgtttttggtgtcgtgtccacaaaaccattgccaaatccgatgttttgcagctttcccactgtggcttcttctaggagttttataacttagctcttatattcaggtctttaatccattttgattagattttttatatggtaaaagtctgtcctttcctattgcatggtcttggtacctttgtcaaaaatcatttgaccatatatatgtgaagatttaattctgggctctctattctattccattggtctttacgtctgtctttatgccagtatcacagttttgatcactgtaactttgtaatagaaatcaaaaagagtgagacctccaaaaatttttccccaacttgttttggctatttggggtcccttaagatttcatataaattttagaagggatttttctatttctgcaaaaccaaaacaaaaaacagcattggaattttgatagtgattgcattaaatctgtgaaactcctttgttagctgggctgcagagtgataagtaattcctgctgaatgagaaatccatttgcttacagacttggaaagatccataattgtgacgtgacttcatttagtttattttgttttactctttgaaatattgaattaaatgctcttcatcacagagaggggaaaatatcctataagatgctgtggaaggatagatagatttatttaaagccataggaaggcacatgatttctcctatctttgcatggcaagtgatggtgttttattgtcagatttttctccagacttgagaggaaatcacaagggtcgtataatccttgggttgtctgataaaaacaaattgcctacctgattcctatctcagaataatcgcttttgttttaagaagaaaagaacagtgtaatagtgactcacttccatgctttggaactttgcctaacattgtttcctatcgagcaaaatttggaattaatcctatagtgtagaatccttgccgtaacagtattcagtttgaccatcataagcttttaagtgttattggctcaccaagtttgaaagtagtgtgttgctctagaaagagatgttaaggtatgttgtacctgacttcatatttgggttccaccatttaccaggtgagagaccatggccatatccaaaatctgagaggcttccatttaattgtcacttccattgtgactattaaaagacatgatgaatttgaagttcattgtatattaacactttaattattcttcctgtttcagacactgtcacatgaacccaaagtccttcaagagggtctccttcagttggactccatcctctcctccctggagcccttacaccgccccattgaatcccctgggggctcagtgttgttgcgagaactggcttgcgcaggcaatgttgctgatgctaccctctcagcccaggccacacctctgctgcatgcactcactgctgcccatgcctacatcatgatgtttgttcatacttgcagagttggacaggtaaaaataaccttaggggtgaacatattaatttaaaggcagtgaaatatctagggcatacacctagcagggttactatgcttgaaaggaggtctgcctgaggtagcagctaaaagaacagtccaatttaggatgagatttttttgactgtcaaaaagttgagtgactatataacttattatgtgatgaagtggactttcttgagagcgaaacatgttattacagacaaacatcaattgggtattcatctggccttagtactttctaatctttccaccagtccttataggtctgataatgggatggcataggtaggacattttaccaaagaacatttaaatcaatagtaattaacaaattactaaaaattttctacatatcaaacgtttgacctgtaatccataatccatagttccagaaagaaggcattttgtgtatgtcctcacagttttactacatttattcctcagataattgattctaaagatttatggtatcaacattaaacaaaacagggttcaacagccctgttttatgctattgagcaggagtgtgttctctgttaattgtgaatcaatcaaatctgaagtttaaaaaagcacaagtataaaggatttagaaaattaaattacttaacaaagcttagggattgatttttatgacttctttattaaatgaaataaaatgaaaatgaagcattcaaggaattaaataaatctaggtacttactgaagtaaagaaattgaatggaaataataatacccctaccaaataatttagaaagtagttaatgaacctgtaaaaccatttctttgattcagaaaaaaagagtagcctctgatgcctttctttcactttataaaaaacaatgagaacggatgttgtggaaatagtttgtaaatattgtaagaggataccttgtggaactgtcgtcttgagtgtggacattttgatgaggtggataactctgagaatagcaatgaagaaaaatcccttacccttataaaactgttgaaggtcaatttttttttttaagtataattgttcagagaacatcccaaaggtgaaattcttgttatgattgcagagtgaaattcgttccatctccgtaaaccagtggggctctcaattgggtctgagtgttttgagcaagctgagccagttatactgttccctggtgtgggaaagcactgtcctcctctctctgtgtaccccaaacaggtaagagaatggctctctctcttattactttgttatctaagttcggtgagcctggaggattgctttggttggggataggagggtatggaagagagttcagaggcctccttgtccttccctcttcccagcctaggaacttgatgacaaatgctttgtcgtcatggtagatgtttaaaatgtgttcctgttattagccagatacaaaaaattgagttgtggctggacacggtggctcacgcctgtaatctcagcactttgggaggccaaggtaggcaaatcaagaggtcaggtgttcgagaccagcctggccaacatggtgaaaccccatctctactaaaaatacaaaaaattagctgggcgtaatggcgggcgcctgtaatcccagctatttgggaggctgaggcaggagaattgcttgaaccccggaggtggaggttgcagtgagcccaagatcatgccactgcactccagcccaggcgaaagagtgagactgggtctccaaaagaaaaaaaaa

SEQ ID NO: 24490 - DNA, 5601 bp, Homo Sapiens
gagatatgtgaagatctctgtgcttggacttcccaagtcaatacatatttgcctctatttttattcccctttggccattgcagtcgagatcaaggagggaggcccagactcttcaggacacttgctcctgcagcaagcagaagtgaggcagctgcctccctcccaaccttggaatcctttctacccctgactctcaatgatgtgaacaggaaataaaggaatcttttattttgcattcattggccttataaaacccttgctaattttgtaaatgtaaagaaatagtacttttagcataagcactttctgtgtttccatagaaaatggattagattttccattaattattttaatgacaaaagatgtccattttcttcaaggaagtattcagaaaagtggattttgccagatagcctctgtctgcctagtgagacatttttgagttccctattgattgtaaaaggaatatcatagtgctcttattatctgtgtttgctcacagcaattctccttctacagaggaagctaggattgaaagaataactgctaccatatacagagtactccctgtcagaccctgacccaagggcttccataccttgtctcagtcaatacccatgacagccctcccagggaggcgcttgtcaccctcattctactgatgaggaaactgaggctacacagagttaagtaatttgcccagggtcacacagggagtaagtggcagagccaggatctcaaacatttactcttttttaaatattaacttcatttttaatttttgtgggtatgtagtaggtctgtatatttatggggtacatgaggtgtttgatacaggcatgcaatgcataataatcacatcaagtaaaatgtggtgttcatcccctcaagcatttatcctttgtgttgcaaaccatccagttctactcttccagttatttaaaaatatacaattattttgactatagttaccctgttgtgctatcaaatactaggtgttatccattcttttaagctattttttttttaacccattaaccatccccacctcctgcccacccccgctacctttcccagcctctggtaaccctcctactctctatgtctgtgagttcaattgttttgatttttacatccaaaaaataagtgagaatatgcaacgtttgtctttctgtgcctggcttatttcacttaacctaatgacctccagttccatccatgttgttgcaaatgacaggatcccattctttttatggctgaatagtactccattatgtatatgtaccacatttctccagacatttactcttaatcactgcattaatatttggttgcatagtgactgagtcagaattttttaaaaaaattaaaaatcaacaaaatttgggatacttaaaacttactgaatagaatctatagttgtatctaaatttgttattactagttatgggccatacttgattcagagcatgacttattatagttcaaagattggtttctttatgccactgtagaccaaaggtatatcagcttattcagaataattaaagttatgtttctgaagagtcagaaggtgaagtttgttagtccatggcctaggtacaaagcagtgtggatcagtgctaaaggaagaggcagccgggtgccaggaagatgggaggtagctcttggcaacagagggaagactgaagaagatgtgatgggaggagagtcaacttcctgggtcacactgaggtgtcgggtggcttcctgttgaggatatatggcaaaacccctgctagttccccaaatgggagtttgacctggtttaaaatgggacagcagggcacaggagtagtcagaactgagaaaagagagctgagacgggtgtttgttctgcttgttttggatctgggagctccgtgggtactcagggctggcagagggattctagatcccaggagtttgtgtgtctgtatgtgtgtctgtgtatgtgtgtgtgtgtcagggttggagagctttggtaggagctgtacataacagaggggtctgtttgcttttttatctggttcagggattggatttcactactgtatgatagaactgagtctacttaatatatttcattgctctcctgtggttggcccgggcaccagtgtggggatgtctgcaggcagtggcatgtgggcagggggcagccatcaggctgcagcagtgaggcgccggagaaggccaaggcagacactgccaaagacagagttggctttgggtctctgcaaaaatccagaaagaattctggtcctatttttgtagaactaggccagaaaacactgaatgaacaagtattagtctcagctggaattagtcaaatggcttatttctagtttcacgactaggagtgttctttggaaacccacatttgggtagtgaaaattgcactttctgggcaagactcctataaggctagaaatgacaatgcatcaaaagatgactttattatatttttatcagtggacaaacttcctaaaaaaattcacacactcatatctgcatataaaccaacatcataaaagtactaaaatgacactgttctgaatcatgcagtctttgcaaataacaagctggctgaaaaatatctaaatataattttaatttttgaactttttcttctaattggaaaattagctcatacctgtaatcccaagcagctgggattacaggcacacaccacaatgcctggcaaattttcctatttttgtagagatgaggtttcaccatgttggccaggctggtctcgaactcctgacctcaagtaattcacccaccttggcctcccaaagtgctgggattacaggcgtgagccaccacacccagccaaatttttgtattagtagaaacagggtttcactgtgttggcccagctggtctcaaactcctaacctcaagtgatccacccgcctttgcctcccaaagtgctgggattacaagcatgagccaccacgcctgagctttctgcagagcgctttcatcaatgtccttctctcttgtcctccctgcagaagaaatcgacgttgacgtggagagcacggactatctcacaggtgatctggactggagcagcagcagtgtgagcgactctgacgagcggggcagcatgcagagcctcggcagtgatgagggctattccagcaccagcatcaagagaataaagctgcaggacagtcacaaggcgtgtcttggtctctaagagagtgggcactgcggctgtctccttgaaggttctccctgttggttctgattaggtaacgtattggacctgcccacaactcccttgcacgtaaacttcagtgtcccaccttgaccaaaatcagctttgtaactgttttcaaggaggtgcttaggattgtgggtttctgattgcatccactagcttctctttttctcgccataaaaatttgtctctgagagactatacattccaatcaatttgaagcatccaagaattcttagaccgaataagcaatgtccacatctcagcaatccccctctttgctctcctcgtgtcccctcccagacctttcttccagttttctggcttactgtgttacttgcctaggaggaatgtccaagtgtgtcttgtacttaggaaactgaaggaaacaaacttttgaaattgagatcctgatctcagaactccaaagtaagctttgaaagcagcatttaagagcacttaaccatggacctcaccaccagtgaggaagtcaggaatacctctagaaaacacgcccttcacaccacgcatgctcattcccccgacgcgccgcgtgtggatgggagcagtatttctcactttaaaatggacaccttgatagtgtgtctctggggttgcacagctcatcagagttccaaattgtttgttctcacaaacaaaacggtacaatctatttttgtgcgatgttcttgggacctcgctgtgttctgctatctcgaggcacattctcccctccaactttgttaatgctacttgtctctggaacatttttttttcctacctcagagataaatgagatctccatttcccacttaacacagtgattatccttttttccccccccaaaatagtgacatttggtccaattataatctattttcctattgaactttcagcaataactgagctgtggcactagcagagctagtagccattatcagtgaaagaaaaagtccacatttctactctctgttgcaggtgaacaggagaggatggtacactgttactagaactcctctccttattgattatttttggacacacccagaaacttctttatggaggcttttgggttgatagtttaaaaggctgatttttctttttggttatgatttctcccttaagtggtctccgactttgtagcatttttatttaagctaaaacagagcacatgtatatgtacataagacacattaaatctataaatactatttattcattttatataaactaatgtaatggaaaacaaattcttatgactttgtggttttatagatgttctagaaactttgtatgtaggtatctacaaaattagttcattcccctgaatatttttgcattcatatttttgaggtcttgatgttttcagcctctggcgaatctttttcattgaatttgaaccatttgtaaaatctgtgatgctgaagcagagtgtgtcacaaagtgatgagaacattactaaaatccacggacgcactgcgacctaagggctcaacggctgactcggcagcgggcagccaccccacgctcccctgcggtcactcgcacaccacagcctgaagctcccccagcgcctgcacctcgcacacagctaaggtcaaagttcaaacgcactccacacggaagctcattctatacccgaagagcagtctcagaaagcaagattacttttgtgttttttaaaaaatgattctttaatgtatttttctaaacattctgattggaagtagtggattcctaaatgattccaaagtcatctgtaattcttctgtttttgttttgttctgtcttttcttcattttggctttgggtggggggaggggcaggtgacacaaaggattttttttttttttttttaatttttggaatcttttccaataaccagctaaagatttgcactgaaatacaacttgtatgccttttgcatttttaaagcctgcttcctggatttaagcagagtgatagtgttcaaagagccagttcagcctgtaacatatttgaaaaagatatgtctgcactttgaggtcccttttgaatgccattcactagacctctcaagcattttgtttcattgctacatccaagcgcctcacaagtccacaatgcgggacagcatcaaaagctcaagactttggaaaaagcttgtgggcttgcactgggggagggaagggaacaaaatttgtgtacttctttgtttaatttagaaataaggcatccaagagatgccattattttctgtgtttcaattgttgtgcctttgagttaaactgcatttttgtcttttggttgaaatctgaaatgtactgtcccaatataaaacagtaattatttgaccaaaaaaaaaaaaaaaa

SEQ ID NO: 24491 - DNA, 5272 bp, Homo Sapiens
gtgggatgactgagggacgtggctgcctctgggggcaccagcaccttctgtagcattgtggaacatttcttccatgaacttctactctggagctggagagaacagtctgccaagtcttacctggttcttccccatagccaccttggaatactctttgaacaagctctgctaaaaccaaacccatgaccactgtgttggtggtggggcctcatgctgtggctcagggagggcccctccctgcatgtgagtctagccttcctagacattacatgatgaccctttaaaaaaaaattagagatggaggtctcactatgttgcccaggctgatctcgaactcctggactcaagcgatccgcccacctccacctcccaaggtgttgggattacaggcgtgagccaccgcacccagcctcatgttgaccctggccctggatagcagctttgtttgtagaggcaggtggtgggagagaccctaggacagcctgagagtaactggacctggtattggtgcggagtggggaatatcccttgtctaaatgcagagcagctgagagaagttagcggggctcttcctccgttctcattgtttcctgctttccttccccacccaccccttcctcagcactctgtgttgtagcctgtactatcctgcttcaagcctccgtgtcccttgtaccttccccctaccttgagttgccagttctttactccctcaaatgttcccatgccacctctggggtttctgttatctgacatccctggctgctttcctggtagatgccattcccagagaggccaacagcgttcccaggcgtggctggctggtccgcatctctcagactcactctgccaggctacagttttgagaataccttttttgttgttgttttgtacctggagaactttttatgaatgagtaaatcttcagaaaggaattcctccacccttactgggttattgtcaggtgtaaacggcctttcagctgagcaatgttcctatgagaaggaagccatttctcttggctcatgaacactgccttttgggtagtatacccacacccagatctgtgaagagacctggaattgaagtctccatgtcgtcaggacttggtggcatgtggatcttgcttgacttgggaaaagagagggtggtggtgaactaataattatggagtccccctaatgtgtcgaacacaatgctagatgatttccatgataataattactcatacttgtgctaagcacttgcgatatcgtacttgtcacaacagtccatgaggtactgattattatccccattttctcatgagactaaagctcagagctctaggatagtatacagtggcaagaggaatttacatccaagcactcagatttcaaagcccacattcttaactaccggactattcatattacagagcaggaaaagggtctcagacaggttaagcaacctgcccagagtcacacagctaatgagtagcagaatcaggattcaaacccagagctgtcaaaagcaaaccttatgttccttccactgtcccctgcttccttgcccttcagaaaggtcttggaaacaggggccagaggatgtggtagccacttcactggtgttgtgtgtctgaatgggactttctcacaggcaggccatgctgggacctcagccatgggggtggccagggaggtggttgagcagaaggatagctggggacactgactgggggtagagtcacccagtgtctttagacatcctgctgtctaaagcactgtgtccaaagggtatggcacacttatatggacaggtcaccattccaaacaaggaggcccagtgtgtcaataggagaggtcctaaagcaacaaaaagggcggggtgtcttggatgggcttcaggaagggaaagaccattgtgtctggagctcagagaatgggggctggtgtttgagatgaggctggagattgggcatggcatcctcacgcatgttaaggaattggggactttatccttaacatcctggaagccagtgatcccatggagagtgagaagatctgatctgtgtttcaaaggtcacttgactgccgagcagctggaggcgagttgctcctttaggagactgctgcagttgcctgggtgagaggctagaggggtctggtctatagcagtggcaggggagatggaaagaagagaatgatttgaggggcattcggggggcaaaatcaacaggacctggggggagacgaagggatcaagaatgatgcccagattctgggtgagtggcagtgctgtggtgcacaagtagtgatgttatgtttccgggtgacctgctgtttagcaggagcccagcctgtggctaagaagtatagagaactgaaactagctccctagggatgggaaaaccaagtgggctgaggataagaacagggccccagggctgggtgcagtcgctcgcgcctgtaatcttagcactttgggaggccgaggtgggcggatcacttggggtcaggagttcgaggccagcctgatcaacacggtgaaaccccgtctctaccgaaaaatacaaaaattacccggacgtggtggcacatgcctgtggttccagcgccttgggaggctgaggcatgagaatttcttggacccgggaggtgggggttgcagtgagctgagattgccactgcactccagcctgggcaacacagtgagaccctgtctcaaaaaaaaaaaaaaaaaaaagaatagggtcccaggctcagcaggtagggacactgaggtaaaatcctattccctaggactagggactaggaagggagaaaataggaagctgctgtggcataggcatctgcatgggcagatggtgaggccaaagcccctgattttgccatacctcctgccctggtcaggactggttcaggcattagggcaggcccagccagggcagaagccttcctagatacacctgtggggagttgaggaactacagcagggctgaaaccctgctttcaggggcccccatgtggctggtaggggcagcttttggaagctagactggatcctattactccccagatgaaaagttcaaattccttaatacaactcagagctcatcacaatgtcacaaccctcctttctcggctcgcttcctccttaagagctctggggcgattctttcagaccagcccgagggatcttccacaggttgttaatagggctagaaacaaaaagtggtggtgtttctatgatctcatttgttggaacaaacgtagtgttaaactcaaacatttctgtaggatttcttggagctttaactatactaacattcactgtaactcttcaggaccgggtatgattacgtatttcccacatttctttggtcagagaacccgtttttgtgaggagcatttcatgggacagctgttgtgagaaacagtttgggaagggctgtgttggtcccatggaggggctggctgttcccagagcaggtcactcccccacttgcattgccttgcctggactcttttcttggagggaggtccctttcctctacccatctgaatttttttttcttccaccagtgtccagcttgcctttcaccatgggcctaatgatggaaattacagttattttgtatcttcaaacagaaccaagcaaatcctctgagcttcattcatatgggaaattttctttctttcttttttttttttttgagatggggtttcgctcttgttgcccaggctggagtgcaatggctcaatctcggctcactgcaacctccacctcccgggttcgggagtttctcctgcctcagcaggaggattactgtaatcccaggtagctgggattgcaggcctgcgccaccacgactagctaattttgtacttttggtagagatgcgatttcaccgtgttggctaggctggtctcgaactcctgacctcaggtgatccgccctcctcagcctcccaaagtgctgggattacaggcatgagccacagtgccggacattatgggaaaattttttgagggactaaactaatctccacagatagcaatgcatttaggaaatatatttaaaggggaaaaaaagactcatagtttcactcagtcatgttcataatttttagtatttgggttttttagcatgtaatttgtgtacatagttttggtttttgtaaacttgcataggggttttctggtacaaactggaaaacctgctagacaaattctgaaacatctgtaatgcttgtaggtagttgttgtaacactatgcccacacataatcactttccatattgctgcatagtctttgtaaccatttttcttcttcttttttttgagatggagttttgctcttgttgcccaggctggagtgcaatggcgcgatcttggcccgctgcaacctctgcctcccgggttcaagctattctgctgccttagcctcccgagtagctgggattgcaggcacacgccaccacgcccggctggtttttgtgtttttggtagagacggggtttcaccatgtcagccaggcttttcttgaacttctgatctcaggtgatcctcactcctcggcctcccaaattgctgggattacaggcgtgagccaccacgcccacctgtaaccattatttttaagattgctaccattggatagttctgtcatggtccaacttttggatatttaaaattgatccctgtgtggctaacagaattaatgtttccaaaaatgttgaaaattatatagttctcttaattccccacctctaactatatttttgggttatttctttaggaacagatgcccaggagtcatattactgagaatctagaaatcttttgcaaagttcttgttatattgccaaattgcttcccaaaagggttgttctaaaccataatttcaccagcaatgtaggggagaaccatttttatgctgcccttgtgagaattgggtatgaaaacatttttaaaatgatttttgatgaggtgaaaataatatttgaatatattttaatttgcctttcccccacttatagtgagcttaaacattttttccttttcctagctgtatttctccctttgttattcgttctttcgtccatttatctactggggagatggggagtgttatctttttagtttatcagttatttgcattttaaatataaccatttgccatattttaacaacgatttttccattaaataattctttttataaaaaaactttaaaaaaaaaaaaaaaaaaaaaaaaaaaaaaaaaaaaaaagaaaaaaaaaaaaaaaaaaa

SEQ ID NO: 24492 - DNA, 5572 bp, Homo Sapiens
taggagatgataaaaatacatattaagtaatttgtaccctgatatgctttgtatgtagattgcttacaactaacatgaaatgagcatttcattccttaagcatgctgttgggggaaaatgggagccaggctggatgcacaaatttacaccagatgctctgtatccaggtagcagaaatgactaacagcactggtatccatcagtcccagagcaaaagcgtctccagaggaggacatctgtaaatcccaaatctgatctccttcatcatcattaggcaacagataggataagacttcatgaagagaattttggtggctttagattgttgagaaagtatatataggaaaaaactggaaattatgtccaagattttttgtctaactccttatcctgatattgttaacatttcacaactaaaataattttaacagacaattagtttttaaaaatgtattttcatgacctgagactacagaaattgccattttcttaggacgtagtttacatttgactctgcttactgtgtccagggcatccccaaattgggagagattgccaagtcagttgccattttgccttacttttaccaaggactagcctacaggttcagttttgctcttgactttggccctgaattgagaactgagtcaagagaacagagtggaagtatggagacaaagccagcagctttactcaaaaaatatatatgagtctagtattttttttgtttttgaaagacatgttactgagcccaacccagtcagggatcactgaatattgggttaaataaaacaataatgttattcatgtgtttgaaattaatgttttaaagaaccacgctcacactttaaaatgtaactggatttgctatataggccagagaaatatggctgttacgatgaaggcgtaacttctctggttcttgattatttacaccattagagaagaatgcaaatatgaatagctcagagtagtttaactttgaagtgagagtttatatgcacctttatatgtgggataactgatgtctttggaatagacttcaaatgaatgataaaaacacctgtaaagtgataggacctctactttttctcatgtccaatgttcagtttcttataaaccaggcatgaagagaaacaaaaagtaattaattctccagatcatgaagttgtcttcaacctaagcacagaggtataataattacatttctcagaagttccccctctgttttgagtctcaagggcaattgagatgtcagtgaggctgtgattaaatgtattggatattagaggattttaaatacaaacaagtattataggtgttaccactgaccccgaaggtaagatttactgtgaaaatttataatgcaaggaagaatgatcaagttggctgtcagaacaacaaaatattacaaaccaggatgtctaagagcagaagtccgtggttgccacctctcaagcctcttagcttaatccaatctaggatgcatttccactctgcaacaaacagtatttatttttgccttatttgcagataacagttttaatgcaggtactgcccatggattagctttgagcagtgtctttttgctttggtttttttatttgtttggtttgttttgagactgagtctcagtcctccaggctggagtgcagtggtgtgactttggctcactgcaacctctgcctcccgggttcaagcgagtctcctgcctcagcctcccaagtagctgagtctacaggcgtgagccaccgtccccggccaagcagtatctttttgctttgaaagtgacttacatgtacatttgttttccttgtgaatgtttctttttaactgcaaactaagaaacattgagcccagcattcatatatttgcaaactctgtcttacttaatttctcagtttttttcctcagaaaaaatgaaattccttttcttttttaaatttattttttctttatttttctttataaagtgaagagtaggtagcatgaattcctcttgccctttgctatttcagtctggcatcagtagcaattgttgctatgtccagttttcattcatggatttttctgggattgaagatgagttcaatgttgattatttaattgggcagtataagtaaattcattggctctccttccagtttagtgaatactaaatatcatccatgatattttatacttcttacacttctggaatctaacctgaaaatagaagttgtaagtcagggacggtggtatgtgcctctagtctcagctagttgggaggctgaggcttgagcccaggccttcaaggctgtagtgcacaatgactgtacttgtgaatagccactgcactccagcctgggcaacatagcaagactcccaccccttaagaaaaaagaagagagaaaaaaatagaagttgtggagagggaggaggatgcttgaatactttgaccgtacttggcataatagacattttgagggtttttttgttttcttaaaattcctctggatcagttttcattgtttctagtaattatatttatcgttaatgaattcatattctgctctagcccctaaagatagtttgatatgctaacttttgttttgcctttctagctgctaagatagataatggttattgcaaaatgcacgtttttaaatggtctccagtgtggattgcttctgagctgctgatggattgaatacattgagaaggaatgtgtcatttggaatccaggaccagtcagcaaggataactgcctgattttatggtcagaatgctctaactcttatggcatactgatgactttttcttccattttccaaaaaagcaagttttgtcagtctcagtgtttctctgatctagctactcacaattccattcccaaagtagtgacctagttctgtcacttgggtttcaaagggagttgaagtgtcactgagtgagtacagcaaacctgtttaatgatttataggaagcaaataaaaagaattttgtttgctaacctagaagtatatcagattttggtttcaatttataattttgcaaaatataaagacatttcctggctaactccatccagatgaattattcagtattttttctcctatcttaatgaagttaatttgaatgctaatttcctataaccaagaaaacagttgaattaaataacccttatcttttaaacttaaagcttatactactaataatcatttaacattcacttccttttttctgacttaattggtaggtaaataaaatacttcaaatttgattggcaaattggaaaatcacttagaacaatctgctagtattttttattccctttgttttttcctttacacatttgtactgcaaaataaatcaaggacaaagactcacactgaattgatcaacttgtgtttggtcttcatgggaattacatcttttttcccctcaacatttattaaaggaacatacagaatttcagactatagcaaactaatacctttagcttgactaagagttgattttcgttaaggaacagaacttgtaatttatttcgacatactttaatgtatgactcatccctgttaaagttgtgagactcaaaactacgcccaaatcacttaattttatgtccttccctgtttactgtgtctgaccttcaagatttcgtgactgatgctgaaatggaagccaaccactgcagaaatttgggggaaaatgagatctgaagaatacaaggggaagtaggaattcatttctagcatttccaaacctgcttaatcgtgtctgctccaccacagtcagaggaaaagactgagttcatggaaattaccagctaagccttacatctgtctttaatgtttttaggaagtatactgaaaaggtaagtgagatgtctgttttgaagaaagactcttactgggtaccttaaaacccgttgtttcctattagtaaagatgggcagcttctttattcctagcttcaaaatgccttgcccctgtttggtgtgtttctcagtattgtggagaaggtagtttctgagcaaggtggtgcttttcctctgcttctcagcagctaagacagaaattgcaccgaagtgtacaaagggccaatttttgttgtcctgttgtgctcaaatccttttttttaaaaaagttatttcaatcaagtcttagttttattcctcactatataggaaaaaaatctttaatgcctcaaaagttccattcagcattacatttgcattactcttatttgcagcaaatatgagtaaaattataggtttttaaaggtctctaataacatccacttatattggttttgtagataatccataaattaccagaaataaattattccacatttattacacacccatgtaatagatgtcgtgccaggccctggaatatactaatggcatcacctcatgtggtaaaaagacacattccgccatcctggagtatacaaaggtagactagcatatagttcatgtgctcaaggagttcatttttattgacatgatacagatagaattgtagtttagggaatcaaaatctaataaaatgaggctaattccattttcccattaacactaataactagtgtgtaaatctgaatatgacacattctatatgaaagaagctctgtgtgcatctacactaaatactcgtgtgtgccaggtactgttttaaactacgtatatttttttaattctcataactgttctctgaggtatgtactaatactaaagcttattgttaaaggaaggcagaaaaattaagtaacttggcctaagtttgcataactgtgatctgggatcaatatttgaacccatacaggctgattgcagagcctgcactcttaatttgagtgtgatatttatgtgcagtacctggctataagtacccacaaaacgtttcaaattctttataaaatttgcttagttaaaaaagtaccaattgcataatatggttataagtctggtagaagttaggctttttacaagacatgctgcttactgcaccaaggaggcaagaaggctttttagagagcccagaatttcctttcctcaactcctgcttccaagacagtcattttgcatgataaccgtttccccaaaaaacacagacacaaaatttaaagaactggaacagaggaagcagagcttatcatagtatatatgtttagtaccctgtcacttaggtccacccctctttctttgtggattgtggacattttgtttaactgctaaatcatgagaatatatgactgctgagacttttccaaggattttttaaaaaacacattaggctttgtgcagaagtaaagaaaaagtgctgtgagaaccccaggtaggtaatttactttctattgtactcatagtttgtttgaaacctcttcacctctatcccttattgttttatactctgtaaatctgattttacctttaataaacttttctgaagtgaaaaaaaaaaaaaaaaaaaaaaaaaaaaaaaaaaaaaaaaaaaaaaaaaaaaaaaaaaaaaaaaaaaaaaaaaaaaaaaaaaaaaaaaaaaaaaaaaaaaaaaaaaaaaaaaaaaaaaaaaaaaaaaaa

SEQ ID NO: 24493 - DNA, 4009 bp, Homo Sapiens
gctgccagtcctgcctgaaaacgcgaaatgagtcttgcttggttctccctccactgggcgtgagagcccctgcccaggaggcccaggacaaatggccccatagtggaaactgggaagcttttaggcatctgatcagagcgggagccagccgggggaccacagtgctggacaggccaaccaactcaaacttgaagacatgaaatccccaaggagaaccactttgtgcctcatgtttattgtgatttattcttccaaagctgcactgaactggaattacgagtctactattcatcctttgagtcttcatgaacatgaaccagctggtgaagaggcactgaggcaaaaacgagccgttgccacaaaaagtcctacggctgaagaatacactgttaatattgagatcagttttgaaaatgcatccttcctggatcctatcaaagcctacttgaacagcctcagttttccaattcatgggaataacactgaccaaattaccgacattttgagcataaatgtgacaacagtctgcagacctgctggaaatgaaatctggtgctcctgcgagacaggttatgggtggcctcgggaaaggtgtcttcacaatctcatttgtcaagagcgtgacgtcttcctcccagggcaccattgcagttgccttaaagaactgcctcccaatggacctttttgcctgcttcaggaagatgttaccctgaacatgagagtcagactaaatgtaggctttcaagaagacctcatgaacacttcctccgccctctataggtcctacaagaccgacttggaaacagcgttccggaagggttacggaattttaccaggcttcaagggcgtgactgtgacagggttcaagtctggaagtgtggttgtgacatatgaagtcaagactacaccaccatcacttgagttaatacataaagccaatgaacaagttgtacagagcctcaatcagacctacaaaatggactacaactcctttcaagcagttactatcagaacccctgagacagacatagattctagctgcagcagatacaccctcaaggctgatggaacccagtgcccaagcgggtcgtctggaacaacagtcatctacacttgtgagttcatcagtgcctatggagccagaggcagtgcaaacataaaagtgacattcatctctgtggccaatctaacaataaccccggacccaatttctgtttctgagggacaaaacttttctataaaatgcatcagtgatgtgagtaactatgatgaggtttattggaacacttctgctggaattaaaatataccaaagattttataccacgaggaggtatcttgatggagcagaatcagtactgacagtcaagacctcgaccagggagtggaatggaacctatcactgcatatttagatataagaattcatacagtattgcaaccaaagacgtcattgttcacccgctgcctctaaagctgaacatcatggttgatcctttggaagctactgtttcatgcagtggttcccatcacatcaagtgctgcatagaggaggatggagactacaaagttactttccatatgggttcctcatcccttcctgctgcaaaagaagttaacaaaaaacaagtgtgctacaaacacaatttcaatgcaagctcagtttcctggtgttcaaaaactgttgatgtgtgttgtcactttaccaatgctgctaataattcagtctggagcccatctatgaagctgaatctggttcctggggaaaacatcacatgccaggatcccgtaataggtgtcggagagccggggaaagtcatccagaagctatgccggttctcaaacgttcccagcagccctgagagtcccattggcgggaccatcacttacaaatgtgtaggctcccagtgggaggagaagagaaatgactgcatctctgccccaataaacagtctgctccagatggctaaggctttgatcaagagcccctctcaggatgagatgctccctacatacctgaaggatctttctattagcatagacaaagcggaacatgaaatcagctcttctcctgggagtctgggagccattattaacatccttgatctgctctcaacagttccaacccaagtaaattcagaaatgatgacgcacgtgctctctacggttaatatcatccttggcaagcccgtcttgaacacctggaaggttttacaacagcaatggaccaatcagagttcacagctactacattcagtggaaagattttcccaagcattacagtcaggagatagccctcctttgtccttctcccaaactaatgtgcagatgagcagcatggtaatcaagtccagccacccagaaacctatcaacagaggtttgttttcccatactttgacctctggggcaatgtggtcattgacaagagctacctagaaaacttgcagtcggattcgtctattgtcaccatggctttcccaactctccaagccatccttgctcaggatatccaggaaaataactttgcagagagcttagtgatgacaaccactgtcagccacaatacgactatgccattcaggatttcaatgacttttaagaacaatagcccttcaggcggcgaaacgaagtgtgtcttctggaacttcaggcttgccaacaacacaggggggtgggacagcagtgggtgctatgttgaagaaggtgatggggacaatgtcacctgtatctgtgaccacctaacatcattctccatcctcatgtcccctgactccccagatcctagttctctcctgggaatactcctggatattatttcttatgttggggtgggcttttccatcttgagcttggcagcctgtctagttgtggaagctgtggtgtggaaatcggtgaccaagaatcggacttcttatatgcgccacacctgcatagtgaatatcgctgcctcccttctggtcgccaacacctggttcattgtggtcgctgccatccgggacaatcgctacatactctgcaagacagcctgtgtggccgccaccttcttcatccacttcttctacctcagcgtcttcttctggatgctgacactgggcctcatgctgttctatcgcctggttttcattctgcatgaaacaagcaggtccactcagaaagccattgccttctgtcttggctatggctgcccacttgccatctcggtcatcacgctgggagccacccagccccgggaagtctatacgaggaagaatgtctgttggctcaactgggaggacaccaaggccctgctggctttcgccatcccagcactgatcattgtggtggtgaacataaccatcactattgtggtcatcaccaagatcctgaggccttccattggagacaagccatgcaagcaggagaagagcagcctgtttcagatcagcaagagcattggggtcctcacaccactcttgggcctcacttggggttttggtctcaccactgtgttcccagggaccaaccttgtgttccatatcatatttgccatcctcaatgtcttccagggattattcattttactctttggatgcctctgggatctgaaggtacaggaagctttgctgaataagttttcattgtcgagatggtcttcacagcactcaaagtcaacatccctgggttcatccacacctgtgttttctatgagttctccaatatcaaggagatttaacaatttgtttggtaaaacaggaacgtataatgtttccaccccagaagcaaccagctcatccctggaaaactcatccagtgcttcttcgttgctcaactaagaacaggataatccaacctacgtgacctcccggggacagtggctgtgcttttaaaaagagatgcttgcaaagcaatggggaacgtgttctcggggcaggtttccgggagcagatgccaaaaagactttttcatagagaagaggctttcttttgtaaagacagaataaaaataattgttaaaaaaaaaaaaaaaaaaaa

SEQ ID NO: 24494 - DNA, 4086 bp, Homo Sapiens
ggtgggggtgcgagcgaggagccgcacaggcagtcccggcgcggggcaaccacagcgctcaggaggccctgagtccggcacctggccatgtgcaaccctgaggaggcagctctgctgcggctggaggaggtcttctcagccaccctcgcccatgtcaacagccttgtcctccagcccctgctcccagccgccccagatccctcggatccctggggcagagagtgcctgcggctcttgcaacagctgcacaagagctcccagcaactctgggaggtgacggaggaaagcctgcactcactgcaggagaggctgcgttacccggactccaccggtctggagtccctgctgctgctgcgaggtgctgaccgtgtactgcaggcccacatagagtacattgggtcctacacaagctgcatggtggtgcaggccttccagaaggcagcaaagaggagaagcgagtactggcggggccagcggaaggcgctgcggcagctgctttcaggtgtgagctcagagggctcggtgggcgcatcgctgggccaggccctccaccagccactcgcccatcacgtgcaacagtacgtgctcctcctgctgagcctcggggacaccattggggagcatcacccaacccgggagctggtggtgaacgcagtcaccctctttgggaacctgcagtccttcatgaagcaggagttggaccaggctgtggccacacaggctctctggcacaccctgagaggccggctgagggatgtgctctgcacccctgctcacagactccttcaggacagccaggacgtacccgtgacggtcgcaccgttgcgggctgagcgtgtgctgctctttgatgatgccctcgtcctgctgcagggccacaatgtccacacctttgatctgaagctggtgtgggtggatcctgggcaggacgggtgcacgtttcacctcctcacgcccgaagaagagttctccttttgtgccaaggactcccagggccaggcagtctggcagtggaaggtgacctgggctgttcaccaggccctgcatgggaagaaggacttccccgtgctgggggctggcctggagccctcccagcctcccgactgccgctgcgcagaatataccttccaggcagagggccggctctgccaggccacctacgagggcgagtggtgcaggggccggccccacggcaagggaaccctgaaatggccggatgggcggaatcatgtggggaatttctgccagggcctggagcatggcttcggcatccgcctgctgccccaggcctctgaggacaagttcgactgttacaagtgtcactggcgagaaggcagcatgtgtggctacggcatctgtacagcaccgacgaggtgtacaagggctacttccaggagggcctgcggcacggatttggggtccttgagagtggtccgcaggccccccagcccttcaggtacacgggccactgggagaggggccagaggagcggctatggcattgaggaggatggtgacagaggtgagcgctacattggcatgtggcaggctggtcagcgccacggcccaggggtcatggtcacccaggcaggtgtctgctaccagggcaccttccaggcggacaagacggtgggcccgggcatcctcctctctgaagacgactccctgtatgagggcaccttcaccagggacctgaccctcatggggaagggcaaggtcaccttccccaatggcttcaccctggagggctcgttcggcagtggggcagggagaggactgcacacacagggtgtgctggacacggctgccctcccaccagacccgagcagtacctgcaagaggcagctgggcgtgggtgccttccccgtggaaagccgctggcagggagtctacagccccttccgggactttgtgtgtgctggctgccccagggacctgcaggaggccctgctgggcttcgacgtgcagagctccagggagctgcgtaggtctcaggattacctgtcctgcgagaggacccaccctgaggacagtgtgggcagtatggaagacatcctggaggagctgctgcagcaccgggagcccaaggccctgcagctgtacctcaggaaggctctgagcaactcactgcaccccctgggaaagctgctccggacactgatgctgaccttccaggctacctacgcaggtgtcggggccaacaagcacctgcaggagctggcccaggaggaggtgaagcagcatgcccaggaactctgggctgcctacaggctgagcttggccctggactcggaacacacctgcagtcccaggctgggctgtgaccccatgaaacactgcaaatagaagccttagatgctatagttccttctgctgctggattctcaggctaacatcctggagctccaaccttctaacttctgtggtttgagaggatgaaccctgcaggccatgtccacagttctgagaggccacctgcttttgcctttgttgactggtggtagaactccagttctgtggcaaggggcagccacaccatttctctctcattgactcacaggggtctgctgcgagttgccttagagcgcaagggccaggccctggaggaggatgaagacacagagacaagggacctccaggtgcatggattggtgctgcccctcatgctgcccagcttctactcagagctcttcacgctctacctgctgcttcatgagcgggaggacagcttctacagccagggcattgccaacttgagcctctttcctgatacccaactgctcgagttcctggatgtgcagaagcacttgtggcccctcaaggacctcacgctgacgagcaatcagaggtactccctggtcagggacaagtgtttcctgtcagccaccgagtgcctgcagaagatcatgaccacggtggacccacgggagaagctggaggtgctggagaggacatacggggaaattgagggcacggtgtcgagggtattgggccgggagtacaagctgcccatggacgacctgctgccacttctcatctacgtggtgtcgcgcgcccgaattcagcacctgggagccgagatccacctgatccgtgacatgatggaccccaaccacacaggaggcctgtatgacttcctgctcacagccctggagtcctgttacgagcacatccagaaagaagacatgaggctgcaccgcttacctggccactggcactccagggagctctggtagcctggcctttcctggacagactgaagagctgagcagggcactgccagcctgtccctcattacccaaggcaaggggcaggacaggccctcagaagcagctcttggaggagatgagcattttgttttgcacaggaagatgctgctgctgccctgactgggatgagggtgaggggtgacgggtgtggccctggatgtggtggttttcccttggccactagcccatcttcaatgaccccttaatctgcagcagctcacaggctgggggtgaggagtccctggcttctcttagcctgagcctttctcccaagttccagagcctccccgggcctcagtgctgccatctgtacaatggtggagtgagtacgctgtaaaggaccttccattcattttgctgaattccagagtccttttggaaaactgactttagtctgctgggctgtattgacctctggcaggctcgaagcctcactgggtatgcagtcaacaggatgggcctggagatccgtgaactgcaggccacgtacccatgacgtaaacggcggcactggagcaagctggggcggggggtgggtaaaccctcactgccagcaggccccaagtggcttgtaaatcattctcctgtgacgtctgtgggcctgcgtggggacaacaggggcacatgacatctgcctgggccctgaccaataaaccctcagacccaggaaaaaaaaaaaaaaaaaaaaaaaaaaaaaaaaaaaaaaaaaaaaaaaaaaaaaaaaaaaaaaaaaaaaaaaaaaaaaaaaaaaaaaaaaaaaaaaaaaaaaaaaaaaaaaaaaaaaaaaaaaaaaaaaaaaaaaaaaaaaaaaaaaaaaa

SEQ ID NO: 24495 - DNA, 7243 bp, Homo Sapiens
gtgttggcccagtactaaggtcaacaaagagcagctgacttggattttggtgaaagaggaaatttgaggaggcattagtgagtgtgccttatctaagtagctaaatttaaccagcaaagcttttaatttgcctgatacattcaagagagaattggtataaatatgattgatgtgtatattgtaatagtcaaaccttcttacagtcacaactctgtaacataccctagatgttttaatcagcagctcaactgagttcattgtaaaaagggtaaagaaccaatgaaaaatatctatacaatattcttagacaattagctgcagaggtagacacctattccaatagtcagagaaactatttccaacagttacccagaaacgttcacatgaaacttttcagtgttccatcagacttagctaaatgatggcacaaaattttcagtgattccctcttccccatatacttcaactttctaatcatcagggctttaatttcatcgtgttgctttaaaacaagaggacatttgggtattttgcaaccagtaatcaccattccttttcctcttagcatttaatattccacataagtagtttttttgttttgttttgttttgttttgagaccgagtcttactctgttgcccaggctggagtgcagtggcgcaatgtccgctcactgcaagctccgcctcctgggttcacaccattcttctgcctcagccttccaagtagctgggactacaggcacccgccaccacgcccggctaattttttgtatttttagtatagacgggctttcaccgtgttagccaggatggtctagatctcctgaccttgtgatcctcccgcctcggcctcccaaagtgctgggatacaggcgtgagccaccgcgcccagccagaagtagttttgttagtgtacctagtagaacaagtaaattagaaagccaaagggaattttaattttccttactaagaaggaaggagagtttgagtaatcaatcatagtttttttgtattccgtgtttacaacacttctagaaattttagcattacatttttaaaaggggaatgagaaaaataggcacttagaacatttttatactatctaacaaaaataatagttcaaataaatcccagtagcttcatcataaaagtaggctgacttctctcacttaatgctgggtattccaatttttctgccagtaacaacagaactgtgtttacatattacaggatgagtatgatattagtgatagtcttatcactatttttaaaaatatatcttcccttagctgacctaatactgaaggacttcaggactttctgaagatgtaacttaaaggagtttaaaacatgctgagtctgcctttaaattaactattagtaatacagtgtgaccacaataatctgttaaagctatttagaataatagcttataatgtgttaaggcaacttgaataacagtgtagggttcacttcagtatagacttttccctgataactactttaaatgctatgttaccccaattttttcatgtactagaagacaagaatgttgttatgtaggattatgcagagtgaaggtgttctatacacatgaaaagcccaatgatgatcaatttgaaacttgagatcccaattttaaatactaccaaaacaatagtagacttcatctgtgaaatcaatgcccagagatcagttattcctgaagatcaaaatgagaggagtcatttgaaatgggttgcatcatgtagtaggacttgttaatataagttccttttcattgaaccttccctctgtccccagatgagcattcctaggcagagaagaaacgtgccttgtttctggtaacagtacttcctctagaaccttatctctgttttatagaaaagcagagcatttagcctcccaataggcagttttatggctccaggatatatatagtggagtttttagaatggcacttccggtctgggaggcagtacttcataacctgttttttacttaaatgaaagatgacttacaaggaattgtctggaacatggctgacaggcatcatgctacagcatattgcagtgctattgccatttttaaatgtgcagcttccaataggctctttacagagctatttagaagggcattattttaaatatagttggagattacggaaaaaactattaggattccacatagtcttagctcaacggcttggggtatttgttattaatgccctttatggaccctcttattttctccttgaatgtaatgaacattcagtgagttcggaaaggggtgtattcttgatgtggccctgaggtaatgcatattagatttcattaggctgaaaaaaaactatgcagaatctgtgaacatagcagaggaggtttaataggataagtcagctacatttttaatgttatcaacttatcattaatgtgtatacattagcgccctactgaaaggaagtaccagtctttgggcaaaacttaagagattccttgaggaacctacggcctgaaccttaaaaaaaaaatctctaaagaccttacagtctgctgctttaccatttcattttaattatcaacactggagttgcaattggctaagttgtcaactgtattttaggagtctaccaatgtggcactcagaatcggagtgaccatcagtgacctaaagaggtaagatttgtggaatactttagtccaaaagctttaaaaaactattagaccatatattctatatttttaaagtgaattatgcataaaagtctgtgcaaactacaacatgattgcagtaacattctcaagaaaaaaaaaccctagtatactttagcattattatttaagttatacaaaatacatctttataaaagtacagattttctttaaaaagtttaaattatacccactgaaatagcaaggctccctctttagtactaaaataagggtttatcagtctacattattgcttattcctatggggccattggaaacctgtaacaaataaaaatcaagttctatttcttaaggaaaagtgccctaaaaattcagctgtcactatgcttttctgaagcttttcatctgaggaatcgtccataaaactgttaactgatgctacccaaggcttggtttgtcaggatccaaagttgagtcttgcaaagttcctgcttgtgccaggaagctgttagtttgttgtccccaatcatagtaatctggagcaaaacttaaaaagaaaaaaatatttcagtgacttgaaacattatatagtatgtatgacatagtctagtttaggtagacagagctgagatttttgtgtaaactatagataactctaaagttcttttaaatggctcttaaagtccattttcccacaaaaccatgctacacacagggctgaaatgcccaccgacaactctactgaactctttagagcacagagtatacagcatgactagagaacccagccagtcactatgcataggaaatgttttcagcaacaaactgcatctgaatcctaacatggagtacagctcacaacctgtggtggtgtctttggacaagtaacttctatgcctcaatttcctcatcttagaatgggagtaatattagtaactacgtcgtgggcctattgtggggactgagttaacatctgtaaagtgcttagaacagtgtctaatatatagttaattctcaatacacgtaagtcgttttcattataattatgttcctctatgtagtagaaagggggtcttgtcttcaccatatcggtagtgaggactccctcagctctaagtcatttctggcaggtgagagggtgggacagctctagcagaatatgggtttaaaggggaaagcaactaataggagatgcagtggggtaactggaaaagttttctaaagactttcactgttactaacaaggagtaaaaaggcaagcatatattttttatcatttcatcccagagggaaaaaagttgtaaagttgttaatgctaagtctttaatcttacaaaagattacataagataacctttcactttctaagaagctcccctttcccaggaacaggatgggggtcctgagaggacaagcagagagaagacaggcttggcaggcactatgtcagcccttttggctcctctcacccctgctggcctcaccgtctcagagccacaggctgaaaggggaaacatgatagtcatcgggtagtggagtatggctgagcacagcaggctgaggaaaagggaagggaatcccaatagcaactacccttcctgtttgcagaccatgcccatgctgaggtaagcaaaacttggaatcctggggtggatctctgctatggttgcaatttcaggtgcttccctctttttatttgccttcccaattcactgaagattaggcgatggcagcggactggtagttcatgtattgtcttacaccctctatgtatgctgctttgaactctcagtatttaactgccctttccacattttctgggccagatccgcatgtagattcaaggaaggagactcctgctattaaaactcacgtgaaagtataacataagcgtaggtgagactaagagacagggtacttatatacaaactgtttacatagtatggtgattcagaaaacaaatttgaacaaaactgcctgagttagaattgtagcctgatcacttgctagctgtgtgaccttggacaagttacctaccctctagatacctcagtttcatctgtattatgaggctaataatagtactgacctctcaggactgttaagactaaatgagttgatatttgtgaatctcttagaacagtgtctgatacagagtagatgctatagaagtatttattaaataagtattcatgaaaattgagaccaaataaatacccttcatgtaaatgaaattttaaattaagaactgacatcattcaaatttgaaaacttggtcctttataatgtataatttattctaataaataaatactactgcatttactctctagctttagaacatgtgattaaagatatcatgttccattgagtgattccatagacaagtgctgtatttccctcttggagattcagagcacacattagcatattacaggctcgctcggcattttctaaaaaatttggagagtagaagaaaaaaaagtttctcatggtgggtatctaaagtaatcactacacactttgctctgtgtcttttagctttgtttcctccttaagcttaggttttaaaaatatgtagttataattgtataaataattcaaatattgattttttaaacttatgctaacatggatataatttcctgtgattagtatttatacagtaattaaaaatgcttgcataatagtacatcaaggtgatttttcacctttgtttatttaaccttgtgttctttttgtttatccaaccatttgtgctcttgttcccagttttttttgtgagtgattctctgatgactgtatttctttataaaaactcttttttatttgggcagtaatccccgaagtagagtcattgagtcaaaggcaaaaaatgtcattaaatctcaatgcacgtttacgttgcttcccatgaggatgggcacgtcagatgcaagatctttttcactgtacctcctcaacattgggtatcatctataaaatgcactaccgtttaatggaaacaatatgtcactggtgactgaagattttaactagtggatgtgaacgttttcttgtataaatgttgcctaattgtgttgcttcttttctgaatcctctaataacatcttctggcatcatcttggtggtttttctttttttttttttaatcacagtgttttatcagtttatattaactcttcatatataaaagataaccttttgtctatcatacttaaggcatttttttctagcttgttcccctctttgctttaaaaacctttaacgttttgaagtttcaaatttcattcagtatattaatagcttcctctgtgatttcttctagagcttaaaaaaacctcataacatttttctaaatacagaggtgacagcgggaatcacatagtgattcttcacccttataactttaactgaaaataaaaaaagtgctatccatatgtggatggtagattcattagcaaagccccctttttcataacccctccccaaactgtctcctctgtaaaatgtttcttgctgatttcttccagggaaaataaagcatgtatttgcatatattttaacaggaatgagatcatgctgtactccttgttctgcacctcgcatttgatcacttcaaaatatatttttgagatgcctccatatgaacagttagaaccctgttatagaagattattatatgtgtgtgtgtgtgtgtgtgtgtgtgtgtgtagaatgttatagtatatcctacaaatatagcatagtagtctaccaatggatgtattgttcagtcacacctataccggcagacctttgatcctttccagattgttaaactaagtacgttctccaccttccagaggtgtaagaaatactcagttttatttccttcagggttaataatccctctctgtgctcggaacactcttgagatgcaattagaaaaagacaaatctctaaatcaaagtggtgggacctaaaaaaagcctcgagggttatgaaggcttcgctttgtgatttgaaacaaggtaatttttttaaattggctttggtgatgtgtattggaacaccattgttttcagcataattacgcatttcacagcttaattcagccattacacgtgatgcagtgtttagacatagcaataattacaaattgtacatgtttacagatagatataccgctgatcaaaataaaacagtggcagcaagaatgatgttctgtccatgtaagaaatcaatgaaatataattaagaacgaactgtatctcattgactcaaaacattgcatctgcctttctgtcccatctgttttctaaacaaaaatcttccggtgctgcgtggttgtttttatttgtatcctagaaccatcctctcgagttccacaccgttgtattttctacacctaagcttggtgtgttctgcacaggaaatgtttcttggatgttttatcctcataccaagtgggaatttaaaatttaagagattacccacactctttgcctttctgtacatgtgatgaagaaagagtgggtgtaacccagcactctaaaatgtgtttgacctgtaaaaaaaaaaaaaaaaaa

SEQ ID NO: 24496 - DNA, 6383 bp, Homo Sapiens
ttctcaagaaagcctctttttctgcacccagaggcgaggcaaggaaattaccttacctctctttggcagtaggtgatctttttctctctcacctttcactgaggtagcagacatttgagtttctccggctaatgcatgggtctctgttcctaatctgtgcctcactaaagtccagggctaccagcctcttccctgagcagaggtcactgaactgggcactgggtgtccagagggtgaacccactcagggcagctgtcatcaaagcctttgcccacttctccatcttgcagctccctccctcttcactttcgtccctggagggtccccttattttcttatgagcctgattatgcacttaaatgatacgtttggtgttttaatcagaatctgcaggtgtgtgattaacaggaaagatcttcataatgttcaggccaccatgtctccagcagtgaaagtacttggagagacccttgaagagtgagtgggactgtccagatgtgtagaaatgagagccggagggagccacaggggcgtggggcagcaggaccagggcatgtggaaggtcagagtgtgagctggcgtagaggtggagctgagaaaagagactagaggcaggggagctttgcagttcttctaaggaatatggacttcaaaaatggttaaaggtggttttccaacttttctttttagtaccaaaacacttttttatttaacaaaaattaccatgactacatgatccagcaattccacttctgggtatatatcccaaagaaataaaaacagggtctgaaacagatacctgtacatctacattcaaaataacattattcacaatagccaaaaggtggcaacaacccaagtgtccaccaatggctgaattgataaacaagatgtggatatacaatggaacattactcagtcttaaagaggaaggagattttctgcactaacttgacccagctcctctgacatgattcgcatgagcctctgattcccacactagagtggaagctccttagggagaaggcctgtgtttttcttgtctttgttgccttttcccctaacctcagcttaacacgatgattgcacaaagtgctcgttaaggcttttaaatgagagagtagaggccgggcaccgtggctcatgtctgtaatcccagcactttgggaggccaaggcaggtggatcacgaggtcaccagatcgaggccagcctgaccaacatggtgaaaccccgtctctactaaaaatggaaaaattagatgggcgtggtggccaagcgcctgtagtcccagctactcgggaggctgaggcgggagaactgcttgagcctgggaagcggagattgcagtgagccgagatcgcaccactgcactccagcctggtgatggaccaagactccgtctcaaaaaaaaaatgagacagtagaaatcatgactcacaggccagcaagtatacatgtttttagagatgaaacaagtgattgcaaacaggccgggtacatgagacagcctgctgcaggcacatgggggtcatctctggctggcaggaaggtgagggagtcctctcttctctggtcctggctgactctgcctcagcaggacttcacttgaccattctcaccttctgtcacctcatccttaaagtgacagagtaaattaactctaaggccccatccaggactcaagctgtgtgattttacaaaaatgaaaattatattaataatcccattgtaaaatcccaaaagaaagtcaagagactagcagaaagacaggtgggtgatgggatgtcctggacagagcctggatcatgaggtccccatgtagtgcttgtactacgcagatgtttcctcttgagctattttaaaggtgtggaaaaagccaaagcaatgccctctccacggatactaaagactcacctttccactcagctgctgccaccgtctttctgggaaaacaactgcaaggtaagataccaacagctccctgtgacagaagggaaagtaagccaaccaaagcgagtcctgcagaccccaacgcagagcattcgtgatcacctttgcctctccactgtctctgatgcttaccagcaaagagaaaacataaagttctacattcagcaggacattcacctgaacagtttcaaataggacatgaaggcaggatccagattgaatgtttggagggaactagagacatggggaggcagtgagtgcagtaagcgtagctgtgaaatgaaggggagaagatggtggtcccaggctgcaggccatggggaggttttctaacagaccagggagggaagaatgagaggaaaaaagctaaagctctccccaaaggaggccaggcgcggtggctcacgcctgtaatcccagcactttgggaggccgaggcgggtggatcacaaagtcaggagatcgagagcacggtgaaaccccgtctctactaaaaataaaaaaaaacttagccgggcgcggtggcgggcgcctgtagtcccagctactcgggagggtgaggcaggagaatggcgtgaacccgggaggcggagcttgcagtgagccgagatcacgccactgcactccagcctgggccacagagcgagactccatctcaaaaaaaaagttctccccaaagggtaaacagatgaatcaggcagagcaacgctcttgaggacaccccacctctgcctctggtagactctgagttcttcgttttatttattctgtgactttattcgtatgcaccccagtgcctaataagttcctggcacatagagggcattagacacgtccttgctgagtaaatacggaagtggctgtagagcaggtggagtcaagggtacaaactgagccgccagccttggtgagaaagtggggcactgcttccttaaaggcaggaatgaaggggaaagaagggctaagaaagatatgttgctaggggactggagtgaagttggaggactcaaatgacttcactccttttagtaataatgttggataaggggacaaaaacttccatttccagaattatggcaaactaggtgttctgaacccctgaagcccttatatgtagaacatccaggattactgcataaaaaaatcacaagtttccttttaatgcataactgagatcaaaataaagtccctaagtttagaaactgcagaggaaactgaaactcagagaggcaaattgagactgggactctccaggggaaatctgatgacctggataatccagcaatttaagttttaatggctgcacagggacagggtcaaagcccatggcacaaggaaccagaagaatgaggagccaaagctgggaccactgaagggctacatcctcaatggatgggtggaggaggcagagaaagaccttagggaaccactctgccttgacctaggcgctcagctcccttgagaatgtatagccacaggtttactccctcggggtttgagattgaaaattgcactccttgcattgtccaagaaactacaagcagagacattccacaaggtggtccccacagccagtgttcccaggtccgctctggagggacacagctgcaactcagacccccataggatccccacttgagctcaccatcccacattacaaaatacacaaaagaacaagccaccatgagatgcagtcttcagaaagaacccatggaagagtcagacctcaagaacttcagacaatgtaattatcaactctagaaataagagaaggttcaagatgtgtgaataaatgaaaaagtgtatcaaaaataaaataaagaaataagatgctacttttagacacagaaatattaagtaaataaatggaatttctataacaaaaaaatataaaatcatggaaattaaaaactcaagcataggataaagtgcagaacagctgcatagagaattagtgaactcagacaggaaggtttgagggtaaaggtttgaggagagaggagagacctgtgtctggagctaagagccaagagatggagcacgggagggattaataaaaggattatcaagcagcaatgaagaggaagaaaactgagcataaaaaatttagaaactaggggaattttttaaatcagcatttcttaaaaccttctttactggtgcttggcagcttggtaagttggagaagagaagatggggagtaggacttagtagacagtaacagagtcaacgctttcaggagcagggtttctcaaccttagcacttgctctaaagggcctgggacttgatataatcaggcatggcaagacatgcaggtacagtggtgactgtcataaggaagaagtgtgtcctcgcagatacctagaacaggaggcatggcatgtcacacagagcctcacagggaagcaatgggataggtcaggaggaagagacagtgagtagaagacatgggcaagagccttgatgtggtttctttgggaaggaatagttgaggcaaggtaggcaggcttgggattggccagtttgaaccactggagcaggctttcagccacaggggcttggcctagtggtctggtatctgaccctggggtgtcagggcaggtgaataatggcccagtgtgtaaaagcccaacagtggaagtgttgggggtataggctctggggtgttgtaggcagttcctccagagtcagcaaagccccaggatgtcaaagcatcagatacagaatataaaagacataattaatacagcactcctgacatttggggcagatttttctttcttgtgggtgggagcaaggggactcttctatgtattgtagaatgttgaacagcatacttggcccctgcatggatgccagtagcaccactactccaagctgtgcaaccaaaaatgtctccagacattgccaaatgtcccctagtggatacaatcatcccatcatccccaattgagaaccacttaaaagtgaaagaataaaaaagcacagcattgaaatagctggtcatagatctgagatgcatagtcaagaggcccatttggcattgatgccattaaaatgtgaactgagtactggataaaaggtcagatttggtaaaatgaaaggttgggagagtggagggatgtgaaattgtgggcaaagtggaacttgaaggaatgtttgtaggggcagagctgaaatgattagagatggaaatcattcaagccgaggaggccaggagaaaaataggagctattttcttgctgtgtggctcaaactcttaaacatgaagcttctgtgcatctttgggagggtgcgcgaggggtcatcagtttacgttgatactgtggaagtctcctattcaagtggcaggtcatagtttacagaaaaagattttgctcctgataccaaaggggcaatcaggcaatctaatcctcaccaatccctaattgattagctaattaaaaggactgagtttgaagtagagagcagacttggtgacaaagcagagacagaaagaagagggaggtcacaaggccaagtcgcagggccagcactgcagaactgagccagagtgcacagcaaccctcaggatggctctgcctaagggaactctgtgaaagtccactttttataccatcttttacccacctcttttcttaccccaaagttcctttatgtagctcgaaatgccaaagactgtatggtttcctactaccatttccaaaggatgaaccacatgcttcctgaccctggtacctgggaagagtattttgaaaccttcatcaatggaaaagtggtttggggttcctggtttgaccacgtgaaaggatggtgggagatgaaagacaggcaccagattctcttcctcttctatgaggacataaagagggacccaaagcatgaaattcggaaggtgatgcagttcatgggaaagaaggtggatgaaacagtgctagataaaattgtccaggagacgtcatttgagaaaatgaaagaaaatcccatgacaaatcgttctacagtttccaaatctatcttggaccagtcaatttcctccttcatgagaaaaggaactgtgggggattggaaaaaccacttcactgttgcccagaatgagaggtttgatgaaatctatagaagaaagatggaaggaacctccataaacttctgcatggaactctgagcaagatgtaaataaaattaaaaggtggatggcaagagtgcaaatactatcttcaatccttcagtcccagccagaagaatctctgaaagcatattgtgaatgtatacaatgtagtacaaacaatctctgtgatgattaacagtatgtcaccacttcattttttaaaaaggatcacgtctaatgcccattttcccaactattctttccaaagtaagatataaggtagcttaataaactaagtaaaacgtaaaaaaaaaaaaaaaaa

SEQ ID NO: 24497 - DNA, 6956 bp, Homo Sapiens
taaatgtttgtaacctggcttccctcttctccagtggtataaagaattgtgccgctttaaggtttgggtttttttctctccagtaaaaattttggtaccttatttgatgtttacattaaaatgtgacattatacgtggcaattcaaatattttgctagctgtcttgtttgaggaacaccattaaagaagaaatataatgtttgtcaaaaatgtatcaaaattcatcagaatctggggcagaaaactacccttgtttttcatgtctttcaattcttctaaaataccccttattgaacttgtacacaatataaaatttaaatagccatcttaaatattctaccatctaaaaattgctttgaatgaattttggtaaaatccaaaggaagatgtttaccctcttgaaacttatggtcttgtcacacatttaaagcaatatatgtccttattttcctgaccttgtaatactacttttatatttcagaggtatctcgaaactacaatataaacttttaaaaaaaaataagatgaggctggggaacctttcgaatgaacccaatcttcctgatgatccattcaaaaacaggtttttggaagaccactttcgataggcaatcctataatcaaagtacatttttaaaatcaggttgtaaaatggcaaaggtaaagaaaaattactgacatttcttctatgattggagtttagtttatgttggccagctacaaccccttttaatcctcagacagtttgggataaaagagtgcctttggttaatggttagcaagctccaggataagcgctgcgtgcctcttgtattcagctctacctttctgctaagagtgcggttcatttgtgtgtggctttgcgttccaggctgtgggtctctgtgtaaggtggcagacatagacttgtaaactgcagacgtgttaatggttagcataaatcacagctggaaaactgagccggcaagttacagcaccactctttctctgtatgatgtcagatcaccacatttagcaatgtcaaattttactcaacattctttagtaggaagaaaagaagaaaaagttttgccacgtagctatgtgcttttaagtctgtgacaaaactcaagacatatccgaatgaaaattagatctctctgatgtgaggatgttatggaaaataattttcccatcagtgattatccaccccccagcccccatatacaggactacaacgcaagctagataaatgttcaaaagcaatctgataatatgaagacagaattgtcaagtcagggctttcagttgaccccttgtcatgaggttattgcctaattttctgttttctatacttgaatctttaaaaaatatcagtttttaaattatttatatttatatttagttaagggtcatggggtcgtgtatgcaccccatcaccttatataaatatgttgatgatggaagctttggataaggaagctattaagttgtcatgacatccttgttctaagcagttatttctaaaaactaaaaataatagctacttattggcccaccgctctgctgtgagtatatgagtacttctcattccttatttccatagccagtcaaggattctaacgctgcttccatctgatactcttcttagattctgcatcaaatgcttattttgacttacaacaagcttactcttcctcagcattacataatgccatctttccaaccatgctttaaagaacctgctctttacgcatagtatcttataacattttgaacacgtcttgtgtaagaatcattgcaagtttccatcaaaatgaggcgtgtcttctgagtacagctgatgttctttgggtattacttgagtagtagtagcaagtacccataaatcagatttatgaaacataacttatatgctaggttcaacccttatatatgcatatatatgtatagtatatgtatataaaatttttttccagaaaacttgatgatagctctcagataataccaagtattaccagcttccatttcttcagagcagatttttttctaagtgaggttaattgttcacataatgtctttttacatctttgtcctttgtatcactctgaagttttctttttcttgccagaatatttgtttcactttttaatttcagtgctacttgagattttctttttttttaacctgaaagacgatattttggatgatagagtttgtaaagtgagccttcatgctgaaaaaattcttttcatgatctaaaaatggtcttttgttacgatttgaagaacctcattccgtgtaacatggatattttcttgtgtgtctttaaagggggttttggttgtcatttgggcatatgctttgccaaattgttatagcagaactttgtttttgattaatcagtagttaattattgaccatttaaactaacatgaccttaattttcctttcctcacacagatgtgctttctatccaggtcattttttacacgtgaaataacaaactgctttgtgtagattttttttttttttaaatcatcagattttagaataagtttaggtttaatgtaaacatcaactggtcttttcagttcagagaactgcagaataagtaaaataagcagaattcccactgaataagcattacctaattaaacatagcaacatctaagaccaatttatgaaaatactctccttttttatggaggcattggagctgctgagaaagctaatgaatttcccaactttgggataattaatatatagtattgtgttgctctagtgtagttgattttatgtgtttaatatttttcatgtcaagagcaaagctgcagacgtaaaagatgtttctctagcccccttagctagagcgagccacctttgttaagagtcagggtgtgaagaacaatttcaagataaattttagtatttcaaccattgttattaagaaaattagacttactgaaatactcatttaaaaacagacaccttctatagcattgttttatagtggagttatttttaaaaagggaatcccagaaagaatctataaaaatacaaggttaaaactctaaatgtattgaaagatacaaattggtgctttcaaatgtcatgtaagctagccattgtgttttttttttttccctccagctcctcaatggtagtaatttgtcttttatgatttaccgtacattatttcttgctcgccatccccttaacatatgaaaatccttaatttctactgccgcgctatatgtcttcctgaatctcaaggtataaatgtcttaatggatctgatttgtctccactctttgccatctgatccacattcaaaccgcctagaaattagaaagaataggtaatgttctatctacgatttcttgttcaaaatatcacgtagtggtgccaatcacttacaaagacaccatctccatcttgaaagagtaactggcatgttagtcttgaaaatgctcattatgatatgctcctcacatttcccatctgcttgaggatggacatttattagctgagactttaaagctgctaaattcacactttctactttcatacctttttaatcagtaatgtcaagaccattgttgcaaggagtgaatcttactaaacacatcctgttattactttaaactagaatatgagattcaagagatttaaaaacaattttaatgtaacgtttaaaatttttgaaccaattgagaatgtctactttggagtgaagtttaaggaaacagtcaccagagtttctaaaaattttttggagggaggtacctaatagaagaatctagacttagaaatgtgaactgtggttaaataccaaacccagttccgcagtggtcgtctaaagcgtctaaaactggagtgttaagaaaacccagagacattcatatagtttcagttatcagagtattagaccagactttatttgcaatttgttcaacagagagattttattttgatacagatattaagcataaagcatagtaagttttatataattctatgagttcattaaacaatattatgaaattttcattatgttcgtggggagtctttttaactgtttctacctcatatacgaggtctcttctgtattttactttgcatactagcatgtgattgcctgccttagaactatgtagaggaggggaaatcgatattaccttttaagaaattgttgattttgtgaagtgttttcattaatacttttttaatgtttgagaagtaaaggggaaagggtggcaaattacataggttgcaacacagagtagaagtcacatagtactatttacagatctgtcctgttttaagatttgagaattgtgaacaggatggagcaatggttctcaaacttcagccagtatcagaattgcctcgaggtcttgttaaaattcagatagctggacccacccccagcatttctgattttggtctggagcctgatgatttgcatttccaacaagtttccaggcgatgctgatgctgccagtccaggaaccacactttgaaaatcactgggtctgattctcgcagtttgaaagtctcagagaccttcagagtctgaacgtcttttcaaccatgtatttatttactcagtgtaaaaaactgatctctggagacatttttataaatctggtgccatgactggaacatttgtggagaaaggtctccatggagcgacaggccctttggattggccaccacccctcctcactctcacccctgctggggtctgcactgctcttccgcagtagggtgaaggagctctttggttttagggtgagtttgcttttgtgtacgctgctgcctggacatcagtctggaagctgtgcatttgtttggtgtgcttagggtcaatcttgatccacatgcatggaagtgagaatcctggaaagaagccatcagaatgccatgagagtgcacctagcatgtatcgaggcactaagtgcaggagtccctgtcctaagatggcagtgacatggagcatcgaaaaccacagataatccttaaataataaaataatagttttgtttttttttcttcggggcagagtctcgctctgttgccctggctggagtacagtggcatgatctcggctcactgcaacctccgcctcccggcttcaagtgattctcctgcctcagcctcccaagtagttgggactacaggcatgcgccaccacgcccagctaatttttgtattttttagtagagacggggtttcaccgtgttggccaggatggtctccatctcttgacctcatgatctgcccgcctcgggctcccaaagtgttgggattaccggcatgagccactgcgcctggcaaatgttttagtttttatggttattattattttttttttggtggggggagggtggtgagggcaaaggatttgtttttcaaattatgtgtttctcaggttaacaaagttattttagattctctgccatgccagcaggtgttagagagagcctgaagtgttacatatggcagaaaataaatgtctctgattactttgctacctttaaaaaaatctatatgtgtttgcaaaacagcctagggggatctaccacctacacagcatgaattattcataagtcataggtgcacatgtatgagcaagttatttttgagaaagaaactgcctataatataataaacctgtcaggtctttgggtattgtttaatttgtgtgttgttgctgttttatctggactgcatcttggggggtactgggctctgcttctggtttttagtttgcctttgaatttactgagctactagaaagacaaaaaaaagctatttttatggtaatagaatacagaatgacttaggtgtaaaagtacacgtgaagaccatcgtagaatatacagctttggagttttcttaagacacagtccttcctactgaaaaggcttgctcacctttggagaggattgtttatattttcagcctgggttcctttatgcagtcccaacttagaggggagcttcggtttatttacactttgctttgcacgataacttgtatgcgaagacctctttatatctttcagtaggtcagagggctctttgtcctggttgaagtcccaaagtgtcagtgcagctgagaatgtttctcagcctccccctttacagaggaagggtcctggattttcataaatccagaccatgcctgcttcctataaatccatgtatatgacattgtactgtatctgatttctgtgccagtcatctgacctgattctttaaaccccataaaggtactggctatatgtagtagtagtatcctaggtaaatatggtgattaaaatacttctcttctaaattataaagataatgagttttgcattttattaaagggtcctgttgttagtgacacaggattttttttttaatgcttcatacatatagttcttatctaaacttgttcagctaacttcatagatcagttacttagcaaattcatactgagtcttattttgggaagtcttcctgagggaagctgtacaaaactgaggtggtcaggttcatctcttcaaagtaccagttatacagccatctaaataggcataacttatggcaaaattataacaattttttttctttgcagtaaacgatacctcatctaagaggctctaatacctaaagagtttatccttaaaagtaaaagtgactttgtaccataaaataaccccaaagccactctctagggtttttattttcttctttctttgtctttatcttttctaacttagttttggaattacgttagctactttggttccatagaacaagttttcaacttggggtctacagttcctacagtgtgctcattgtctcagtgaagttcttttgttttcaaagattcatggtaacaaaatgtattttactgctacaactaaaatgtatttataataaaatgcctttttaataatttggaaaaaaaaaaaaaaaaaa

SEQ ID NO: 24498 - DNA, 2900 bp, Homo Sapiens
atagatagcatttttggcattcggctttctaggaatctgaccaaagaaaacacaaaatatgaagaagctacatcttaatttttatttatggttctgaaaacttggaaagtatatatataacaggaagagtatgggtcagtgagatgtaccttgttccctaaatagaatatgataaatgcattttaaatggttataaagactggcaatatggaaaagttgaatgaggagagaaggagcatttgtttaaattatagtataactagaactaatcaaaattgctcaggaagaaagtctaaaagaatatatatcaaatgctaaatgtctattggatgtttttaataatttctataatgtgattattactttataacaaaactagcctttaaaaccctgtcttcctttttcctcccctagtcaagccttcgcatttctccacctctgcccttcctgtctctgtcagggggtggtcccagagaccctttaaagatgggggtagggtctcggatggaccaagagcaagctgctcttgctgcagtcactccctccccaaccagtgcttcaaagagatggccaggagcttctgtgtggccatcctgggacctcctcgaagctcccaaagaccccttcagcatagagagagaggccaggctgcaccgacaagctgcagctgtgaatgaagccacctgtacctggagtggccagcttcctccccggaactataagaaccccatctactcttgcaaggcgtttctaggaggtgttccttgggatattacagaagctggattagttaacaccttccgtgtttttggctctttgagtgtggagtggcctggtaaggatggcaagcatccccggtgtcctcccaaagggtatgtgtatctggtcttcgaactagagaagtctgtccgatccttgcttcaggcttgctctcatgacccgctgagcccagatggcctgagtgaatattatttcaagatgtccagccgaaggatgcgctgcaaggaggtgcaggtgatcccctgggtattagccgacagtaactttgtccggagcccatctcagaggcttgaccccagcaggacggtgtttgtcggtgctctgcatggaatgctaaatgctgaggccctggcagccatcttgaacgacctatttggtggagtggtgtatgccgggattgacacagataagcacaagtatcccattggttctggtcgtgtgactttcaataaccaacggagttacctgaaagcagtcagcgctgcttttgtggagatcaaaaccaccaagttcacaaagaaggttcagattgacccctacctggaagattctctgtgtcatatctgcagttctcagcctggtcctttcttctgtcgagatcaggtctgcttcaaatacttctgccggagctgctggcactggcggcacagcatggagggcctgcgccaccacagccccctgatgcggaaccagaagaaccgagattccagctagaggagctggccttgcccagtggcctgtggcgcccaaagctggcaggtcaggcaagcagcctgcaccaccctgccactggcgaccagggagctggcttcccaaggacaagggaaaattgtagtcacctttgcacttgctgaatctgtctttgtttctgcactaattaatgcacattgagttttgtcaggttttgttttcagggggtgtaccaagggcaaggaccctctggcttaccctccaagcgactctgtagttttcccagattttagttcctcattttgcagatgaaaagcggggaaaaaaaaaaaaaaaaaaaaactacgtgtccagaaggtattgaggtattgacacggatgcctacacctaggtttatttattaaaagcgcttttttacattccttgcaatactgatggtgatgatgcgcaggtctcattggtttcattcttgcagttgccatacagtgcctttccatttatttaacccccacctgaacggcataaactgagtgttcagctggtgttttttactgtaaacaataaggagactttgctcttcatttaaaccaaaatcatatttcatattttacgctcgagggtttttgccggttcctttttacactccttaaaacagtttttaagtcgtttggaacaagatattttttctttcctggcagcttttaacattatagcaaatttgtgtctaggggactgctggtcactgtttctcacagttgcaaatcaaggcatttgcaaccaagaaaaaaaaaattttttgttttatttgaaactggaccggataaacggtgtttgagcggctgctgtatatagttttaaatggtttattgcacctccttaagttgcacttatgtgggggggtggggttgacagaagtttttaatcacaaagtcacaggacttttttcttttgtaactgagctaaaaagggctgcttttcggtgggggcagatgaaggctcacaggagccctttctcttagagggggcaagtacccttcccttatatctttaatttgaggaatgtatgagataacagttgcagttactgaaatgccactggaatttgaaaacttgacttttttttctttccttttttttttttttttttttaaaaaaagaaacaaaaaacccacaaaaactacttgcccctcctagggaagctgtgtgccaaagaaccagtgtcataacccctccctcctgctgagctgacgttgcattgttgcatatcccagctactctgtgggttttgtgaagctgtgtgtgaagtctctacctcattgtagtatatgcaggcaagactgcactctcctacagatgtgtggagtaagctgtggtgtagtttttttggcacataataaacacgttgcagcagaaaaaaaaaaaaaaaaaaa

SEQ ID NO: 24499 - DNA, 2879 bp, Homo Sapiens
gagaagaggagaagaggttgtgtgggacaagctgctcccgacagaaggatgtcgctgctgagcctgccctggctgggcctcagaccggtggcaatgtccccatggctactcctgctgctggttgtgggctcctggctactcgcccgcatcctggcttggacctatgccttctataacaactgccgccggctccagtgtttcccacagcccccaaaacggaactggttttggggtcacctgggcctgatcactcctacagaggagggcttgaaggactcgacccagatgtcggccacctattcccagggctttacgctgccattgcacccaaggataatctcttcatcaggttcctgaagccctggctgggagaagggatactgctgagtggcggtgacaagtggagccgccaccgtcggatgctgacgcccgccttccatttcaacatcctgaagtcctatataacgatcttcaacaagagtgcaaacatcatgcttgacaagtggcagcacctggcctcagagggcagcagtcgtctggacatgtttgagcacatcagcctcatgaccttggacagtctacagaaatgcatcttcagctttgacagccattgtcaggagaggcccagtgaatatattgccaccatcttggagctcagtgcccttgtagagaaaagaagccagcatatcctccagcacatggactttctgtattacctctcccatgacgggcggcgcttccacagggcctgccgcctggtgcatgacttcacagacgctgtcatccgggagcggcgtcgcaccctccccactcagggtattgatgattttttcaaagacaaagccaagtccaagactttggatttcattgatgtgcttctgctgagcaaggtaggtttctctatgatctgaatttaggtgagagaatagagcttcatgtcaaatgtcaggtgaaataaattggttttgatccaaagggcactgggagccatggaagatgcttgagaaagggaaggtcacagataggttttagagatgactttattgcatgcagcccacagggcactgctaattctgaaactgtgaggagcatgatattttattcaacttataagttagtgtgttagtctttcacatttttatgtgtatctatatgtctatgtctttgtctatgtctgtatctatgataaaagatgcaccaaacccctggatcacagcagcccattaattatttacagcagtaacagcaggtggagtaggatggtagtgctggctccccattcctagggcaacacaatgtttttacctgtaaatgcacaagaatttgcaccaaggagaggggcccccacgttatgagtattatagcttatataggacagctagctcatatgctccttctttattacagggtgaaagttagagacagagaaagagagagagagagaatgctttgttctggcgtataaactacccctctcctgtgagatggcaatttctagagttttataacccaaatatcttctggaaagataagattctctgggtttaccactctagaatgtcagcaaatatttttggagcaatacataatttctaacctccaaggcaaattgccattcaaatatcctgtaccccaggttgccagtatctttttctctgaaagtctgtattatgcagaaaaatgaaaatattcgagaaccattgattcctgtcaccagggtccaaagaggaggcaaaggatctgggggaagcccttggagttggggctttggtgatggtgaacaagagagatctagacgtgcagagtgcatttgagtttctggaagatcagagcttcagagattatctcaggttagactccggagtctcagagatagtataatttgtgtgtgtgtgtgtgtgtgtgtgtgtgtgtgtgtgtgtgtgtgtcttgctttctcttcaggatgaagatgggaaggcattgtcagatgaggatataagagcagaggctgacaccttcatgtttggaggccatgacaccacggccagtggcctctcctgggtcctgtacaaccttgcgaggcacccagaataccaggagcgctgccgacaggaggtgcaagagcttctgaaggaccgcgatcctaaagagattgaatgggacgacctggcccagctgcccttcctgaccatgtgcgtgaaggagagcctgaggttacatcccccagctcccttcatctcccgatgctgcacccaggacattgttctcccagatggccgagtcatccccaaaggcattacctgcctcatcgatattataggggtccatcacaacccaactgtgtggccggatcctgaggtgctgccttccccattcaccaccaccacccccatcctctacttttgtgtgtgtgtgtgtgaattccaaggttcctagtggagggggcagggttttgatgaggaaaatccaacatcacctcaccccaaaacacacacaagtgtctctccaaggctgctggacataggaaatcccactggcaaaccttctttgtctcacctgcaggtctacgaccccttccgctttgacccagagaacagcaaggggaggtcacctctggcttttattcctttctccgcagggcccaggaactgcatcgggcaggcgttcgccatggcggagatgaaagtggtcctggcgttgatgctgctgcacttccggttcctgccagaccacactgagccccgcaggaagctggaattgatcatgcgcgccgagggcgggctttggctgcgggtggagcccctgaatgtaggcttgcagtgactttctgacccatccacctgtttttttgcagattgtcatgaataaaacggtgctgtcaaaaaaaaaaaaaaaaa

SEQ ID NO: 24500 - DNA, 2917 bp, Homo Sapiens
gggaggaggaggtagggggcagtaaaaaacttactctcttttttcctctctgtaattggttatcaggaagaatttgcttaatgactaacaccctaagcatcagacctggaatttggagttgcaaagtgactatcttcccatttcccatctcattttcaataacttcagcctcccattctttcctttggaatgagagtttctttttacagaagtaggaaaggcttctcagaaaacaaaaaaaaaagtatgggctgaatttagctcagtgcttgaaatgggaagatatgaattattatatacgcatctgtccacacatacacacatactgttgtgtacacacacacaacatgcctgtgcacagagccaacaacccttcaaaagtgtgctctgggtgtgtacctctggataaataagatgcatgccaagccaacccacagattttcaccagtgtggggtagtcaccaggcacctgttcaatgagctgtccacatggattgaagatgttttaaaaacacagaaaactcatggcttcaatggcagacttactagtctccatttcaaatgccaactctgagctgctgtacagcacaatctattccctattctctctttgaaaacagttaacccacctcacaggtgaatgaggagagaagatgtgctttctgcttcagtctcttactctgtgtgtgaccacatgcaagagtaaacttgcacctcagtgcttcagttcaaatggggtttccaaccccagtataattaggggtgtttcagagcatccccagttatttagcacaacactgaaggagcacatcccctctccattttgacttctctccccacttttacagccactgccttcatcagttttgtagaggtttgatttccatgtgggttttgttgtcattgttttgcatttttgttttgttattgatattgtttgctttcattgctaaaactcatatacgacttactatgagccaagcactgttctcagtattacataggtatgaattcatttaagtcctgaagaaaaagaaaaaaaaatacgaagtggatattacccttcccattttcaaataaggaaactgaagcacaaaaagaacaagtaacttgacaaggacaccccggtagtaaatcatggggctggagctcaaccccagggtaggctggctccagagctgtgctctccttgactcttctgatggtctcctagctggaagcctcacatttcagtctcattcccccaagtggcccatcagctactccatctctggctccccaactaaacagtttctctcatagtgctggacctccactcactagttttttttccagctgttcttctcttttcttcaggtcactcttctcgaccgagtgcaaaaattatcccctccataccagctttgatgaccttccttccatactcctcaccagacacaacataataggtcacacactcctctgtgctttctggcacgttttaaacattattattattgacctttacctatagtataccatggcctatttatgtatccatctcccctagcatttttcctcaaagacaagaaccatgtcttacccatctcttgggtaagtgcctagcatggtggctgacgcttgggagggtgtcattaaatgttgctcaaaagaacaagcaaacatttaaggtggtggagagcagcctggggacagctgacatgctgcatgcttctcagtaccagcaccatcacaatgcaaaaagcaacatctttcttaacctcagcttattctgtttttcagtctactctgtgagagagcaggaatgagaccagactagcaacaccattgccaagctcaaggactgggctcaatgcagtcactccttcagagagaccccccaccccaagcatgccccactttaaaatagcatgtttattgaagggggcatcctttacagtagctagaaaatgactgaggcccaagccagggttgatcaaggatgtgccattaaggtaaagagttacagagcagggcagagggactctgggggcagaagtggatgatttgcccggcctcttccagggggtctggatacaactgaaggagctttagctacatgaggccctcagagccaaagacaggatgcaaatagagttctagagagtggccgtggaagcagaactccaggtggggaatgttcaatctctgcctcccttaaagcagggccaggctcagctggccccattgttcacttggtcacaagtttcctacctttgtttctggatgagtcaaaggccaggaaggcagttatggagagctcctgcacctccagctgccccacagaaaagcctgcaagagtacttccaggcacaggccctctcccaccctattccatttgtaagcaagggaggtcgaggaaaaggacatctccaaaagggagcataagaatagccatatatacaggggctgaaaaagtgctcatgagtccatcttttctggaaagcaaagaccagcctgaagcagtgggagctgctgcccaagcggtagtgaactggagagaaacaggccctggattttcagtgaggatgtggatctgaagagtcccccaaatgcctctgaagtctgacatctctgcttagccctaggagtctggttccctgccttcagttgcagagtgatgtgtttgtgtcattgttgatgtcacctcctaaaaagaccttcactttctggctgccacaaagccatatgtgttgctccccatatacagcctgacagagtaaatggagaggaagtgctggatttgtgtatcactggctatcagttcctcatgttgttaagcctcacacaggtgtgctagcattgaactgtagagtgtcacatacctgagtttgaaaataaaagcacatttccaaacctcagaaaaaaaaaaaaaaaa

SEQ ID NO: 24501 - DNA, 2661 bp, Homo Sapiens
gataaaagctatgaatgtattgcatgtggtaaggcttttggtaggagttctatccttattgaacatcaaagaattcacactggagagaaaccttatgaatgtaatgaatgtggaaaatccttcaatcagagctcagccctcacccagcaccagagaattcacactggagagaagccttatgaatgtagtgaatgtagaaaaacatttaggcataggtcaggccttatgcagcatcagagaacacacaccagagtttaactctgtgggtaagagttgtacaattgtgaaatgcaaggagttcactgtaggggtgagactccacagaaaagaaaagtttcctgagagcagaacttctgtccttccctcccagttcggtactataagaagacatgcacacaaagatgtttgttatgattattgaagtgttaaatggaagaaaaatgttacccaagtcttctccaaaaagaatggtagatatttccttgaaatgcctaacccatttctggatgagactcatcaatatccccttcactccactctctgccaactcagatataatttccattgggcaccttcacagtaatgccaggattggggcagagatcctgaaagagcttcttataagatggcaaatgtgcctggcaagagcatttgtattttgtcaggtggaggcatgtgctgagagttattcaactatctgaaatgttgaatttggaggttgtgaaaatattgaattatgctattagtttaataatatctgaggcagtaaaatagtacctgaggaatggtgcctcattctgcccccttgccagttgtctcctcaatcctgagcttcctgctgaggttaattcaagtctactagtttattgagcacctgctatgtgctaggcattgaggtagacctggtcattgccctcccagagttaagggctaataggatatgcatatatactaaacagtaattacagtaaagtgtggtaagtgctttggtaggaaaaatgcgggtttccatcaaagtacatggcagggatacctaaatctggtctatgagtcactaaagacttcctggatatgatggtatctcagacataaaggtgggtagaaggtagcaagggcaggggagaagagaacaggatctggagacactccatgaagactcttctctactgcagaaattgtcatagacctaatttttaaaaaaatgaatctgaaggagtaattcaacaaatatttattgccctcaagtataatagctcagggcctgcaagcctggtaaggaggggcgtgggcagggaatggggaatagcagagcctgggaaggcagatcaccgtgttcctttatacttcccactgcctgagtcccagagtcatgggacacaaacactccagtccccactgtctctctagcctctgatatgcattctttccctgtgtatatacatgccttttcccataaaatgcaccagtctctcaccacactaattctgagtacttcagagtctcacaggtcattctgggtctagaataggctccccaactcagtgattataagtaggaagaggaaaagcaacacatggggattctgagccaggctttatgacaactaattcctgctggagagaagagtcctgatgatgggctgtctccagatcctatcttatcttcatgccattgtatgggctataacctctgcctgtaactctctctgctaatttttattttggcagttttaattaacccacaattgctgagggcaattaatacctaaaagaaagtttgattcctcttctaagatatcctaggtagtgtcatttctaaagaagacttggtgatcactgcttgtattagtccattttcacagtgctatgaagatactacctgatactgggtaatttattaaaaaaaaaaaagaggtttaattgactgacagttctgcagggctggggaggcctcaggaaacttaaatcatggtggaaggcgaaggggaagcaagcaccttcttcacaaggtggcaagagagagtgcaggggaaatgctaggcacttatcaatcagccaaatctcatgagaattcactatcatgagaacaagggggaaatctgctcccatgatctaatcacctcccaccacgaccctccctcaacacctggggattactattggagatttgggtggggacacaagagccaaaccatatcactgctgttgtgggtaataggggaggtgaaattggggggacaattcggcctctttgtgtccagaggttgtgcagttatcgagtgaggtcgatcagaagtctaaagggatctttcaaatggatagtgagttgccttttcctataggtgacaatcagagatttaatgttttaagtatcatataataggtttttctcctgattgtgaattgtaagtgttggtaatacagaaaatgagaaagtataaaccacccccaatcccaatgcccatagaaacgttgttaacattttggagtactttctattagtgtttatttttcccaatcctagtatttttagtaaaactactgtttagtaaatgatttttggtaactaatttcaaaatttatacttcaaccgtttattattagaatgtaatgcaagatgtattgcaataaaacttgagttttagaaaaaaaaaaaaaaaaa

SEQ ID NO: 24502 - DNA, 6239 bp, Homo Sapiens
ggatcgggccgtgtccgccgcggccctgcgaggtccgagggactcattctgatgaaggaaagagcgtccctgtgcagctgcgtgtccttcagttctttggctctgattccgtgtctggcttcatctaagtggcctggtccatgggcagtgaagaaatgtaaagtgcaatagccctctggaacaagacaattcatgtgagataagaaagaagagcccacaagaccaaggatgtattctcagtttacagaccactgaccagaggccactccagggtgtcaggactaagagaagtcacaaaacagcagatttcccaagagcagcggaaaatgatccagtcacagatatcatttgaggatgtggctgtggatttcacgctggaggaatggcagctacttaatcctactcagaagaacttgtacagagatgtgatgttggagaactatagcaatctggttttcttggaagtctggctagataatcccaaaatgtggctccgagataatcaagacaaccttaaaagtatggagagaggccataaatatgatgtttttggaaaaatatttaattcaagcataaacattgttcatgtaggactgcgatcccataaatgtggcacaggagaaaaaagtttgaaatgtccttttgatttgcttattccaaaaaataattgtgaaagaaagaaaattgatgaactcaataagaaattattgttctgtatcaaacctggcagaacccatggtgggataaaatactgtgattgcagtacatgtagaaaatccagcaacgaagagccatggctcactgctaatcacataacacacacaggagtctatttatgcatggaatgtggcagattttttaacaagaagtcacaacttgttatacaccagagaactcatacaggagagaagccctatcaatgcagtgagtgtggaaaagccttttcacagaagtcactgctcacggttcatcaaagaactcactcaggagaaaaaccgcatgggtgcagcgaatgtcagaaagcttttagtaggaagtcactcctcattttacatcagagaattcatactggagagaagccgtatggatgcagtgaatgtggaaaagccttcagtaggaagtcgcagcttaaaagacatcagataacgcacacaatagagaaaccctacagttgcagtgagtgtgggaaagcattctcccagaaattaaaactcatcacacatcagagagcgcacacaggagagaaaccctatccatgtagtcactgtggaaaagccttcttttggaagtcgcagctgattactcatcagaggacccacacagggaagaaaccttacggatgtggtgagtgtcaaaaagccttcagcaggaactcacttctcattaggcatcagaggattcatacaggagagaagccctacgaatgcaacgaatgtggtgaagccttcatcagaaaaccacagctgattaaacatcagataactcacacaggagagaagaactatcgatgcagtgattgtgaggaggccttctttaagaagtcagagttaataagacatcaaaaaattcacttaggagagaaaccatatggatgcattcaatgtgggaaaaccttctttgggaagtcccagctcctaacgcatcacagaacacacactggggagaagccttatgaatgcagtgagtgtgggaaggccttcacccagaagtcaagcctgatatcacatcagagaacacatacaggtgagaaaccctatgaatgcagtgaatgcaggaaaaccttcagtgagaagtcaagtctcattcatcatcagagaacccatactggagaaaagccctttgaatgtagtgaatgtaggaaagcttttgcctggaagccacagcttcttaggcatcagagaattcatacaggggagaaaccctatgaatgcagtgaatgtgggaaagcatttgttcagaaagtgcagctcattaagcatcaaagaaatcacacaggagagaaaacctatggatgcagcgattgtgcaaaagctttctttgagaaggcacagctgattatacatcagagaattcatacaggagagagaccatataaatgtggtgaatgtgggaaatctttcacaagaaagtcacaccttatgaggcatcagaggattcatacaggagataaatactatggatgcaatgagtgtgggaccaccttcaacaggaagtcgcagcttatgatacatcagagaaatcatataatataaaaatcatgactttggcgaatgcagaaaggttgctatcaagtgtcatactttctgacacttttgaggatgcatgtgggagagaaaccctattgaggcagtgactgttgaaaaagcttgaattgaggagtcaagagtcactaagcagaatttagaaagagaagtttttaaaaagcaaacagtgtaaaaaaagtcatctcccagaagacactactcgttacatgttggatgactcattgaggtgaaaaccttattagtgttgtgatagtagagaagcttttagtcaaaagtcagtttattaaatgtttagaatacctaaacaggaagaaaattctattgttttttataacaaagtggaagatttcaagaaaggacaactcactgtacacttgagaataatacctacagaggttcatactgaagagtagtctcaataatgtaaagaatttgacaagcatgatgctattgaaatagttctgtaaggaagtggtgttctttatacatcaattattacaaaaagcagtgaattgtaagtgtgaggtgtgtttacttagatgtgaagagttctccttactgctgtgatggaataacaagggtcagatttcctctcctgccttaaacaactggaagctatacaatacgtataataggtaatggtttttagacataggacaagcacaggtttgtgatcctcaggagactgcagacagagtgaggtgagcaccatggtttctcagcctgcccccgcacggcagttcctaggttgcagttcagggaagggaaacaataaatctcgctgaattgaagagacaggactggcagttggggaggccacagcagctagaatttccaggggaaagtactggagagatgggatcctcctagatacagggctcaagaagtctgctgggagtcccctgagtcctttgacttagtactgacttgcactgaggccaggaaaagaagcactggaaagcagcaggctgaacaattcctggaactcatgcagggctgggaatagtttatgttctcagcagccagagtggaaacagagtggaaacacatggagcatcaggtagaattctcagaaaggttttgttttagtagtgcagctaattaactctagattaaaagctactctggacctacagtgtctggcatccaaaaaaactaatgtgttatgcaaagaagcaataaaatatgacttataaccaggagaaaaatcagtagaaacccagaaaagacagaggtgatggaattagtagacaaggatattaaaagagctattgtaaatataaagtagaggaaaacataagattgatgaaacctgaggtataagagatatttttaatggccaaaatggaacttctagggatgaaatcaacttctgattttgttaaaatcccgagtggagagattagatacagaaaaagaagaaaaaatcaatgaacttgaagagtaagaataaaaactaccaaagtgatatacagagagaaaaaaaggcttagagaagaggaagagaataggaaaaccattacagtagtgtaatatatgtttaactggagtcccagaaggagaggagaaaatgaagaggcatgaagaagtatttgaataaataatggctaaagattttccaaatctggtgaaaacaatacccccacatattcaagaagctcaaatgacctgaagtagaataaacataatttacatcacagcagtgcacctcagagtcacattcatgaaaagcactgataaacagaatacttttaaaacaccttgagaaaaaaagataatacatacacatgaacaaagaatggcagcatatttctggtgagaactatgcaagctataagacaatggagtattatctctaaattccttaatgaaataaacaacaaaccctgcaacctagaattctgttactgtcaaaaacgttttcaaaaatgaaggcaaaataaagactgtttctgagaaactaaatcaaaggtaattttattacctgtagacctgtctttgggaaacattaaaggatgtttgagggcagcaggaaaataatacaaaacttaagtttgggtctgtacaaaggaatgaagttctgaaaatggtgaatatgtgggtaaatataaaagatatttctctctttttaaaatctttttaaaagggaattggctgcttaaagccaaagtaatgataacgtatttggagtctatttagaagtaaagtgtgatgacgataacacttaagtgtgaatttttaaatatagttgagtagactgcatcatctgagttagaagcctattccttcagggctcggggtagcttgaatttgtagcaggcacatgacagaaattgtatgtattgtggatctgcatgtgtgctgagtattccctatttctttgatcccttttcccccattttctgctctgctcccccctgaggctgtcttctagagactggggtttcttcataggtttgaacagtgggagataccagaggtgggaggagaaaaagttatttattaccgttcccttcctcctgcctggaccatggtagcttctgtgttcctgtaaggatacagcttcctttgggaagccccatctatggctgtagatctctcggtttcagttgacaccattccctctccatgatcttcagacttaactactactgggtgcttccccaacccgctggttgggtgtctttaattgtgaacacatatttgtaaatagtgcctttattaattgttcttgagttaatattctgagtgtgccatttattttctgtgccatctgttaaatgatgagcatttaataaaattgtgataatcagttatcagtacaagtgccgcatagtgcataggctgaaatgtctcaagattccccacactacatatcagtattttctatctgtatctggacaatgcagtagaaattataacaaatacaaagttctttgtgcttttctgctgcatatgtcagtggctctggagattgttaccatctgctacatatataaatagacttgcagttattactaagctcctcttcagtaatagaaagacttatgaagtcttttactacctctgggttagccaaacaaccttcaaaaagcattgttatttaggttaaatatctgtggacaagaaacaagataatcagttactgagtgaagaaagacgggaatgatgtcccatacttcccagctctctaaagtgttatgctgtacaattaaaatacccctgacccatcatctgctaccattcgttgtggataattcatgtaatctctaacctgtgggcaagtctttacccttcagtagtcaagattacgttagagacttcgtccacgaatccacaccacctttcccatcagttctcaccggaaatatgctgccaaaaagaaaatcagcttttctaagatcaagccagagttgcttctcttacaaccttacggcgctaatgcattaagttgaagtcgactgccaaagaggcccagcagagggcagcacccccatcatttttttgaatttctcccttaggaattttgccttcctttgtcttctgtccaccaggccttctctccagctggacacaaacctcctttgacgggaaataattgccgttaggcttcacagtagtgctttttcctttcacttggatttgcattttaacctgcatttcgaagatttttatacatgttttctatttccgacaatgccaggaggcttcattgacgttgtagtctgtgttaataaacttgtgtatcactctgctctgatcttttaggaattaacttgcaaatgaaatgaatatgttgggactttggcataatttgaatatagcattgtgtgagttgtgattgtctcttcctaattgtgctgtaataacctgtgtatgagaataaaatgatttccaccaaaaaaaaaaaaaaaaaaaaaaaaaaaaaaaaaaaaaaaaaaaaaaaaaaaaaaaaaaaaaaaaaaaaaaaaaaaa

SEQ ID NO: 24503 - DNA, 6542 bp, Homo Sapiens
ctggactctatattgtcaaactacactcgctcaggaagccttctgtttagaaaactggtgtgtgcgttttttgatgacaagactttggctaactccttacccaatgggaagaggaaaagaggactcaatgacaaccggaaaggactagaccaaaatattgtgggtgcaataaaagtcttcacagaaaagtactgtacagctaaccatgtggataagcttcctggcccaagagattgggtgcagattctacaggatcaaattaaactggccagaagaaggttaaaaagaggctcagagatcgcggacagtgatgaaagactggacggcattgctctaccaccaacaggtaaataaaacgcatttacattttcatcacctcctggaaaatacagcccacaaaactatttgcattgaaaacgattttaacattagacatgcagacacttgagcaaactgcttctgcagtggaccaggccccgtcattggagcttctcaaggccccgtactcagagatgtttttcatactgaatagaaaaacgtttttctcacactcttattttcataaaaatctcagaagagcaaatcctaagaactaagtatcataacattttgcctccccaaacctttggacattacaaaatatttttaacgtgaaatgagatttcaccttaaaacggggaccactaattttgtgtgatcaaattcatggctaggctgtcctctcccacctcctccaaacggccttggagccttgagcagtcaatcagtggacacccagtgaatactatgttttaactgagcgatttgaacaaggccagccatccggcgtgagtggcacattcctaataccaggaccagatcagctgaagatacccttccatggaagcatttgctgcacgctgttgtgttaagccatagacataattccaacttcatgttatttgactctcaagtaatgcttctgaccctggcttcctacctgtgtatgggttcatatctgagagccagaggggcaggtgtctgatcaatgagccttgtggaaaacaatgtatcccctccattggtcacaggactctactgacttccctccaaaggatatctgaagattctctgcccacaaaacccaggtacccccaaaaaccctcttactgaaaaggttcaaccgaatgttttttcctctagttttggggtggtctgtgttgattgaattcagcaaatattagtggagtctctaggttgtgtaggaacttgactaggccatgtattcattgacagcacatatcccaaaatggcaaggaaagccacattcgcaggcataggatgggcctgtgctagtgaacttcagagcttcagagcaacaggaaaattcagccgtgtaagagacacattgctttctctgccactgagtagctaagcaacagatcaatggacagataaatcaaatgagctacatagtgcaaaaagacctgcctacatcaagttcttcccatacagagtcattatataaaagggatttctgtccttctttggctgtgttttcacatttgtgaattaagagagttgaaatacgtgatctctgttgttccttcccaatttgtcattctctgaatatcagggcacgcatatcagcctcattcttatcacctgggcccaatcccagccgatccatgaaatcctaatcgtaatagacctagccttcagaaggcccttcaggggagcaccatgcctttctagctgtgcttcccaagtgccctcccaccctggccatctgcactgcctgtcctcctgtgtcatgtgacacagtgagcttttattatttgaaagccactccccttgaagtttatattcacccccaagtggtgagtacggaatgcctttgtattttcctatctgaagttggagatacgtttccagtgagaaaactgaggtcagagggtgctagaagagcctcatggaactgaaaaaaatgtcaaggaatctgagaatgagaaggaacttgagagatcctctagtccaatcccttctttttatccagtccttttattttacaggaaaaaaagcctgaggcccagaaacattaagtggctttcccacggcctcacagctggttgacggcctggccggaacccaggtccctcgactcccagccatgataccatatagctttctcatacctaagccaaagccagcttttctctgcatgtttcttaaagatcctaagagatgatggatgtgctaatccctttaggagtcctcttcactgcctcagtcttcacaattaaaatgttcgtcgtcagtcggcccggttcactgcagctgaaactcgtttcttccagtcttttctcaaactttacccaaggctgtgaggtcataatgaagaaaatagtataacacacttgcagatcttttcattaaactattgatagatatttgatacaaatcactaagcagcatgataaataaaaacgtttatcatttagaaaagaggaaaagaggccgggcgcggtggctcacacctgtaatcccagcactttgggaggccgaggcgggcggatcacaaggtcaggagatcgagaccatcctgactaacacggtgaaacccccgtctctactaaaaaatatataaaaaattagtcaggcatggtggcgggcgcctgtagtcccagctactcaggaggctgaggcaggagaatggcgtgaacctgggaggtggagcttgcagtgagccgagatcgcgccactacactccagcttgggtgacagagcgagactccgtctcaaaaaaaagaaggaaaagaagtctcagattgatgctcaaattttgcagtaataatattaagtaatcttgatattcacctggatagcgtgtctcttgattgcctccaaagtaaaatccccattctggttggcttctttgaatgcagtgctgctcctaacacccctcctcacatgtgccctttaaggactccacctttctcgcacatgtggtttcatccttgagcttgagcctcactggtcagaaccacaggatcgaccaagggctctgatacagactctcattatcccatttatctgagctagcaacagttagttctttttaaagattcaacaatgcttttattacttttttaaggtcttttttcctccttccaaagttgtgtatttgggggaagggcagggaaagggatgtaaatgcttaagtgtttctatgaaccagaagtgactagggtagggttacaggcaggtcaaatgacatttgtttggatgcattacatttaagcaaccttctgttcatcaggctttagcagaaatggattcaccttctgtagtgcatctattttagtttcccttaaccctattcactaagcctttttgagcaactaccaagaatcagccccgtgttgggtgctggtgtacaaatgccctcagactagtgtgagaggcagaaggaattacataaatgctatagcacagatgtgtggagagggtctggggctcaagaaaagccacccaggagctggggacaatttgcattaaaaaaaaaagtatagagaaagtgaaatcaaaacagtgctttctaaaatttaaaatggggcttccaaatttgaaatggggatgttcatctagacttagcaattgtcataaattggcattttacatacatttaaaaaattaataaaagtgtaaggaagaacatttcaattgcttttaccacccacagacaaccattattggatgatttttctcaaatgtttctccattttatttatttatacagtggagatcaaatatgtaaaattttgtttcctacatgtttttttgatttttacctaacaagcatttttccactctatggcaaatcttcatatgcattattttaatagctgcataatattctgttttgcaggtaaattatcttttaggccattttccacgactggacaatatgtggatatactctaatagtaacacacattcgtggcctttctcataaaaaatcattacaaatttccaatttctacaattgctcatggaggacaactaaagccttggctaaaaacttagcgacttaagtgtgaaacacagacacctccccagtaaattgtttacttgtccagaacgcccacctccagccatgtcacagaaccatgtacaactcttccttaaagaagcggctctccgccttcattttcttgtctctgttgtaggtaatatatttgacaccaggagagaaaacacggaggacacagaaccaggtttcattgcctagactttgattttagtgacattgttgagtggcatatgtaacttccgtttgaatttccacaaagatccacgtagcatttcaggttcctgcaaagtgtgggtgttctgtcaagcttacctgtcatgtttgaatagtttcatatactttctttgtaatgtgtgataaccaagcctccaatctggtataagattttttaaatcatttttagggttgatttgttaccctttaaaagtccagcatatgattcagtgagttcattgtccattataaagaagtggttctctcctccctgttttcattcaaaacctcagtatgaatatagagctttgaaacgtatttattttaatgtaaattgcttagatgcagtataaaggagaatggctctttccagtgctgagagagcagttgtgaaggccaagattaattagaccttcatcatcttagaagatgaaaaagttgttttgggagataggatagctctgacctgtaagatgaaatcattcatgacgtcagtgccccccaaatagccatttgtaactgagtaagtgcaaatgacctatgagttcttaggaaagaaaaacctttcacctaagttgcgtcaacacaatgacaaaataactaattaaaaggtgagaaaaccagtaaattatctacatgatacctgacagccattttaacagatggtcttaacggagtgctacagggttttggcaccatgtggtaactagctaaaaatgtacttaatattatgtcatttatttggttcctagtatacttgccctccactttatataaaactaatttatgaaaatctggatttattttaaaaagatatcttgccatgaaggtatttgttttatagaaacatttacctccagatttctttctctaataagatggtgaatttaaaacactgtgttatttagaaacactgcatttacacttcatttattgtataaagcaaattgcattgaatcttcgccacttgacccaaaggccaaaaattggcatgagaacaatttggactacacatcaccaaacccggggttcacacctgtccactagcagttccagtgccttcccctagccctggatttggcaaagcacagaatgttaagagctaaaagttattgtagaggctactcagtcccacccgggaaactgaggatgaatgagggtaagcggttgcccagagcccgttaacccctccgtggctggggccctgcctagaacccgaatttcctgactaccctgtccaaggtattcatgtcgcatcacactgaaacgctaaacctagagataggagaggccctctgggataaatccctgttccaccaaagaccagccagtcatcaaagatgagagaaggcatccctgtactgtaacaaaaagctggctttaggcgtggcttgtagaatcaatctaactactagacaagttacatctcatatatgtgtggcttctttttcttcttttggggggctacaaggaaggtttggagaaattatttccatcatacctttttgttagcctttttccatttctggccagtaagtaatcccgttcctgacaacagtccctttgttttctcaagtggtctgatgaaggactgcaaaccacagctcttgtgtttttttgcaccatgggttttaaaatccgtcctctgcctcccacaaggagctactacccaagggaagggagaagattaattggtgacctttcgccgtgttaaaataggatgagtatgttgctggtcaaggcagaaacgctaacttccaactgtggtctgttaagagatctgctgggaaccttcagaagcactgccttccaaggcggggccacagcttggggtgttcagcacttgaggacgggtggagcttgttcaacccaaagatgtgtgcgatgaacggatctacacactggaaatacgtatcaaaactgcaacagcaaaatcatattttgtaaattaaaattgtgtttacttactgtgactactgttcagtctttattcagaaacctttttataggctttcttagcaaaaaaaaaatccatatctatggataatgtctcaatcttctgtatatatgttttattaatatgtaaatatttagattttttaaaattactatgttctttaaaaaagaattcaatgcaagcctggttgtgaaaatggtgtataacattgtgttgtggtatcaattcccaagatgctctttatgtctgatctggaagaatacaataaattactttaattgaaaaaaaaaaaaaaaaaaa

SEQ ID NO: 24504 - DNA, 6181 bp, Homo Sapiens
gctgctgcccggttcactgggctatagggacggcctctggggcacacccggcttcgtcccctgcagcgttctctgtgggcagctcggactgtgggttctgtgggcagctcggactgtgggttctctgtgggcagctcagactgtgggcagaggctttggctacgtttgtcatcattaccattttatagcaggttttctggaatgcgaatttactacacttaacatgttaaaagtgaccaaaatgaccagtgatgatcggcagggaatcacagctcctctgagggagttagcagccgggccactcacagcctctccagacacaaggcctccaggcacagctcctgggtatgggcgtgggcatgggccaccctgggggcctcaccggcagagtcatagatgctgctgctcccagagcagactccagtgcagccccttggggaccctttgcgtgggaggagtcgggcaacggcagcccagcgccttgaggtcagcacctgtgtggccggctggagaggggcggaatcaccccggggccttcagagtcgatcagtccatcaggctgggctgtccccgggcagggagtggcccattggtggttcctactgtcacgaagcccatgggcagagaaagtaaagcaatccttaacaaataagtaactaggaactcaaagatcttcccaataaaagcccatcagctatgtcatgaccttaaaatttgaccttgaaagaagagtttgggggctgggcatggtggctcactcctgtaatcccagcgctctgggaggctgaggcgggcagatcgcttgagcccaggagttcaagaccagcctggccaacatggcgaaccccgtctctactaaaaatacaaaagttagccggatgcagtggtgcacgcctgtggtcccagctactcgggagtctgaggcaggaggatctcttgaacccaagaggtcgaggctgcagtgagcggagatggcaccactgcactccagcctggctgacagagcaagaccttgcctcaaaaacaaggaaagaagagttttgggatggcttcccgcaccctgcttactttcactctgaaacaagtgaggctggagcccttcaccctgggaggtgggcagggtgccccaggaggcctctgctgcgggggtcctacattttagtgcaccccagcgtccagaacccaactccctgcagcagtggcctggtggccgtgacgcggcacgtggcctggtggccgggacatggtgtgtggcctggtggctgggatgtggctgtggcctgtggctgtgaacgcagcgcatggcctggtggctgtgacgtggcacgtggcctggtggctgtgatccctggtgcacatgagggagttttagttttgtgcttgcgttcctagtcatgtcataatccagctcagacctggacatgacctcagcccaggccgtgcccggtccccctactccgtggttcccccgtgggactcgcattccttcatttttatcccgcgttgcacgttcctccaagtcctgttgtttcctcggggccatttttaactttctgaaaagacttgaggccatctgtgatcttccaggacttccttttatgtatttcttgttaaacttcatctgcggagcactgtgtggccataatgtggcacctgctgtgtgttatcccgtcgggtgaaacgctacatttaaatccccgcttgtgaggggactgaggggtgcgcaggtgtttcctggtgtgtacaccaagaacacatcttggcgaggtttctctagggtgcatgcccaggaggaagtgtggctcgtggggcaggtggacgtacatctgttcctggaactcccccaactgcaggcccgagaacacggtgtgaggatcgctggctcctgcaggacgtggacgtggcaggggcctgggatctggggtctggcctggggtctggggtctggcctggggtctggctcctgcaggacacaggcgtggcaggggcctggggtctcacacacaggacagcaccgcgctgcatctccttcctgcgtcataggggatgtgggtgaggagtgcctctccagtgaagctttataaccctaaaaagtattgtctgcccctaagagcgtttgcttatgtgcgttctgtctcttcatgtttatgatgatataaattaaaaccaagacattttaagttatctattaattcatttaaaaatcacaatacccattgcatgttaacatacataacatttttatgaagaatatttttctttccaaaattagtgagaagagtggcattgggttgcatatttgtaaatctttcacgtctgggttgtggaaaacgcctggattttcatggcagcttctgcattcagtcggctgtgatatcacatcacgtggccccagccccaaccccaagcccaaccccagccctaaccctaactccactgtccgctcatgagggaatgggatgaccaaggcaaatgccgtctcggcatcattacaggaagagtttaacctcttgagccacactcagagaaaagctggccgacggtgtcctctgctgaaaagtagttgctcgattttaatataatcaaatgttttaatgcttcttctactgttagggtctaaccttcacaagaaacctttcccatttcaaggttgagccgatagtcactgatattttctacgaagagttttaagttttgtttcacatttgatccacctgaagttactttaacgttgtaaagttttgctgtaggtgtcttagatatagtttattagattttcctcaggaatgtgatgttttttgattctattctaaaattcattgtcctctttttgttttgttttggttttgaggcagggtctcactctgtcacccaggctagagtgcattggagcaatcacggctcactgcagcctccacctcctgggctcaagtgatcctcccacctcagcctcccaagtaggtggggctgcaagtgtgcaccaccatgtccagctaattttttaaaatttttgtggagatggggtctcactctgttgcccaggctggtcttgaactcctgccttcaagtgatccctctccccttggcctcccaaagtgctggggataaaggcatgagccactggccccggccaattgtattgtcctctttttaattacatttttctgtttgtttgttgctagtctacagaaatgcaatgcacttttttttctttcgagacagggtgcagcacagtggcatggctcactgcagccccgaatttctgggttcaggcagtcctcccacgtcagcttcctgggtagctgggactgtaggcgcacgccaccacgcccagctaatgtttttatttttatttttgtagaggcagggtattgttaggttgcccaggctggtcttgaactcctgggctcgggtgattttcttaccttggcctcccaaagtgctgggattacaggcatgagccactgtgtctggccacaattcactttagtatctttattttatatccagccatcttgctaaagtttttttaatatttctaataacttacagattcttttagttttcctatttaactgatcaatcactgacaaagaaacaagtgttggttcctcccatccgatggtcctgctacaggttttccttccttctcttacttgatgcagcagggaacagcaatgagtcttggaacagaagcagtgtgaggctgggcactgtcccatctcagggagaaactgaccactccccccatcccccattctaaaaagagcgcttttcaccttcctcatccagaatggcgcccgcctccaccgcgagtcccccttgatgcagagtttgatcgtgaatgtgtgtgtcaattttacaagatgtttcttctgcatcctttgacatgatcctttaattttttcttaagattttcatattcacatctttattttcttatattaaatcatcctttcttacatagaaaaacctaaattgggcaagtgtcttgccttttgtatacactgtttaattggatttactaacgcttgcttcagattgttgcgcatattggagtggactggcgatttcccattttgttgatgttttcaccggcctcaggattgttctaatcctgtataagcagcaccccctccctttctttgtcctgtttatttaagaatgggatgatctgttccttgaaagtctggtaaaactcacttacagggccacctgttttctttaggaaagatttttaactactgctcagtttttaatagctacaggactggctgggcacagtggctcacccctataatcccagcacagggagatttggggaggccgagtcaggaggatcacttgaagaccagagttggagaccagcctgggcaacaaactgaggccctgtctctacacaacattttaaaaattagccgggcgtggtggcgtgtgcctgtagccccagccgctcggggggctgaggcgggaggactgcgtgggcccgggagttccaggctgcagtgagccatgattaccccactgcactccagcctgagcagcagagtgagacgccacttcttaaaaaaatagttataggactgatctctggtgtttcttactgagtcagctgtgggtctgctttttatgtttgtgaaatctctggccttcagctgcaggtgctctcctcttcaggcgctgcattagctgcaggtcaccccaattctctgattggacagttaatttgtgctttctcttcccagtctcactaggggtttagttcgttcatttttccaaagagcctcctctgtgtcccgtctgctctcctggcctgtctgtgttttcttttccattgattcttgtttctcattctctcttttcctccttgttctgagtttaggatccatcccttttctgactcgagctggacacttaggtcattggctttcagcttttcttcctttccaatatcagtaagagtacttaaggctatgaatgttcctcaacctgtaggttttgttgcagcctatgagtttgccacataatgtttgcatgatcatttccttctaatttttttttttatttccactgggatttcttctttagcccctgagttattttaacaatgtgaacagattggttttttcttactttttattgagatatacatgcagaaaaatgcagatatcacaaacatacaacttgaaggattttcacaccgaacatctatgtaagcagcacccagatggatggcagcagctcctgcctgttccccgggtcactgtctggacagcgcagagcagaggttgcggttttcctgtttttgtgcctcctgtgggtgggctcctgcagcgcttgcctttggtggctagtcctccacccagcatcacgggtgtgagatttattccgtgtggccatggaaagcatttattcccaacagtcgtctctaaacttccaaacacactagggcttttatgtgtcattttcattctcttcttaacttctccagcctccaccccatgaggctcccctctccaccccgctgccctgagcaccaatgggctccagtggcccggcctggaagactccgacccctcccccatcgctggcctgtttgcttggcattcatccacgacatgcaggcttagcaagcgtctgggctcacagacagcagggtgagtggggtcctgcctcttgctggttctggtctacacaagtgacagacttgatgtgagacccacaggctggggatccaataatgctgggacatgagaatggggccccaaggctcttgtttgcatcagaggcctccagaggccactgtgagaaggtggagtttcaactgggacctgaggttgagtagggttcactgaatgaagatggggaacttgcaacacggaaggaagggcggtgaagatggggaacttccaacacggaaggaagggcggtgaagatggggaacttccaacacggaaggaagggcggtgaagatggggaacttccaacacagaaggaagggcggtgagtgggaaggttgctgataccaccgggtgtgtatcaggcagtgtcaaccaataactaaccagaaggttatttgctgagttattttctaaataaatggattgatggttggaaaaaaaaaaaaaaaaaaaaaaaaaaaaaaaaaaaaaaaaaaaaaaaagaaaaaaaaaaaaaaaaa

SEQ ID NO: 24505 - DNA, 6470 bp, Homo Sapiens
gaatacatgggaagtaaataaagtgacaacttctggactcgagactttcacagcaacactgagagaatcttctgccacacactccttagttggtgaaaaacactggaccacagcatctcgatccatgagtgatagaaaaagagacattttacatgagacaaaaacacaaatggaggttagggagatggataagtcagtacaaactgagaagaccattcataaactcactcgaggtctatgcattgagagattgtctgccagccctgcacaagagaaggaagctgcccctgggaagtctgagttgtgttcttctccccttggcaaaaggccattaaatgaactcatggaatctgaaggaaaaaccgtattgtctaaaatgatgggatcgcccaaatcagagtttactaagtggacacgaattaatgaaatcacttctgaaccagaccgtatcacagtttctggccattttcacagactatctagagaattggaaaaggaaaaagaagatactcaagggttcactttaggagaatcacctgaatcagaagatgatgactcaggtgatggaatggatgtagcagggcttgacattgaaaccagtttttcttcctcttctaccttggtagcattgtctgttggcagtaatccccagtcttcttctgggttagactgtggtaatgatacagatattactactaaagtattctctactgaaccgcatcattcagaacataaattgcaaactaaaactttaaacacattacatctgcagtctgagccaccggagtgttctataggaggaaacaacttggagaatagcttgtgtgccttgagccctgaattgggagcatctaattttaatgatcagaagagcagtgggatagaatatacaaaagtagtaaaaggcttgaccaaaatacattcacttcctcggtcagtatttatgaaagctacaaaagatgggcaatgtgaaagtcaagatccaagaattgagctcacactaaataagccagatttcacatcattaataggttctcaggctgccttgatcaagagtggtttgggttttgttaaaagtacttcatggcaccatagtgatttattaaggaaaggtggcgaagaaagtctgagagccaaatcagaacatgaacagaagactagccatcagttacaaaaggcaatgccattcctacaaaatagaggaccaacacccaagcctgatcttcttagagaaaataacaatcctgtagaattcaagaccactgcatcggtgttgcctaatcaagtatcagttatcacaaaacagacaagacctgaaaaggttcagagtgccaaattggaacacttgaggccacatagggttgagcctaccttagtaacagaaaatagtggcaacaaaaccggtatgtcaactgtagcaaaatgtgatggggaaagagatgatacaacacaaaacatcacggaggtggctgctgtgaaaagcatttcaccagaagtttctgcctctaggagaaaattagattttaattctccaggtggttcttcaccagtagaaaattctgattgttccacaaatagcagattatctttctctcctgaaaatatcctcatccaaaaccaagacattgtgagagaagctgcagtgcagggagatgggcagaagcaaaggcagcctcaggccacagatctggactccagtgggacacatggcagtgagatgcttccagccacagaagtgactgtgtcaggagggttttctgttgaagaaaccagctgtggagacacagggagatctggtggtgaggccctggctgttgcaaatgattctaccagcacaccacaaaatgctaatggactttggaaattgaaatctacaactcccggtggtgctttgcctgagtgttttggcaccacagacactactttttcttcagcattttgcagaaaacatggagagacacaggatacctcccaaagtagcctgcctggtaccttacattgttacacaggcattcgagaggggggagacgacactgaggtagagagtgaggcatttagctgcagtgaggggagcgaacagcaagatgctcctgatgactcacagaaaaatttaggagacacagatgctgctgtagccgaggtgagaccttccttagaggtaggttatttgacgtcagctctgcaagattttaacataagtactttttctgagctggatagactttccacatcagaggttgtgatgtttcttgagagctgtcagttaggggatcatagttcaggggactctgtttctgaatgttctagtaaaggaaccctaagtaaagaaatgaacaaagaattaaaggcaagtgaaataggagaaaaatacagaaagcaaccctgtgaggaagaaacacttggaacctgtgaagagtggattgaatcagaggaagatgattattcgttaaaaaatacaagtcagctcactcagtgttctttggaaactctgtctgaggttctgaccaagattaggcaagaacttcaaacaaattctgaagattgcaatggtaaagatactggcagtttattgctcttaaatgtaaataacaacatgaccactgagaatttaaaagagaaaagtccatttcgggaaacgactggctcctcatcacatgcttcagaaccaaccccacaagcagctgccttggacactgagggcagctctcccatcagcggtatgcctcagaatgaaaaccctcagagcagaccagaggcccgttcagatgcaggcaggcaaaccgatggtggggaagaagacctgccagaacctgtggagccatcagccttgtgctctgactctgtgatggagccatccatagagcaaagttctaactgcgaggccgaaacaacatttcagtgtcagatagcaacagtgacctcagaagttataaacgtacttataaataaggatcagaatctagtcattgaaaagggggacaactggacaatcatcagtggtgtagctgtcttgccacatgtggaccaggtcacactgtgtgacattcctggagacatccctatttctcaggatcaaggagagctggaagctggttgcatcccagtgacttctgctgagaagtccccagaggccagtcacactggccctgcatttcaggaggctccatgtggcaataatctttcatgtccccaagaggatgtttcaagcagtggtcagagcaccaactttgataagagtcgtttgcgaaatagacccgttaagcctagtatatggattagttctcaaatctatgatcaaaacttcgagactcagattgttgcgtctgatcacacatattataactcaaaactagagccatctggcaaaaataagaatcgatcaaagatttcaaacaaagatcagtcaaacaaaccagtaaaaacttcagcgtcgagcagagttgaaactcatcagagtgaagttgctcagtcattttcaggggaaaaagctaatacaaaaactcaaagaagccaaactcagaccattttagcaaatgctgatacatccactcctacagattgttctcctgacacactgagtaaaatacggcaagaggtggggcctcctttgccgcctctgcttgctcctctgatagctacacctccaaggacttcacagccactgtctccactgatatcgagttctagtccttcctcaccagcctctcctgttggccaggtttctcccttccgtgaaaccccagtgcctcctgccatgtctccatggccagaggaccccagacgtgcctctcctccagatccttctccatctccatctgcagcttcagccagtgagagggtagtgccgtctcctctgcagttctgtgcggccacgccgaagcacgcacttcctgtgcctggccgactcccaccctgtgcatctggccacgctgctgtgggagggcctcaggagaattctgtgaaaatccttgacaccatgtatccagagttatctgccagggcccggaccctcaacatcctcaaagggaatattcaactcacacgaggtccgcctgctgactgtaagaatttaccgggacctgccagtgctatgataggattcaaaacgatcacttcagcagcaactgcttttgtcaaaactgggagcagctctggtggtgactgtaaccaagacaagtcaagagatttggggactcagcaggattcaagcgggaaaagaacactgtcaacgtctacactgagaagtgctaaaagactgcgcctggacactgggtccccagaaccagaaaccaggggagtcactgcagaaggaatccacaaaaacctcccagggaacctccctccagctgaagttgcaacaacaaatgaggaaagaagttgttctagtccagccgtcagtgcagtttcacagttgcctttaagcccaaaagaaactgtggagtcccatgataaagccatagctaatgccctgaagaaaattgcagagttttcttttgatctgttacctgtcattcgtagtcatgtgtatgtgggaaatatctccaaaaagcccgtaatgagagatcaagagaaggaagttgtttatgaatttagcacaacaaaaaagcatttagcagagtgcttgcttcactctattctctcagaactaaaaattcagaagatatctatggaccacaattacattcacgccctctgcagggtgtatgtgggtatttgtcggcaactcggagacttggaaagagctcgtttgttttgctacagcctacttaaagaagattttccggagtctgaaaaattaactttgtttattgcaaacatgtggcatgatatatttctctctcaatcggtgattaataaagcaatgcagttagttgccaggcaacgtgctaaaggagaggttctgaactgcttgagagcttttcttaattgggaaaagaatgccccggtagatgttggcttcatggtttctaagctgcttttgaccatacagttatgtccaaaaacagaatttcaacctagtgaaaaatttggtgaagacctaagtgataacacttgggaatacatatttgccattgatctgctctgctgccatcagaaatggatctggacgcatgataacatcataagtaaggagctgtggcctgtgatggataaatggataaaatacagaaaaggacatgcaaacattgcgtatactcctgatattattatagcctcaatactgaggctgattggtcgtttaggccaattgggtttgaaagaaggatttccatctgctgtgaaaaatattagttcggttattggtatgtttatacagcatgctcacgatgaagatataccatggggtatacagttagcagccgtgtatgctctttgtgacttgagtcccagcaatccagcagaaatttccaagatcctggaagcttggcggagagaggcctccaaaagcgttccgtctgcgattgtcagctgcctagaggaagtcagtgccctgagcacagaggagcttggctgacctgggatgccactgaggcttgagaagtgccttgacacattttgaacacaaatagtttgatcagctttcagaatacaaagggaggtttcaaaacaaaaagacataaaatagataaaacagaccagaggctctccttattgtttggcaaggagacaggagaaacaagcagtcgcatagtcgtttttccctaaatctaatacgtttcacttaaggctgttgtgatctgtgacatatgggttatattattgtgtctttgtcaaacaacaaaaacttgaacttagccctttttttgctgcagaaagtgtccttttagtggcttcttaaaattgagtggcattttataatgaacttaccaatataaaaacatgatttggttcctgagctgttgttgttggacctgtgttccaatgagtgactaggaaaaaataaattggcaaaaacctagagttttctgctatctttgctggaaatgagttgcaaaagtttttctcaagatgtagtgcgtaattgatcagagcaaaacatgcagagcccttagcagaaacccactttaatgcattttcttcatatccctaaagttccttaaaaatatgtgacaatgcatcaggaagaggagaactgaagagtagaagttcccttgcagatttttttatcagtgacatgtaatgagcaattcacagatgagcgcaggcagagctctgtgtgccgtgtacatatggaccgtgctatgatgtgtctcacattggatgatattccactttgggaattttagtatttgtatatagaaaatgggtttaataactcaccatggttttgatttgtcttatattcgttatttcttaaaactcttgtatgtgtttttataataaaaaataaaagtaagccatggatattactgttctgaaaaaaaaaaaaaaaaaaaaaaaaaaaaaaagaaagaaaaaaaaaaaaaaaa

SEQ ID NO: 24506 - DNA, 6055 bp, Homo Sapiens
ggaattctgtctggagtcatatcttcaaccattgctaatccaactgatgttttgaaaattcggatgcaagcgcaaagcaacaccattcaaggaggaatgataggcaacttcatgaacatttaccagcaagaggggacaagaggactgtggaagggtgtgtcccttactgcgcagagggctgctattgttgttggtgtggagctgccggtctatgacatcaccaagaagcatcttattctctcgggcctgatgggagacactgtgtatacccacttcctctcaagcttcacctgtggtctggcaggggccctggcctcaaaccctgttgatgttgtgaggacacgtatgatgaatcagagagtgcttcgagatggcagatgttctggctacacaggaaccctggattgcttgttacaggtaagagcagatgtctgtctctgcagggttgtgaattatatatttttttgatctaagaagtaactaaattatgaaagctactaaaactaagatgaatgatgctttaaagcccagagatgtacatgtgtgagaccatttttgccacactgtgcttagcttttataaatacaatgttgttttctttatacctccatctgctgtgaaaggtgaggaaatatttcctgtgattataaaagaactgggtctccttccaaaatgtactttcttcctgttgggtcaaactagtatgaatatccctcattcagacatctctgttaaaggaacacatcaatcttactttaattctcagtttaaataattgggcctcctgttttatgagtgggtgaaaggtttcacctgtctctgccactagattgccagtagtaggattaggagtcacttttttttttttttttaaggtgatatttatttatttattttcaagttttaatgtattttagattcagggggtacatgtgcaggtgtgttacataggcacatgcgtagtggtggagattgggcttctaatgtacccattacccaaatagtgagcattacaccagacagataatttttcaactctagcctctcccctttaggagtccccagtgtctgttacttctatctttatgtccgtgtgtacccattgtttagctcccacttaaaaatgagaacatgtggtttttgatcttctgtttctgcgttagtttgctcaggataatggcctccagctccatccatgttgctgcaaagaacgtgatttcttttttatggctacaggggccacttttgtggttcctgttttccaacatgacactagcacattttattcttcaggtgttgccttaatgaagcaaagacacttatcgtattcatccacctgacatcttgggaaatagtggtactctgaatgatatctctaccactattgcttctttatttgtgacctgttcaggagcccacatggcacggaagcaacagaccgtaattggaattaaatctaattttttcctcactcaacagtgtttatctcctttgtgtggagttcattcaatccttcgtgtggggttgttgggcatggagccttagtcttccacccacacaagcctctaaagagcaaagatttcttaggcagtccttccaaacaggattttatttttaagaaaaataaatcagtctggccactaattattattattattttttgagatggagtctcgctttgtcgcccaggctggagtgcagtggcgtgatcttggctcactgcaagctccgcctcccgggttcatgccattctcctgccttagcctcccgagtagctgggactacaggcgcctgccaccatgcccggctaattttttttttgtatttttagtagagacagggtttcactgcattagccaggatggtcttgatctcctgacctggtgatccacccgcctcggcctcccaaagtgctgggattaaaggcgtgagccaccgcgcctggcctggccactaattattaatgcatttggcataattagaaagttggaagttaacttttttttcttcttttaacagacatggaagaatgaagggttttttgctctctataaaggcttttggccaaattggttgagacttggtccttggaatatcattgtatccttttctgttgcaatagatctgaaaaaagatacagctaaagaatactatttgtataaactctcatgttattaattataatttagaagtaggttctgattattttgagttcctctgatgctaagaagtcactacttagtttcttttttaggaagtgtaaagtctccgtgctagacactgaatcttgctttgatggtggtattattcaaaagtagtgatactactaaaaaggtttagttagactctgttctagaagctgagggtatttacgatttcagagagagagagaggaggattggctttatagccctagccaccttgggaaggatgtggttggcaacagtgtcttagaatgcttatcttagaaagtgcctgaagataaacaggaattagctccggaattgtttggcaggccagcacgcttcctatgtgccacagtgggaggcaggaaaggaaaggcagttaacttttttttgtttttgagactgagtctttactctgtcgcccaggctggagtacagtggcgtgatctcgggtcactgccacctccgcctcctgggttctagcaattctcttgccttggcctcctgagtagttgggattacaggcacataaaaccacgcctggctaatttttgtgtttttagtagagatggggtttcaccatgtcagccaggctggtctcaaactcctgacctcaagtgacctgccccttggcctcccaaagtgctgggattacaggcgtgagccaccgcgcccgtgaggcagttaattagacactgaagggcagagtgatgaagcaggaatgctggcttttgctgtcctcttgttgctcttcatcagctcctgcctcccaaggaaggatgcatagtggaagcctttgaggagagcttcccagggcttgctaactctctctctctctctctctctctcaaaagcttacagtgctggaaagtttttccaccacagcaaagccacaaaagcttatcagcgtagatgccatctcagaagaggctgataccaggggatttacatatctcagctgtgatctttctgctccaagctgaccttggaagatagtttgatgtggttaagggtggaaccccttttatttaatcgtgtccatagcgtgggtctgcctgtacctatttgttattaagtgtgccatttgtaagtctgttgttatgcactggagttgtgaagatggcattttctgtgtcatccttaacccataaccacagttctttgtgacatacgagcagttgaagaaattggatttgtgacaagccaaggctgcatgagacatctttctgaaaatggtaacttctgaaacagcaaagcttcctgtgtttcactctgcttctcactgcttggctcatcacagattctgggatgtgagcaacagatgaagactgggttagttgagattgctgtgtgttggcattggatgctcttcatcaaacgtttaatggcataaactaacatccaaacactagtctttaccactgaagtgcccttcaacatcaaagataatatgtgaaatgcatgtttcttgctaaagaaaacttgcaagaaaatcaggagcgatgtattgttttattcagggagagtagctcctgatgcatctcagctcatgactgagaatcagactgctctagaaaagctcactggaaccatggaatggagcctccgagaaggtgttatggtttctgaatttctgggagattttgctccttgtcaactgaagaaatttcatgtatggagacctggactgttcaaccccaggtataaacggtgcaggaaatggatcctaggaatatcacactgctttatcatttcctattttggcaggatcttccacttataataagtgattttaagctttgaagacttgacatttgtgagaaattgttacaaagtaataatctctaaattcgtggtggtgttatgtgttggctttgaaggttgcaaggtctgtattggtggggggtgttttcaagcagcttaggttctgtcttaggtcatgttagtaattagctttatgatttttagcaaagcatatgtatttctcaatgagtaaaatggggataataacgtctattgatgtagagggtcaaatgaagaacaaatagtagctgctgctacttgactggaaaggtaaatgtgtttacatcatgctgtggaacagctctaaacagtctatgtagaagaggggcatgttctcatgggcttctcatggtaattgtgaatgaagccctttgttaaggtcttgttgaagaaagaacactgtataagttcaggctttagtacattttccttagcaaaatgttggtagtgaatcaaagagttgatttttccaggtttccagtttttactttagtttatgttgtgcctgtcttggactttctgtttagtttggatggaaaatacctgcttgaaattttaaaaatgatttctttagtgcatctatttagctagtttctgataggtggtatgtaatattttccctttttctttccttctgtagacacaataagtcattctccctcttctttttttctttttctattttcttattctttactctaacctgcttcagagaaagagccctcttccttcttgtcttcatcttagtcttttcaaaataaaagatgactgtgagaaccccaagaacttccacttctgggaggcagccacaggacagggaacatatttatttgggtctcttcagttccccctttgagaacaacattaaatacatgttagctggggctccagggcattctccttccacagtagtgcggccaaattcccagtctggccagtctctttgttgagactgaatagaaggactgcaggtttttttggaggatgagataatttttcctcgcaggcatttttcccttgccttccttatgcatgaatggtccctttgaatattatttccaaaagtgagagctaagacaaagtcatcaaaaagagaggataacagaaggtgggggcgggggcggggtgcagtggggtagggttacctgttaattgctgagactcagatgaaagtccagctctccctgggcaaccctagagggcagcagaggaccccagagctcattcaggccttgctgcttgttctaaactacaccttaggattttttcttctttccaaagcattccattgattttataaagactttctatagagaggctttcacttttgagttctttgagtttaaagattgcttttcttgaaatgctctttttttaatgtagaaaaattttactttttcaaatatgcatacaatttttaaaacagtagaagcaaattcattttaatgaccatgtaaagagcgaatgtcagacagtattattaccagtttattcaaattacatacatgttcctaccaaggtggaaagaaattcaaacctcatggtaaaacttaagcacgatttaagataaaagcatagtatttcttcagtgtagacttattaagtgccttattgaacaggatcttaacctgctttttctgtttttttgaaagagttaatgcaattgttgaagcttctaaccaagaaacaacttaaggaattgggagacttggtcccctcgttgtcagggttctggctataagtacctccccacctttgggttttcttaaatatgccaaaaggaattctagtttttataaccaatgggtttttttgtttgtgtgcttatggatttgtgtaatcattgatgcttaatgttgtggattcataatataaaaagtggctcctgtcctttatatttattcatgtgctagaaatagtatgcattatataaagagtatgaagttttcataagcctttatatttcaagctctttatttaaacattgttggaatatgtggcataagccttgtttcatttatttaataaactggagtaatatataataaaaaaaaaaaaaaaaaaaa

SEQ ID NO: 24507 - DNA, 6389 bp, Homo Sapiens
gaaggagagactttgctccctgtcgatgccgtggctggacaaatgccgctctcaactgctacagaccaaagtctacgctttaaagatagagaagccattctgtcaaagtgaaaacagaagcggtaggtaggaagccgccccactttctttcaagcacagagacccagagagacgcccaggagctcccgaaaaaaacgttgctgattagagctgccgggtcagaaacagctgtgagacactaaagtccccactgttataattattcaatatgttcccactgactgaggaaaacaagcatgtggcccagttgttgctcaatactggtacttgtccaagatgtatcttcagattctgtggtgtggattttcatgcaccttacaaacttccatacaaggagttgctcaatgaactacagaaatttctggaaactgaaaaagatgaattaattttggaagttatgaacccacctcccaagaaaattcgactgcaagaactggaagatagtattgataatctaagtcaaaatggagagggaaggatctctgttagtcatgttggaagcactgcttccaagaactcaaatttaaatgtatgtaatgtatgcctaggaattcttcaagaattctgtgagaaagatttcattaaaaaggtgtgccaaaaggttgaggcctctgggtttgaattcaccagcttggtattttcagtctccttcccaccacaactatctgtaagagagcatgctgcatggttgctggtaaaacaggaaatgggaaagcagagtctgtcgctgggaagagatgatatagttcagctaaaagaagcctacaaatggataactcaccccctgttttcagaggaactgggtgttcccattgatggaaaggtattgggtcaacagcattgttaattttattctctgattttactagttttacttaattatatggcagggttttggttagccaaaaaaacttcttttaaataatccagtgaaggattttttaagcttttaaaatgttaaattctgatagtcttaaattgaagtcaaagcatttctttttttctttttcccttagacttctttatgatctaagacacttatgaaggtaccaggtgccctaattgaccttaaaaggttagaaatgaatctttgccttgatgcaaagcatcagacttgatgcaaagcaacatataaataactgcaagcaaatatagagtcaactctggactatttaattttggtttatctgtggctaatcttgttttcaaatgcatggacagaacctattcaactacaatgagtatgggctcaatcctaccttgttggtatctcaaatccccctgtttacttttaggcagtaactgcctttgaaaacagaacatttcccttttccagagcagaccttacctcagtctctgaaatgggttgactttcagggaagactcaacaggcttccaggtgtgaaaacaggaaggtcatcttaaattagattttaatattatggcctcattgcttcatcattttgctagaaggaaattccctgaatatcagatacacccctattcaaataaaatcacaaaaccatctactaaagctaaacagtttttcaaaaccattctgaattatgcagtaatatttccttctgtaagaatatgctctgttctgtaaaccgagtattgagagaatagagaataaaaccacttcacagatagcatgaagaggaaatgaggtaatgaaagtattttggaagttagagaagtcattaatgcaaaatatttttacctcaaatttcagttttgaagcacaaataattttacatgttgtatcagtgagaacagaaaatagaaaacaaaagatgtgggttgagtgaagtttccctgaataaaaggaatgcgttgttcattttaattattgtatagattagaataaggagcgaaaaaaaaaaagctattcattattgtgattctagagtagctaataggtctactaactatccaatgaactcagtaaatataaagacaaaattgcaacatagtatggcatttttagctattcctgcccctgacccctccccgatatggaattttgtatattctccatggaggtaaaagtataaaatcatgctttttttggtgtacaaggatgttcattatagcattttttttttgttacagaaaaattttctacagcttaaatgtctgacagtccctagagttgaaaagatttccatgatataatattaaagcaattttccaaaagcatgtcttaaaaaataatacatatacatttatattcacaaaaatgcctagaaagaaacatcaaattgttaatggttctgcttcagtggcgtgggattgaaaaactgtcttgtatttgatcattttataatttatgtgtataatttttgtaataaaacaaaaaaaaattaagatctggttttaaaactcaaatccattaagacgtttgagcactttaaaaagaagcttcatatggtttttagggatctgaatagtatgttttttgccttgctaataattcaaatcatagtattggcagaataattcttcatttctctctgttattatttattttcaattctgtaaattctcattcatctttatacctaatttacacatttgtccaaaaagtatacacatttattttaaaacttttttggtaggatcactaatgactgagttttagaagttaaaaaaaaaaacaaaactatttcctttacagctgccctgataacaagttgatttgagagcagtagtatttccagtttttctggtcattcttttctgagccaatctttgagaattaatttctatttccattaataagttgttagatgttagtttccttttgctcatttttaaactgtctttataatttttagagcttgtttgaagtgagtgtggtctttgctcacccagaaacagttgaggattgccacttcctgtaagttgccatgtaaacaacgtcaatggtgtaaaattgttaatgctgtttggttttcatgaaaatagtattgcttctcttcctaataagaaagagaagaacttgttatgtcttagtaggtttaaaatgtgccctcaaaaaaaaataaaatgtgtccttgaacatagttcctgggcaaaccgatatagctcatacagggactcattttgtctgctcctgatgtcctgagtttagcagccattttgtatgaaatatatttgaattatatctaccccaaaataaactcattaaccttttatattaacttgaattttattttagagctgcgatatgcccagattgttttaagccagccaaaaacaaacagtctgtattcactagaatggcagttatgaaagccttgaataagataaaggaagaggatttccttaagcagtttccttgtcctccaaactcaccaaaggctgtatgcgctgttcttgaaattgaatgtgctcatggtgctgtttttgtggctgggagatataataaatactccaggaatctaccacaaactccttggataattgatggagaaaggaagctggaatcttcagtggaagaattaatttcagatcatctgttggcagtatttaaagcagagagttttaatttttcatcctctggaagagaagatgtagatgtgagaacattaggaaatggaaggccctttgcaattgagctggtgaatcctcatagagtacatttcacttcacaagaaattaaggaacttcagcagaaaattaataactcatctaacaaaatccaagtacgtgacttgcagcttgtcacaagagaggcaataggacatatgaaagaaggtgaagaagaaaagacaaagacctacagtgccttaatttggacaaataaagcgatacagaagaaagacattgaattcctaaatgacataaaggacttaaaaatcgaccagaaaacacctttgcgcgtccttcaccgaaggcccctggctgtgcgagctcgcgtcattcacttcatggagacacagtacgtggatgagcaccacttccgcctccacttgaaaactcaggctggcacctacattaaagagtttgtacatggagacttcgggagaaccaagccaaacattgggtccctgatgaatgtgactgcagacattctggagctggatgttgagtctgtagatgttgactggccacctgctctggatgactagctttcaaatttggagacaaagagtatggttttcctggcatgatgtggacatccatggagcacatgccgtaaaatggctgtttacccaccataacggtgtcttgaaaactatttggatcatgttgatctatataattgttaatttgttgtaacatctcaggatctatatatgtgtatattttgtgttaaattgttccaaggatgtcttaggatttttctcattccctctttcacccccacaaaccaaactatgaataatgaaataattctccttaattctttcatttagagaggtgcacaaacaggacacattctctgttaacctaagaagctgtaatttcagcaagatttccctccacaagagatataccacctttaaaatcatgttctaatttttgtaaattatctgaataaaagttatatctagatttatgcagcataacatcctataatagtctaagattgcaaatgcaaatctgacatcattattttccccaggaagcctcaaacaagctattaccaatgaagttcttttggctgtgatttgtcataaatcttaaccaaactatgaataatgaaataattctcattaatactttcattaagaaagaattttgacaatctaaaattgtcaatataggtttcctgtggagggaaagtaaaaccgtaggagccaaggcatgccatggtaggagcctttcataaatcttttaaataaggagaaacaagtgcctttaataacttcaatcccagggttaagaatttgaaaaattgagattgctaaacaaagacgaactggtattatttcagaatgcttcaatatattatccaattataaacattttaataataccttattaaagtagataggatattgtctccattttataaatatggtaaccaaagactagaagttaaatgacttatccaaaattgttagctacttctatattgaggactagagctgaagtttcttggtttctagggtctttctaataagccctattactgagcacctgtttgtgtgaaggggcagctatggatgccatttaaactcatgtaactgataattaacttttggaatgtagttaccaaatcaaagagcttaccaaaaaatagcccaagactatttaatacaatcttatatagttaccatttgttattaagttaaacctcagttggtattatgaagaggaaaaacattaagctaaacctaaaaaaaaatgaatgggtcatttaagtttcagaaaggagcctcattacaatttcagatttgagtataatttccatcaccctaattcaactatttgagctttttttaagaatacatgtgacttgactagtattagattactaaccatttcccatctctatattaaacataaatcacagataccaagattcactttagatatgaggaaaatggttttaatggacacaaaggagtcagccacgttggaaccaacatagtttcataccacgttgaaaccatgtgtttgatatgcaaataacagcaaataattttttcactcttgtcaatgccaatgcattgaaaggcccagaaaatgagaaaaggataacaaacttttgataaaaaggtaagaatttctgtgtggatgttcctcagtttctgggaaaattttgctacaaaagagatttaaataatttaggaggcagtcttttgcatggtatttttggcttacctttgaatctagtggacctgtaatatgtaagaatgaagaatgtgcttagcaaactgaaatgagaagatttctatttcttaaatttctattcctgagattatataaaatttcacgcaaagagtaagcattagctttaaatacttcttccaaatgttcctagaattttgagacaaagattgttaaaaattaatgtatgtctttgttttaggcagaactggaaatattaagtagtgagagtactatagtttcccttttgcctacataaaagcattttaaaattagttttatgatttctttgtaagctttatttaaattcaaagtctttttcataacacttaagagaaagagccctttgtacttcttagtatctcttatatagtcccaaatatagtctgtggtttattttaggaaaaacatcaactctgaatacctggaaaagtcaaaagaaaataaagttggtaaaatgaaaaataaaaaaaaaaaaaaaaaaa

SEQ ID NO: 24508 - DNA, 6707 bp, Homo Sapiens
attgtatgtcgacactgatatcctttttttacgaccagttgatgatatttggtctttactaaagaaatttaattccacacaaattgctgcaatggcaccagaacatgaggaacctcgaataggatggtataatcgctttgctaggcatccatattatggaaaaactggagtaaactctggagttatgttgatgaacatgactcgaatgagaaggaagtatttcaagaatgatatgacaactgtacgactacaatggggagatatacttatgccattgcttaaaaaatacaaactaaacatcacatggggtgatcaagatctattgaatatcgtgttttttcataatccagaaagcctttttgtttttccgtgtcaatggaattatcgaccagatcattgtatatatggaagcaattgccaagaagcagaagaaggaggaatctttattcttcatgggaacagaggtatttaccatgacgataagcaaccagcatttagagctgtttatgaagcactgagaaattgttcttttgaagatgacaacatccgttccttattaaaacctttagaactggaactacaaaaaacagtgcatacatactgtggaaaaatttacaaaatatttatcaaacaactagcaaaaagtgtaagagatcgttatgccagatcaccaaaggaaaagtgattcttggtgactgcttaatcaaatggatgaaaacaaagaatcggaagataagtgtgaaggaatcgtcttggatgaagtattcaggaaggaattactcatctccagaataattttttttttcctaaagaagttaagtaagcagtattttcaggtaatgaagaataagttaaaatcttgggcctcaacattgaacattttttatctctgatgttttgtaatgttacttgctatcattccagtattgatgaaaatactattgaatgggtttaacctgcagacttctgttgactcatactctcaagagtggtaggggtgtgtagatggagaaaatgtacctcaaacagtgccaacactcaagactgtgagtagagcaataattttatgtcagcactaacctcactttaaaagtgtgagaaaaaagtttgtttacaggagcagaaacaggtctgttgtttctgaagaaatgtgatgtaactgatgtaaccattgacaatctatgtgtgcctttatacatttcatctctgttttaaaatatttttatgacaatcatgtttaaaattatttttagattacaagtaagctgcatgttaaaaattgagctgtgtaaggtagaggaaaaatagtgaaaactttgggattttaatctgtgtgtgcgtgtttgtgtgtgagagagagtgagaaatgtagtgtttcattttgtatgcattaaactgtcttgccaaaactcagatctaagattgttaaatagatatttggggaatttttttttaatcactttaaatgaaaaacgtcagctttactgggcattctggaagcaaaatatattatgctgatggtaaagtgagaaccttaagagtatactcatgatggtggaaagtgtgatggaccaaaatgcataagctatatacttcctgtgagtagtaattttagttacaagggagtagaaaaatatggtccatttaaacttgtcttctacctcataacggccttgcaagatacttttgaagaagcaaatgtctagagccttactttaagtaagttaaacaacttaagtggatgatttggaataagattgttacatccagctgtagaaaatgtggttttaattgggttgatgtgcatttttgaatatcacctaagacagttaatttttttaaatcttgagaaattacttctttggcattcttgacctgttagctaatataactatagattctgaatacttagcatataccatgctggggcacatatcttattttaccaacaatatgattatctatatggttatcttctttttctccctgatattttaatgctcaagtagaaaatggaaaatcatgaaggaaaaatacaacctgtgaaaattgtggcagttagctttgtgaagacacagtgacctctgtggagacatggaatatgcagaaagagatggttagtacagttgttctgtcgtctgcagttcagtcagggacaaattgagagaggaaagtttaagcagggtgcattagaagttgataaccagtccggcattcttagaacagatgggtttagagaacacgagttgtagttccttggcagaatgccatggtgaatataagaaactgtgaaattgagcttactgagtagaaaatgagaatactaaaaatgtgaagtttggagggtatgtattagatcatttctaatggtcctcagataatgatcattgcctgcctgacaatgtaagattcttgttgggagcttaagaatagattcctgagctaggcctttggagactctggcatgctgtgtctaggagggagtctgtaaaacaatttttaatgaagaaatttaaaaattacacaaaactagaatagtgcattggtactcaacatccagatctgacacttatcactatcttaccatgtttgcttcatttgtcatttttttgtttgcttaagtatcttaaaatcccatacattgtgttatttcactgctgtgaacactttgggtagataccacgatatcacacctaacagaggcagcagcagtccttcggcttcatctcatagccagtccttaagcaaatttccctgattatctcaaaaatcatcttctagttggtttgttagaatcaacagaatataagtcacatgatgatttcgtttttaacaatcacctcagatgactttgatgttagctactttgagaaccactggaaattattttgccaacttgaaagttcaagttaggataccacaattcttggcacgtttggtggattataaatgtgattttgaaatattagaggaagcatttggggttaatgacaggatatgaatttatattagtaagtttgataagataaaatttcctcagtgaacggagaatctcagccccatgggctctaattgattgggacttgtgtagagcgtggtcacagtttaatccaactggactgtatgctgtggtctcactcatgttgcggcttatttacactgtcacacacactacattgtggatcagttggaaggttcttcatctggtttatttagacctgacctaattgatcattttaccataaattgaattatagtgaaaactgtcttttgggtactgtttctacctaaaattaaaggtatcacaaaatatgtataataatttttaaatgaattttctgaatttatctttagacaaggtaattcttttgaattctaaagaaatgcagttcttggagttgatgagaggttaaattatagatggacaacttagagaacgtattccatcttcatataaatggtctttcataaaacatagtgtatctatgcagtttatataaactacatgatttattatttgagtctatgtattctgacctcagaactatctctgggctacagtattaccaaagtgggatgcctttaaaatgcagtcaaacttcatttgtatgaagtagaaaagaacttgggaaacctttaaaaatatatattgtgatttatgctttaagaaaatgcatacttttttctaatgaagagtagttcataatatataagggttttaaggccctgaaataacattagtgcttactcattgctctctcatcttgcctccagtcagatgttattggtatagtgaaaagaagaccagattttgaactagatctggattctctttttagtaactcaggcatgttatttaaccttctctgtgccttaggtttttaagtacaatcagtgtacccttcaaacctcacaagatgaaactcagaagagataatggatttggaagcattttgcgtggcttatattatgccacgccagtgttactgttgaagttctgttttgttctgttgttttctgtacagagcgttcagtttactcaggctgaatgttttctgacatatatctccagtatgaatttgtttatgtaaggaagagtttttcaggaagagaaagtagagaagaaaagaatgatgtaactaaatcaaaaaagaaggaaaggagaggaagtgagaaaaggggtgaggaaagagaaaggagtaagaatggggatggcaaagggcagagtaagagaaaagatggaatgagtgtatggaaaattgagaagtagagatggagagaaatggtgtggaaacatttactttttgagttgtagccctcacactacatcagtttgcttgcctgggctctctggggtcaggaaaggtgctgacttccatggaatggggcagcagggcctgctgtatttggtttgttagtactagagttgtttcccaatcaccctactcactgatcatttagtgccaattcaacattttatgcctttttttttagtggatcccagtttgtgagctaggacctgtggaaatacaagtatcttcctttttaactttattgttttagccatcccaagtgttagactgcaagactaactacatattccccagtggaggttggaagtggaggggactgcttcattaggtctgaagggggccaaggaatgtgttgcagcagttttcgcagatgatactgacgagaggccaggtttgggaatcactgccctgccttggatggcaaattaagcaataaattacacctatttattcctcagttgggatactttcagttgaaccattctgagtagatttaagagaacaaaagacagcagaaataccttaaaagatattattggctgtcttatttttcagatatttgtatttaataaataccttagtagtagtcagaacctctttgagatgtttttagaaagaccactgatttgttttttaaaataatttttttggttccttagggtagagaagaaaagtaggggtgcaatatgtcaggtgtggggccagttatccatttattaaatgcaatttcaagtgtcttaaaaacaataattgccttattgcattttaatatttaataaagtagattaaataaagatttgtattataacagttattcttttatccattgccaaagcaacccttttttgcctattaaaatctggctaaactgttctgatgttgtttcttaattcattaaacatgaaactaggttttacaaactaaattatataaagacagaagtctaaaaatggtaccagaaaattttttttttaaaaattaatgtgttattcaaatatccagcaattaaagactcatgagaaaaacagaatagcatattagatgtaacagtttaaaatggattgcaaatcaatgtcagacttaaatagaaaatatttattatcacctcatttctaccaataatttcagatgtttaatgggactttgaaaagataggaaaaaatagaaatgaaaatttatctcacctttaatactgtgaatactatttggagggtccctggtcagacatttaaatatcaaacttaagaactgacatggagcctttgattagtttatatacaggatctgaatatttacacacatagcacactatagcaacctcttgtaaaaaatcatgaagatagaatgcaacagtgtatattctattaaaaagtaaattggctgggtgtggtggctcatgcatgtaatcccagcactttgggaggccgaggcaggaggatcgcttgagcccaagagtttgagaccagcctaggtgacaaagtgagaccccatctctacaaaaaaattaaaaaattatccagatgtggtggtgtttgcctgcggtcctagctacacaggaagttgaggcaggaggattgcttgagtgcaagagtttgaggctgcagagagccaagattgcaccattgcactccagcctgggtgacagagcgagaccctgtctcaaaaaacaaaggaaattggctttgactatgaaaaacagccattttcaacctttttataaaacctcttcagggaatattggaatattatttttgtcaggcaaaaataatccagggcttgagcattgctgtagaatatgttatctgttcaaaacttagcagagcacgcatgcatcacatgcattgtcatcagtatttgagagctgaaccaatggtttttgatggttgccgtaacagaagatctgtgaagaggatggtggtttgcacctgttcctgaagtcaaactggaaaaggttgcaggtatttcaattttctcaatcattttgcataaatgtattaatattttgagtagtaatagttctaaacctgcaggaaggcatcattgtatactgtggtatgtagagaatactacttttacactgctctttatcttaaaatgttttggtatactgtgaatattttcctctaagtatttggtgtattttgacagttattaaaggagaatataaaattaaagattctggtctaaactaagaataatggaaagttgcttcgtcctgccttagaggagttttcagttcatcctcttcttgagaaactatgtgttgctgttactaaataaacatttactcaataaacgttttatttcctcaaaaaaaaaaaaaaaaaaaaaaaaaaaaaaaaaaaaaaaaaaaaaaaaaaaaaaaaaaaaaaaaaaaaaaaaaaaaaaaaaaaa

SEQ ID NO: 24509 - DNA, 5185 bp, Homo Sapiens
cagcttatcttcctattgcagtgagtccccgcaactctataggaggaaaaacaaagccacaagggtgtgtttttgtgtggcttgcattttgaataggtttctgtcatgtcttttcctattgtgtggaggctgttcacttgaaaacagtatgcacttagagtttttaggaacaagtttgtttattcagcagttcttaaaagccgtttcagcagtcttattcagcctagggttccaccaaggctgtagcagcggaaatctaccttcaggtaaattatacatggaaaaaccactcagagccgagtggtgtctccgtatagcagcttagtcctgagcagattgagcgatggtttttgccagctgcttcaaaaacctgacaggcaggatctgtttagactaaaatcgattcctaaaataatagacctggactgaccgtaattatgtaactgcagatctaaaaatgatgaaggatttccttataaattactatggaatcatgactggtcctatactatctgggagatgaaagtaaaaagaaagcgtggggctcccatttccctggtccctgaagagttcttggggtgctgcagcacacacattcccctgcaagctgagcctgctgtgttgctcttcccaatacccctttcctcagggggcaaaatgcagaaaccctgtcccaaagaagtctccctatgggattctccttagctgtagtgatcatgattactgtcatctttgtcccccctggtgttcaaggtaagtttgaacctccgcagccttgccagctttttggggtcgccaaagcacatgcctgcccttgttgtctttctcccaccccgtgcagagtacatccagaaatacgccacggaggaggcgctgaaagaacaggaagagggtaccggggacagctcatcggagagctctatgtctgacttttccgaagatgaggcccaggatatggagttgtagtagaaaaagcacctgcttttcagaaagactattatttcctaaccatgagaagcagactataatattcatatttaaacaaagcaattttttttattactaaacaaggtttttatgaataatagcattgatatatatatattatatatcaccctttagatcttgatttcttggtcatttctcaacctgaggtgcatagcatattcccacattccatttggtagcaatatgcggtctgaatgcatgcattcatgagtccatgtggccaagtcagcctgtgtgctactgaactgtcgaaggaaatagccgctctgataggtagatgtgagtaaaaagaacaggaaaaaattgcttcttttattggtttccaaagaaacaaaccaaaccaaccagctcttggatgtgaagataaaatagtgcttttttgaaatggagaggaaaaacttggggaggaagaggcctgctgtgggggcatcggagccagccatgtaagaatcagagctgctccttcctgtgaatcctaggtggccctatgtcttctgtggagttacagtataaagcagggagctaattaagagtattaaaacttaaaaccattttttgactctgattttaagtacatttttatatgtcagttgctgcccttcacactaccaggccctgcagccacagtgttctgttggagaaacttggggaagtgttttctgaaccagttctttttcttggggtagagcgtgaaatccagacctgtttttgaaaggacagcacaggaggagaaaagtgactgggacgatgcttcctctcatccaaaacacatgcagagtcacatcctcatcctagtgtttggcagtttgagaccgctaccctgaacttaagagctttaaatatgagggttgtgtttctgggggggttattttttggtgtgtgtgtgtgtgtattgtgcttagaaaggttgcagatttcatcttcacctaccaagaggcggccgcctccttggacaagccgctcatggaccattagacttgagaagacgacccacgtggtgactgcaaagccctgggtacttgccttcatgttctggtttggttttccctttttctgctgctcttggcagcagcctggtcatcatctgcttgtgggagtgggaaatgggtattttagacccaacacaggttctaaatttaaaacaaataataattggaacaaataaaggttcttgtacccagagtgattctacatgggaaaaacaaaccagcttttttcagagagtgaccgaataggaagaagggattcagaaatatgatgtagtagaacatgccctgcaggaagaaaatgttttctctcctgcgtatgttaagaggaaatcagtttaaaatgcctgctaatcaaatgtcgactcagctaaccatatgtccaggttgctgcagagtttctttcaaatctgagtgttgcctgctgaactcggaggggagtttggagaaattttagacagcagctctgtgttctttttttgccgcagccaataagataatagcagaattagccaatcctaaaaccttctaaagacgatttttgagcatcccactgggattatttaatttttctttttgacgtgtgtttttagtttagaagtgctgtattccacaaggtttaagtcagtgaggttggaagataccctatcttttttattcaaaaagcacaatcaatcttttgtttgaaaatctatataaagtacaacttgcttttagcatgattattttcctaaataaaaagacaaagaatttacttactttatgttaattacgggcatgaagcaaaaggttttctttaaaaaaaaaaaaaagtgcagtgatgtagggctgtggttagttaaccgtactgagttatccatctagcatctgtggcttgctggaagggtagtattaactatttaacatgtaatggtgtacttcactcttacctagcacgctgtcttctcattgctttgggggagggagggtctctctgctggcactgtctaacttgcttacctgctgactttgcagtttgcttgtgctatgacatttattgtaggtgctatttagggtaggcttaaagtgctgggtggtgatttgagttcaaacaataaaaaattgtattttttcaatattgtataaacaatagtgttctaactaccttaaaaaaaaataatgaccagttaagaattgcttttgatcttgtcaaaaaactgaatagaccccagtttcgggaaggtgtgtgagcagtgccatgactctgccccttacctaatcccacatctctctaatgataagacattggctcgcctctgaccagagccccagcaccagagagcggaagatgcagaattgtcaaatgacctgctgggggaggttgtaggagtttagcagatttgagtgtggctgcagagagagagagagtgtgtgtatgtgtgcacatgtgtgagagtgtgagcgagagtgtgtgtgtgtccatctaagtctgtgtgatgaaggtgggataaggctcctctgttagtgctggaagctcctgtaattgccgcatggatcccactgtgccctcttgttctgtgcaagtctgtcctgtctgggcactaaccttggtcccatgcatgtttatgttctgggtggggctttgcctctccactgggaaactgacttttgctgggttgaacagagtcccttatgctttttgtcctctccctgcgcctgggagaggtgggagtaggagcccaaacacacaggtacagaaagatctggaagaaggcctggcagtgaatccaaggactctgggcccccaacaatagatggtagcgtaagtctggagcagcggtgtttcaccaccaaatgcctttccaggctgcccttccaacactcaggagagcatccagatccctgggcagaggctctacattcttggctttagaggtggtggcagcggcagcaggtcagagccacttctggcggtttccctcccctttttagtgcccatagtttttggatcctcccttgagttttaccagcacaagccattctttgcccctgttcacataactgagctcaagctcttgccaaacaccaacaagcaagatggttgcaacctggcaacattgaatccaccacccttgggctccctctggaagccccagcaccggggggcttttgggcacagggtcagtggtagccatcttagacactgacatttggctttgtcgtcaatttcatcaccctccttgaggttactgcgcagtttcaaccagcattttatcctagtgaggtcattatcaggagttgccatatcatctctccagtacctaacatttctcatccacttcaaaagctgttctgactgccagctggctgatctaagctcctgaggaatgtctcctctcaaaggaatttttccctccaaaggccccctgaagtcctagttggcattggcctggcacatgctttatgttaggcctcccgttgggatggctgagaatcatgaaagacagatcctccgctagcctctgtgggtcaagtttctggacaccaagtctctgggaactagtgtttgattttaaatggcatgtggcccttccttgtttcagtgacttagaaaagtaaaagccatttaaaaaagttagcaagattttttatcgacttcccaactgggcttccagccttgttgaatgaaatcatctatctctgattgggcgcaacgaactgcatttctttggacttctgaatccatgtttgtgctttctctggcccgtgaacacctcggcgattctgttagggatgggatgagtgggaggaagccctttgagaagggggagccggccctgtcatgcgcaggttttccactcatctgaggaagagccagggctctgaatttagcctaacactcatcttggctgtgggcttgggaagaaatggccattatttacagattgtatttggtacatattgtgtgatacttgaaaagataaaagggactgccagcccctaactgaaatctgaagctttttatcgcttatttttcctcgccctgtctcctcccttccacctttctccttgcattgtgatgatctagtaggcacgtctgtcaacaggacacatgcctcctctgactataacctcttaatagttgtgtataatgaaaactgtaaacttttttaaataaacgtgtatataccttaaaaaaaaaaaaaaaaaaa

SEQ ID NO: 24510 - DNA, 2211 bp, Homo Sapiens
ggctttccaagatggcgacggagggaggagggaaggagatgaacgagattaagacccaattcaccacccgggaaggtctgtacaagctgctgccgcactcggagtacagccggcccaaccgggtgcccttcaactcgcagggatccaaccctgtccgcgtctccttcgtaaacctcaacgaccagtctggcaacggcgaccgcctctgcttcaatgtgggccgggagctgtacttctatatctacaagggggtccgcaagacaatcccatgagagactaatagacaagtcacgagttacctgtgtcaaatgggttcccggttcggaaagccttttcctagtagcccactcgagtgggaacatgtacttatataatgtggagcacacttgtggcaccacagccccccactaccagcttctgaagcagggagagagctttgccgtgcacacttgcaagagcaaatccacgaggaaccctctccttaagtggacggtgggcgagggggccctcaacgagtttgctttctccccagatggcaagttcttagcgtgcgtgagccaggacgggtttctgcgggtgttcaactttgactcagtggagctgcacggtacgatgaaaagctactttgggggcttgctgtgtgtgtgctggagcccggatggcaagtacatcgtgacaggtggggaggacgacttggtgacagtctggtcctttgtagactgccgagtaatagccagaggccacgggcacaagtcctgggtcagtgttgtagcgtttgacccttataccactagtgtagaagaaggtgaccctatggagtttagtggcagcgatgaggacttccaagaccttcttcattttggcagagatcgagcaaatagtacacagtccaggctctccaaacggaactctacagacagccgccccgtaagtgtcacgtatcggtttggttccgtgggccaggacacacagctctgtttatgggaccttacagaagatatccttttccctcaccaacccctctcaagagcaaggacacacacaaatgtcatgaatgccacgagtcctcctgctggaagcaatgggaacagtgttacaacacccgggaactctgtgccgcctcctctgccacggtccaacagccttccacattcagcagtctcaaatgctggcagcaaaagcagtgtcatggacggggccattgcttctggggtcagcaaatttgcaacactttcactacatgaccggaaggagaggcaccacgagaaagatcacaagcgaaatcatagcatgggacacatttctagcaagagcagtgacaaactgaatctagttaccaaaaccaaaacggaccctgctaaaactctgggaacgcccctgtgtcctcgaatggaagatgttcccttgttagagccgctgatatgtaaaaagatagcacatgagagactgactgtactaatatttcttgaagactgtatagtcactgcttgtcaggagggatttatttgcacatggggaaggcctggtaaagtggtaagttttaatccttaatgctgcaccagatctagaacttgaataggtagtgacttttttctttttcgtgggaggggtggggtgtacaatgaatgtgaatgacacttcttattcttaatgtaaatctcaatgcatcagagccataattttggatactgcatgccatgtaattctgaatcatttgataatttaccttagagcatttaaaaaaatataatcaaactaattgccagccaagtcagtcatcctcctgggagtatatagagtcccaaggttagcgctcctgtattagactatttcaattttaggaaaatcatgaccatgtggggaaacaatgactttaaaatgctgaaattaaaatttatgctttaactggaatattttttgcttaactactcaattagaatattgtacacctgatcaatgtgtgttcagcacagatggccatgaattgtcatttatagtccaattttttatcttaatcataaaatgtttaggaatctatgaaatttaactttaggaacaaaacgtttagcagggttgattgatattatttttacattgttctggcaatccacagaaagagaagagccttaatttttaaaacccattttagtcattttatgacaattaaagttgtttaataaacatcttttttcaaaaaaaaaaaaaaaaaaa

SEQ ID NO: 24511 - DNA, 1944 bp, Homo Sapiens
gcagacggaagtgagcgacacactctgcgtcctcgcctcaccaggaaactactaaagttcctggggaagcaaagtagaatttcataagaacaaaatggatggagaggagaaaacctatggtggctgtgaaggacctgatgccatgtatgtcaaattgatatcatctgatggccatgaatttattgtaaaaagagaacatgcattaacatcaggcacgataaaagccatgttgagtggcccaggtcagtttgctgagaacgaaaccaatgaggtcaattttagagagataccttcacatgtgctatcgaaagtatgcatgtattttacgtacaaggttcgctacactaacagctccaccgagattcctgaattcccaattgcacctgaaattgcactggaactgctgatggctgcgaacttcttagattgttaaataaaataaattataataaactgttaactcttttcagtatttaatacctgtagttcagttagtaactttttcatatatagcatgttgcctgtatgcagttgaactatataaagttcattgcaaagcagattatcttgtttttttgcatagcaatcaaagttgaaatttgtttgctacatcaacaaattaaggacattttcacaaactgagaaataaacaaatatgccaattcgtaggtggttttgccttatcctttgaatgtgacttaaaatcagcaatgatgatatagtaaatactgaaatttaggtgtaaatcaatacgttctacagggaaataatgaggctaagtatttttatgtttttagtggttttttagaaacctaatcttatagccgccattagcattactagagttatgcaaataattgcattataaacatgtttataacttagccaaaacattgatttttataactctccaagtatgagttgaaatttcttatgtcttttgataaactgcagtattctttaagtgtactttgtccttttgtttattgctacaatttaagaactttatttaaaaacaattttggaaggttactaggtacagcttttgcagaagaaactgaactgtagccagatggtcagcaagtaaactacatgacttagagttcttgtgcattatacattttgggtaattcaaagtactgtatttgcattgactataaagcgtcgtttgcaatatttattcttccttcatagtcccttgttgtgattatacttccagttgtttaaatgtattttaaaagactcactattaactttattcagatcttaaaagctacacctttttgaactattccagtctttctccatccaattagaatgttatggaataacatgtgaagagatacagtgaaaatcatattataatgcattgaagatatcctacatgaattatcttctattaaaatatgtcccaataaatatacccataatcagtgggtcttctactgaaatcaagctcattcagcttttctattaagcagccaaaaaaatttttgaaaaaatatgacagcatcattccttatgcatgggaaaagaagcactggagatgggtttagtattgtctttatctcagaggtggaacaaagttgtcattatagggtctataaacttaagtctccagcttatttgagactggcttaatatggctgagcccggtggctcatgcctgtaatcccagcactttcagaggacgaggcgggtagatcacttgaggccaggagtttgagaccagcctggccaccatggcaaaaccccatctctaccaaaaatgcaaaaattagctaggccatggtggcacacgcctgtaatcccagctacttgtgaggctgaggcatgagaatcgcttgaacctgggaggtggaggtggcagtgagccgagatcgcaccactgcactccagcctgggtgacagagcgagactgtcttaaaaaaaaaaaaaaaaaaa

SEQ ID NO: 24512 - DNA, 3104 bp, Homo Sapiens
gaagaacctccggggttaggcgtattctagattgacgccttttgctggaagagcgctgctggggttaggattctgcgcggcgaggcaagatgctcaagtccaagacgttcttaaaaaagacccgggcgggcggcgtgatgaagatcgtgcgcgagcactacctgcgagacgacatcggctgcggtgcgcccgggtgcgcagcgtgtggaggggcgcacgaggggccggccctggagccgcagccccaggacccggcgagcagcgtctgcccgcaaccgcactacttgctgcccgacactaatgtgttactgcaccagattgatgttcttgaggaccctgccatcaggaatgtaattgtgctacaaacagttcttcaagaagtgagaaatcgcagtgcccccgtatataaacgcatccgagatgtgactaataaccaagagaagcatttctatactttcactaatgagcaccatagagaaacctatgtagaacaagaacagggagaaaatgctaatgacaggaatgatagagcgattcgagtagcagcaaaatggtacaatgaacatttgaaaaaaatgtcagcagacaaccagctgcaagttatcttcataacaaatgacaggagaaacaaagagaaagccatagaagaaggaataccagctttcacttgtgaagaatatgtaaagagcctaactgctaaccccgaactcatagatcgtcttgcttgtttgtctgaagaagggaatgaaatagaaagtggaaaaataatattttcagagcatcttcccttaagtaagctacagcaaggcataaaatctggtacataccttcaaggaacatttagagctagcagggaaaattacttggaagctacagtatggattcatggcgacagtgaagaaaataaagagataatcttacagggacttaaacatttaaacagagctgttcacgaagatattgtggctgtggagcttctccccaagagtcagtgggtagcaccatcttctgtggttttacatgatgaaggtcaaaatgaagaagatgtggagaaagaagaagagacagaacgaatgcttaagactgctgtaagcgagaaaatgttgaagcctacaggtagagttgtaggaataataaaaaggaattggagaccatattgtggcatgctttccaagtctgacattaaggagtcaagaagacatctctttacacctgctgataagagaatccctcgaattcgcatagaaaccagacaggcttccacattagaaggacggagaattattgttgctattgatggttggcccagaaattccagatatccaaatggacactttgtgagaaatttaggtgatgttggagagaaagagactgaaacagaagttttgttacttgaacacgatgttccccatcagcctttttcacaggctgttcttagttttctgccaaagatgccctggagcattactgaaaaggacatgaaaaaccgagaagacctgaggcatctgtgtatttgtagtgtagacccaccaggatgtactgatatagacgatgctctacattgtcgagaactcgaaaatggaaatttggaggttggtgttcatattgctgatgtgagccattttattaggccaggaaatgccttggatcaagaatcagccagaagaggaacaactgtgtatctttgtgaaaagaggattgacatggttccagagttgcttagctctaacttgtgttccttaaaatgtgacgtggacaggctggcattttcatgtatttgggaaatgaatcacaatgctgaaatcttaaaaacgaagtttaccaaaagtgttattaattcaaaggcatctctgacatatgctgaagctcagttgagaattgattcagcaaacatgaatgatgatattaccactagtctccgtggactgaataaactagccaaaattctgaagaaaagaaggattgaaaaaggggctttgactctatcctcttctgaagttcgattccacatggacagtgaaactcacgatcctatagatctgcagaccaaggaacttagggaaacaaattccatggttgaagaatttatgttacttgccaatatttctgttgcaaaaaaaattcatgaggaattttctgaacatgctctgcttcgaaaacatcctgctccacctccatcaaattatgaaattcttgttaaggcagccaggtcaaggaatttggaaattaagactgatacagccaagtctttggctgagtctttggatcaggccgaatctcctacttttccatatctaaacactctgttgagaatattagccactcgctgtatgatgcaagctgtgtacttctgttctggaatggataatgattttcatcactatggcttagcgtctccaatatacacacattttacttcacccattagaagatacgcagatgtcattgttcatcggcttttggctgtggctattggggctgactgtacttatccagagttgacagacaaacacaagcttgcagatatatgtaaaaatctaaatttccggcacaaaatggctcaatatgcccaacgtgcatcagtggcttttcatacccagttattcttcaaaagcaaaggaatagtaagtgaagaagcctatattttatttgtaagaaagaatgccattgtggtattaattccaaagtatggtttagaagggacagtcttttttgaagaaaaggacaaaccaaacccacagcttatttatgatgatgagataccctcacttaaaatagaagatacagtgttccatgtatttgataaagttaaagtgaaaatcatgttagactcatctaatcttcaacatcagaagatccgaatgtccctggtagaaccacagataccaggaataagcattcctactgatacttcaaacatggaccttaatggaccaaagaaaaagaagatgaagcttggaaaatagctatattcaacaaaaatcttcaaagactggtttcttttttaaaagaaaaaacttgaaagaacacttctaagcctaagtgtgtgatacagtttgttacttttaagtacattttaataatttcaaaaaaaaaaaaaaaaa

SEQ ID NO: 24513 - DNA, 3800 bp, Homo Sapiens
cgccggatcgcctctgatcttggaagctaagcacggtcaggcctggttagtacgtggatgggagattagattagttcattccttaaaagcaagggctccggatttgagggatcagactgacccggtcggccgctgcgtgaccttgagaagattggcgatttgggcatctctgagccccagttttctcgtctgtaaaacagatgatgagatgatgaccactctcgcttcgcctgctggctgggcagatggaatgaatgagctgctggcgtccctcaagcccagcggtgcctggtgcactttgagcccttgctgaatggaatggcactcagctaactcgctgttaataccctggtcttccagtatggcagagcccggaaaaacacccgggcctctgggccagccagatctgccaccatggatctaagccccaaagcaaaaacaggaagcagtgttttcccatgaatcattctctgcaagcctccggtacccaggctgaaaaggcttctagagccagctccttgggaaatccttgcaaattcatgttattcctctgtaattgttggggtgacccagtctgtcagtctccctcccttcctgggttacacgcttaaattttgcttttcccttcctcagcctgagtgatggaattggtggggtgggagttggaggtgccggcccggccattgggtgatttctcctgtgctgtgcttagtgggggcggctggcacaaagatgtatgttttgattgatgccataggcatacaagggttgtcaacttaaagtcagcctgatttcccttggtaggttgggactgttgatcggacacacttgccctccaggaggccagcaactggctgagggaatgaaggggtctctgggtctcagtttccttctctgtgaaaggagaagcctcttggtccgaagagctgctggctctgcccgcatctgtctcgttaacccaggcagtcgctgctgttcctctgctggaagacagagctctacctgccctggattgctgggcccctcaaatgagggggtgggcgggtgtgaatgtgctttgaaggtgctaacaacttgctagtcacacagattcctagaaagccgaagggccttgcttagaactggagaaaatcaccagggatctaatggtaatgatctggaagtctccgaaggcaggtcctgaggcttttgagaaaataaaaattgagacaaccctaaagagatatttagtagtttggcaaataaaatccactaacacgtcctcggatacagagcagtaggatatttcgttttgcccctaaccaggccttccctgtcgttgcagtccacattgacttccagggagggggcctcacataaagtacctgctgtgcatctggccctgtgatagcttcttaaactgtagcatctctttccaccccacatgggtccgttactctaaagaggagtcagacttagcaaggtgaggcaggccagtaactggagctgcttctaatggagtggtcattcagggacaggcacccctttgcagaaagcatttcccagcttgtgaaacccattctgcctgtttctgagctctgtattcttaccccttccccgtggtttgccattttcttctcaggggttaccctgtttcccttctcaattatttttaagtttctgcaatgccaggtcagcacgagatgctactaatatagccctccctgggctggatgtagatcaggcactgagtctcttgttagttggatgggtggactgggtactcaagtaaaggtgggtacgattttttttagggcaaagtactcttggaaaaaaaagtgacatgaattggcatgaccgttcaggaaggatgatggtctgtttggaatgcaggctcagggagggaagagggaagaaatggaggaccagatcatggaagatctaacatgtctcattgacatctcagactcaacatacatactccaagccaaatttgtgtttcccacgtgctcttcccctaaaagggaacaccgttcctccagctgttcaggccccaaaccttggactcctgtttcactctctgcttcgctactgcgccacattttaattttagtaaatccttctgactccacattcaaagtatcttcagaatctaacagatttccctggcttcctctgcctccacccacgactaagctatcttcccccacctgacttattgcccccagactcccgaaaaccaaacaggtctccttgctttcacccttgttgccctgggggtctgttcacaacactcgctggagtggctgaaacacaagacaggcctctagtggcttcccacctcggtgaaagccagagtccttaccgtggcctcggctccagcgttcttgcctccttgctgcttcttgaacatgccacacatctgtcttggtacctgctagttattgcctttgcctggacattttctcagatagctgcaagtcttgctccctgtcttctctttggtttttcttttttaatttgaggtggaggcttactgtcgcccaagctggagtgcggtggcgtgatcttgggtcactgcaacctccacctgccgggttcaggcaaatctcctgcctcagcctcccgagtagtggggactacaggtacgtgccaattcacctggctaatttttgtattttttagtaggtaacggggtttcgccgtgttggccaggctgatcttgaactcccaacctcaagtgatctgctcgctcgccttggcctcccaaagtcctgggatacaggcgtgagccaccacactaggcctttccctttggtttatacttagatgtagtcaccttagtagaggggtgtccccggaatagaattttccatccccggccttctgtctttctcattgctgacaataagtaggaagcaagctaacaagcagcaggctacggctgcctacaagtgtacataggtatctgcctgtccccctaactgggcatcagctccaggccagcagggctttcccctctctttcagtcactgccgtgtcctcgcctaagagagtgtctggcacacagtaggtgctcagtgagttactcattgattaaaaagcctggaaaaccaggctgtgtcgtgaagataataggcagccactgaggtcttactgcatgagaacaaggaaagctcagctcagtgtagattgccggacctaaattttgtggaatcgcctttcatacctaagaggcgagcaccgttgccagctttgcacttggagccccctctgtcatttattttgttgacttaaaagctgttttgtgaacccagcataatggcacttcttaaacttgtagaaaaagggtgtttcttacctgtttatttcaacacatctcgttgcctcacctggagaggcaactctcctctgtagagtgaaagactataatggtggccatgtagaaactaatattccagaaggagagagctccaagaaggggattccagtgaaccatatgtacactgtgtttgagagacattagttccccacggagaagggatggatagtctgtgcttcgggggtctaaggaaggcttcctgcaggtgctggtacctccttaggtctggggtggttccttctaagtttccttaccctgcctgcatcacctctgcctcttatgacctctgtgcaaagactgggaagggtcacccccaatggctgtgaacgaacctgtttgtgattctaaacagggcacgggaccatcctacaataaaaattacccagcctaaaatgccagtagtgccagtagtccctgtttagaaaaaaaaaaaaaaaaa

SEQ ID NO: 24514 - DNA, 2879 bp, Homo Sapiens
cacattgccgttcgcctcagtctttggcccctcccgccgggtgaggttggcaccccgtttttcctgctctgagagggaccggttgccaccgccatacttctgtcgccctgtcgtctgtgttgtgactgctttggacgtgggagtcacctgaaagccaggaaatggacttggtggctttcgaggatgtggctgtgaacttcacccaggaggagtggtctttgctggatccttcccagaagaatctctacagagaagtgatgcaggaaaccttgaggaatctggcctccataggagaaaaatggaaagaccagaacattgaagatcagtacaaaaatcccaggaataatctaagaagtcttctgggagagagagttgatgaaaatacagaagaaaatcattgtggagaaacttctagccagattccagatgacacactgaacaaaaaaacttctcctggagtaaaatcatgtgaaagcagtgtgtgtggagaagtcttcgtgggtcattcttcccttaataggcacattagagctgacactgcacacaagccgtctgagtatcaggaatatggacaggagccatataagtgtcaacaacgtaagaaagccttcagatgtcacccctcctttcaaatgcaagaaaaggctcacactggagaaaaactctatgattgtaaagaatgtggaaaagccttcatatcccattcaagcattcaaagacacatgataatgcacaatggagatggaacttataaatgtaagttttgtgggaaagcctgcccttgtctcagcatatatcttatacatgaacgagttcacactggagagaaaccatataaatgtaaacaatgtggtaaagcctttagttattcaacttcccttcaaatacatgaaagaactcacactggagagaagccttatgaatgtaaggaatgtgggaaagcattcggtagtcccaattccctttatgaacatagaagaactcacactggagagaagccatatgaatgcaaacaatgtggaaaagccttcagatggttccattcctttcaaatacatgaaagaactcacagtgaggagaaggcttatgaatgtaccaaatgtgggaaagcattcaagtgtcccagttatctttgtagacatgaagtgacccactctgggaaaaagccctgtgaatgtaaacaatgtgggaaagcattatcttatcttaactttcaaagacacatgaaaatgcacactagaatgagaccttataaatgtaagactgtggaaaagcctttgattctcccagttcgttttgaagacatgaaagaactcacactggagagaaaccttatgaatgcaagcactgtggtaaagccttcaatcgttccagttccttttactatcatgaaaggactcacactggagagaaaccctatgaatgtaagcagtgtagtaaagccttcatttcttccacttcctttcgatatcatgaaaggactcacactggagagaaaccgtatgagtgtaagcaatgtgggaaagccttcagatctgcctcacaccttcaaatgcatggaaggactcacactcaagagaaaccctatgaatgtaagcagtgtggtaaagccttcattttttccacttcctttcgatatcatgaaaggactcacactggagagaaaccctatgagtgtaagcaatgtgggaaagccttcacatctgcctcacaccttcaaatgcatgaaaggactcacactggaaagcaactgtatgaatctaaacaatgtgaaaaaacctttggatctgtcagaaaccttcaaattcatgaaaagacacaccctggagagaaaccctataaggaatatggaaaagcattcaacaatttctcttcctttcaaatacatgcaacaatgcacagaggacagaatgcctatgaatgtaaagagtgtgacaaagcattcatatctgccaagatccttcgagtacatgcaagaacacaccctggagagaaaccctatgaatgtaaggaatgcggaaaagcgttcaattatttttcttctttgcgtatacacaaaaggatgcacactggagagaaaccatattaatgtaaggattgtgggaaagcattcagtttgcctggttcctttcgtagacataaaagggctcacactggagtgaaaccgtatgaatgcaaggaatgtggcaaagccttcacttcttctggttcctttcagtgtcataaaaggattcacactggagagaaaccctatgagtgtaagcagtgtggtaaagccttcatttcttccactgccattcgtagacatgaaaggactcacactggagagaaaccctatgagtgtaagcaatgtggaaaagcctttatttctttcagttccattcagtaccatgaaaggactcacactggagagaaacagtatgagtgtaagcagtgtggtaaagccttcatgtcttctactgcatttcagtatcatgaaaagacccacaccagagagaaacactatgaatgtaagcagtgtgggaaagccttcatttcttccggtagccttcgatatcatgaaaggactcacactggagagaaaccctatgaatgtaagcagtgtggtaaagccttcagatctgccactcaacttcagatgcatagaaagattcacactggcgagaaaccctatgaatgtaagcaatgtgggaaagcctacagatctgtctcacaacttctggtgcatgaaaggactcacactgtagagcaaccctatgaatataagcaatatgggaaagccttcagatttgctaagaaccttcaaatacagacaatgaatgtaaacaattaaatgtttatagcagctgcatactaaaaaaaaaaaaaaaaaaaaaaaa

SEQ ID NO: 24515 - DNA, 3839 bp, Homo Sapiens
tagccttctgaaggcaggaagtcagtgtctaagcggctctccaggttcttctcatttccctgtggtgtctgcacacatcctgcttaggattttcccgcccgatacctgtaccccgggttttgcgctgacacatgctccattgcttcctcgtgagagctttgcctttatctcaggcggggtgcgttttctgtgttttctgtggcaccctgtagaaacacgtggcacccttgccctctgtggctacagctgagcagacgctgggcggtgctgccctctggcacctttgggccaggttagctggggcggcctctctgccatcgggcagttgtccactgctgtgggggcccatggcagttggagcctcccagaccagcacttgggcccgtcgcccttgcccctgtccagatcctgctgtgggagcacagcctcacctgactcgggttaaggtggcgtccgtgttccatttgactgagatgacaacacttgagaacctctcaggcaggacttgtgcgagaggattgtgccccatggccctgtcccgggcccagcctccccatgcccagccatgcgcctggccccacaggcctccctcccatgctgctccctgccacggctcctcagcccacctcctccctgcttctgtctaaccaggggtcttctctctttccacggcttaaatcccacccacatgtgtgtggctcccacctggggcatcatgggcctcagccctggctgaattcaaccccagcacaaggctcccttcccagccttggaggcggcctcacattgtgcagtccaaggcctcgggtgcccatggggccacactcacgcccccatgcagccatctgcacgccctgctggcttgcagcctcccccacacccctgtcacgctcctgcccagctccccagccttgcggcactccagactcacccccaggcccacccggccccacactccagactcacctgcaggcccaccacggccccacactctagactcacccccaggcccaccctggcccccacactccagactcacctgcaggcccacccggccccacactctagactcacccccaggcccaccccggcccccacactccagactcacctgcaggcccacccggtcccacactccagactcacccccaggcccaccccggcccccacactccacactcacctgcaggcccacccggtcccacactccagactcacccgcaggcccaccccagcccccacactccagactcacctgcaggcccaccccagcccccacactccagactcacccgcaggctcaccccagcccccacactccagactcacccgcaggcccaccccagcccccacactccagactcacctgcaggcccacccggccccacactccagactcacccgcaggccccacactctggactcatctgcaggccccacactccggactcatctgcaggccccacactccggactcacccgcagacccacctggccccaccctcttgctggctcttgtcctcggcatttgtcccgcacctcgttcaccttctctcagatgctgccctgggtggagcggcaccctcccacccatgccttctccccactgctgcacagcctccctgcttgtgtgtgtgtgtggtgtccgtcctgccctccaggaggggagtggcgagcagctgcccagtgggcagggtgagcgagtgagtcctcgtgtcctggaggccctcatctgcccagacctgcacagcactgttgctctcggcaccgctggggtatggcgtctcggttcacaagcgtgaatgtgatgtgtcacagctgtgccatgagttgatctgccagatggcaaagtgcactgatcctctgcggtgaccggggctggtgcccctgggtgccctgcagtcttgttgagtttccgaagtctccaggtcatgactcgcagccactccagtgtgcacccaacattctcatcgctggacggggtcgtctgtgatgcctctgccgtgctgcccactgggctgctgtggcccccatctggtgccatttttcctccacctgggtgtcagggaagggcattctcacctgcacctgcccaggctcatgtgacggacagtgggccagcacatgtccgctccggtgccctgtcccacatgcctttcccacccacccgcctccctggccccgtgtgcccggcttcccccaatgcacaggccctcgctccgtgctgcccacatgtcctggctgcctggggcggccccccgtgtgttcatagatgacctagccatcctctcctaaacgcccagcacactgtccttgggacccatggggtgtgaccaagcaacctggcggtggctgctgaagcatgagctgtgggtgcccctggccccagggaatgtgcgctgtgttgggggagagagacgtgaagtgaaagaagggggtcctgtggtgggcacaggccacgcgttccacagaagtgcgtagagcagggtggatatgggagtgctgatgattctaaggccagttggagtaggcctcagcagggtgagacgggctacactcaaggtgttggggtgccctgagcatgtctgtccaaaagagggcctggagctgctgtgtggaagaaggcgggcgtgtggagcccatgaggactgggttgcgggggaggggttctttctgctgagatgctccggagggcgttgagctgaggaatcgcttttgaccacaggtgaccatggcactaggaagccctggggaaggtgctgctgtggccgagggggagctgccaggttgtggaaatgtaaaccccggctgcgctggtcagacctggacttcctgtagggggcgccatggaattcccacgtgggaccccagtttcctacctgtgcaccaaaattcctgtgcaccaaaattggagacgtgacaaacttaggaaaataacctcatgctctggattggagcaaggtcccagacaatacaggacaggaagctgctgccaagggaaggccacccaggaacaggacaggaagctgctgcccagggaaggccacacaggaacaggacaggaagcctgctgccgagggaaggctgcccaggaggggcagaacagagtcctcagtgtggctggtgctgtgcgcctgcctgtgctgccttaggctggacgcagggctctcaacccgtaatcctagcactctgggaggctgaggcgagcggatctgttgagcccaggagtttgagaccagcctgggcagcaaagtgagaacccttctctacaaattttttttcaaattagctgggagtgttggtgggtgcctggggtcccagctactctggaggctgcagtgggaggatcacttgagcccaggaggtggaggctgcagtgagccaagattgcaccactgcactccagcctgggcaacaggacaacaccctgtctcaaaacaaacaaaagtcagcatgagcatttcgtgtgagacagaaaaccagttcacttagatggtttctagtttcagttgacgtacgagcctgctgccagctggcctcacatctttcatgtgactctcacaaccggagacccggacattggagaaaccctcagtaagagagatccaactgggttcagaccccgaggctgtgttgacgggacatgaggcaggatatagaccaggagccacctcctgaaatttagagcaaaactacaaaacaaggcctttgggagaccagggtgggagcatcacttgagcccaggaatttgaggcaacagtgagccatgatctcaccactgtattccatccagtctggacaagagagcgagaccctgtctcgaaaaaaaaaaaaaaaaa

SEQ ID NO: 24516 - DNA, 4684 bp, Homo Sapiens
ctctcaagttgtatccacgccatgcaagtgcgctcaacaaccttggaacactgacgagagacacagcagaggcaaagatgtactatcagagggctctccagctccatccacagcataaccgggctcttttcaatctggggaatctcctcaagtcccaggagaaaaaggaagaagctatcaccttactgaaggattccatcaaatatggtccagagtttgcagatgcatattcaagcttagcttcgttattggctgagcaggagcggtttaaagaagctgaagaaatataccaaactggaataaagaactgtccagacagcccagtgctgaaggacttgcttttccatgaagaagacgaaaacagcaaacaagggcaagaaggtctgagagggaaggagaatgacatttacacattttacagatttttgtttggtttaactccagatttctcttgatatatctctgtgcttttgagacctggagatctaattctgtttagacattttttgtcccagaaatacagaagcttgaaatgctatgaaggcagagcttctattctttatgggatgaaatatttcaaaagaggataaatcctctgtggtaagccatttggaaaatcctaccaagaattggcttatttaattttccagaaccaggaatgagtatctaatagcttttgtagaaccttccagaatatgtggggaaaaagggctattgctaagtgagctttatctaatatcctcctaagagttttactagtgcttttttgaggaattacagggaagctcctggaattgtacatggatatctttatccctagggggaaatcaaggagctgggcacccctaattctttatggaagtgtttaaaactattttaattttattacaagtattactagagtggtggttctactctaagatttcaaaagtgcatttaaaatcatacatgttcccgcctgcaaatatattgttattttggtggagaaaaaaatagtatattctacataaaaaattaaagatattaactaagagaaatgtcctactttattatcttaatgttcagacatcatgagatttattattttttttgaaaaatatattgaaccattgaggaacctttatgatgtatcacagaaatcttcatagattctaactagatggaaaaagagctctatttatttgtgttcctaggcttaatgagaattctgggcttagaacatcaacgattaatacccagaattctttgttttgagaatattatggagaatgctctaaaaatctagggtaaagatctaaattcaaattttaaatatatatttatatttaagaaataggaaaggcaaagttgaactcacaatttgacatttatttttagtgttatttatttcataacttataaaatatttaatatatacatacacactcttcttttttctctgtacaaagtggttttaatatcagctttcaaaactgatcttataaaatgtaaatctaaattgtaaaatagttaagttttaacagtccctcccaaactttgtgttgattattcacttgctaaagagatgtggggaatcagccttcagttttttggcagtagtatattttggaagtgaagaaattggaacacctgtttctaatttggtcttcatcattagagacaaaaccaaaacactccaggcagtactgtttatagtgctgagccaggtagcacacagacatagtagcctaaaggctcacataattcgcatgctcaggccagggcagggtaaaaatagccttctgcttctttcaacccagtatcaggaagcactaccccagtgttattatttgttttgtcaaggtaagtctaaataaacaagaaaaacttcttcggaaggcatggcgaagggagtattttaaatgaaaatgattacagaatttgaattagcatgcatctctttgtgtgcaacagtaatccaagaatgtatatgttaccactacaaccatttgtttctaatagttttttcatgttatataacataaatgtatccacaaccttaattaagaactattcctcccccaaaatcatagtcctagtgtcaagaaacatactccagtgtttattgtaaaataacaaccacaccctcaaattgaaaaaagtgaatgtctaggactttattacaacttttcagaataatctgtaatgaaaactcatgcttaaaaatttaatggaaaagactgagccccaaattttgaatagtgattacgccttacttgaagtgctaataaaggtaggagagtacatttgttggaataacagaaatggtgatttcagcctaaaagtttctgagggtaaaggatcacatgaccttcaggaaactctctgcctcctgtaggtgctttcctatctcccccatccttccctaccccttttcccttttccttcctctctttttctctcactgtcactctgtctacacacactggcatcttttgaacactaaaagtaagcgctgttttttaaaaaagtaattatttgttggatcagatacttttatcccaagtgaataccttcactgagatgtggccaatgcaatagtttcacagtaaaaacagtgcctataagaaaatagatcacatactatttttcaatgatattaagtgtattttgtaactattttcatttggtccttgtaacatgaaataatacatggaacttacctttataataaaaatggagtgccctggtccatcatagaggtgcatctagtttgcccttaatggaagtatacttgctgtgtggattgatagcaccttcttgaaatggaggagctcagctggcctcatggatgtgcaatttttgcagtcccacagggccttgcatacagaagcaccccgagctcagttgaatgtctgtttgattttttcttatttatttttttgagacacagttccactttgtctttttgtcacccaggatggagttcagtggcacaaacatggctcactgtagcctcgacctccctggctgaagggatcctcccacctcagcctcccaagtaaccgagactacaggcatatgccagcatgtccagctaatttttgtattttttgtagagacagggtttcaccatgttgcccaggctggtctcaaactcctgggctcaagcgatctgcccacctctgcctcccaaagtgctgggattaaaggcataagccaccatgtccaactgaaattcttaataattaataatttttgagcaagaggtccacactttcattttgcactgggttcccaaacaggtcctgggtaggaaggatggctgaggataaaacaggagttgctttggcctggctgaacatttgaaccaatgatcagagtttcattttatgattgtgttactctgaacagatttgctatttttttccagctacatttagagttcctcatgtatatatcacccctctttttccagtccatctaacctctcctttttttttgtgcctagaatcagttctccttgccttcaaaatccctgataagtgtccatttctttttgtatcctttgatgtagaagccacaagaatggctttagcagcttattttaatcttatgaattattcattcaggattttttaaatgattcagatgctttcaatctgttaacagtatttataaaacatgtttcagtgatacaacataggtgaactaaaccaaggatgcaaatgccttggaggaaaagaaattgtattatagagaatcctgagatatatccttttgggttgtttaatttaaagcctatcacaaaacaaagagaattgtcgcactttaattccaacctcctgcagtacttcacaacccttagcataagattctgaaatttgtaataggtggtacctagtttgatgcagggttttgcagcagttgtgcgaatgcctctgcgcaacggcctttcagtcagactaaatgagaaaatccaaactgtcctatcaaaactgacccacaataactgtactctgaggcgaaacagagcaaatgtgggtttcctgttttcattgtaaaacattccaggttctcagattgaagagctacattcagctgatagttgacatctgttccctcacacgtagtggctctcaacacgggctgcactttggaatcacctgaggacctttcggaatcttcggttgaatcatcctggctgtcctggtgatgcttcttatgtgcagctaggctggagaaccactacagggctgacacctggaatgggagcttgtaacttttacaaaataatagatgtttatcatcttttgcaatttttacttttaagtctatactaaaatgagccaaagaagtcttaacaatgatgtatggcacaattggttggttgaggctatcattccatgattacaaataggtggttatgtggggtggttttgcacttgtggcaattggactgcaatttggccttaaaatgacacaattcctcgttctcagatggagaggaattgccttgaaatttgcatgtaccagactaagtgccagtatatatatgactgatattttcgtgactcatagaaggtgtccatggtatagagtttatgcctacatctctatctttattttgggcacacatgagcttttgttaattatttctttgtacttgttagaatctgtttttgaaaaaaaaaaaaaaaaaaaa

SEQ ID NO: 24517 - DNA, 5976 bp, Homo Sapiens
ttggggcagaggaggcttgtaggaataggggaagagttcataagcagagctgaaacaacaccaaacatggaaatgttacaaggtggagaaattgtgcttactgaaactcttctcagaaatattgctgtttgtggatgatagaaatcttcagagttgtcacttaaggtagaggtaggagggtaagaagcgtcaaggactcaccgaattgtccattcccccttttgttctgctgtggaatgttttgtgctgctgtgttggaaaactttggacagacaattgtccccgatttgggatcactggaaagtcagcatgattttcgaaccccggagtttgaagaatttaatggaaaacctgactccctcttttttaatgatggccagcgaagaattgactttgttctagtatatgaggatgaaagcagaaaagagaccaataaaaagggtacaaatgaaaaacaaaggaggaaaagacaagcatacgaatctaaccttatctgtcatggcctgcagttagaagcaacaagatcagtattggatgacaagcttgtatttgtaaaagtacacgcaccatgggaggtgttatgtacgtatgctgagataatgcacatcaaattgcctctgaaacccaatgatctgaaaaaccggtcctcagcctttggtacactcaactggtttaccaaagtcctcagtgtagacgaaagcatcatcaagccagagcaagagtttttcactgccccatttgagaagaaccggatgaatgatttttacatagttgatagagatgctttcttcaatccagccaccagaagccgcattgtttacttcatcctctctcgggtcaagtaccaagtgataaacaatgttagcaagtttgggatcaacagacttgtaaactctgggatctacaaggcagctttcccactccatgattgcaaattccgccgtcagtcagaggatcccagctgccctaatgaacggtaccttctgtacagagaatgggctcatcctcgaagcatatacaaaaagcagcccttggatcttatcaggaaatactatggagagaagattggaatctactttgcttggctgggctattacactcagatgcttctcctggccgcagttgtaggagtggcttgctttctctatggatatcttaatcaagataactgtacatggagcaaagaagtttgtcatcctgatattggtggcaagatcataatgtgtcctcagtgtgataggctttgtccattctggaaactcaatattacttgcgagtcctcaaagaaattgtgcatcttcgacagttttggaaccctggtctttgcagtatttatgggagtatgggttaccttgtttttggagttttggaagcgacgccaggcagaacttgagtatgaatgggatactgttgagttacagcaggaagaacaagcccgaccagaatacgaagcacgatgtactcacgtagtgataaatgagattactcaggaagaagaacgcattccctttactgcctggggaaaatgtatacggataaccctctgtgccagtgctgtctttttctggatcctattgatcatcgcttcagttattgggatcattgtctataggctctcggtgttcattgtattttctgcaaaacttcccaagaacattaatggaacagacccaatccagaaatacctgactccacagacagccacgtccatcacggcctccatcatcagctttataattatcatgattctgaacaccatatatgaaaaagtggcaattatgattactaacttcgaactcccaaggacccagactgattatgagaacagcctcaccatgaagatgttcttatctcagtttgtcaactactactcttcatgcttctacatagcattctttaagggcaaatttgtaggctatccaggagacccagtttattggttgggaaaatacagaaatgaagagtgtgacccaggtggctgtcttcttgaactgacaactcagctgacaataatcatgggaggaaaagcaatctggaatcacatacaagaagtattattgccctggatcatgaatctaattgggcgatttcacagagtttctggatcagaaaagataaccccacgatgggaacaggactaccatctgcagcctatgggcaaactgggattattttatgaatatcttgaaatgattattcagtttgggttcgtcaccctatttgtggcctcttttccactggcccctctgttggctctcgtgaacaatatattggaaataagagtggacgcatggaaactgaccacccagtttagacgcctggtaccagagaaagcccaagacattggagcatggcagcccatcatgcaaggaatagcaattctggctgtggtgaccaatgccatgatcatagctttcacgtcggacatgatcccccgcctagtgtactactggtccttctccgtccctccctacggggaccacacttcctacaccatggaagggtacatcaacaacactctctccatcttcaaagtcgcagacttcaaaaacaaaagcaagggaaacccgtactctgacctgggtaaccataccacatgcaggtatcgtgatttccgatacccacctggacacccccaggagtataaacacaacatctactattggcatgtgattgcagccaagctggcttttatcattgtcatggagcacgtcatctactctgtgaaatttttcatttcatatgcaattcccgatgtatcaaaacgcacaaagagcaagatccagagagaaaaatacctaacccaaaagcttcttcatgagaatcacctcaaagatatgacgaaaaatatgggggtgatagctgagcggatgatagaagcagtagataacaatttacggccaaaatcagaataagagctttatgttctgagaagcactttaaggaatttagctttgtcaaaatatattaggaatcactaatgagaatgtgtaagttaaatcactttggcaaatatgagtctcaactattgccatttcctcatgtattatttttcagtttcagctagcgatgcagaaactggaaaatgtaaaacttagatcatgaagggcataaaacttatcacccggaaaacctcaatgttacctttttctgataaattggaattttacagaaaaagtccctcagtgtgcttaaaaaccaccccttctaaagtagaatggattcttttttttccgtttgattattttcatttctgtctattctcaggcgcatgatctcctttatttttaagccatgtttcatttcttcacttggctagatctgttccagggtcatcttttccttacagtaccatcattatagatttaatttaatagctttcatgtgattaaaaatagctaactagactcaaggattcacaatatttaggtgtattttcaatacctccagaaaggaaacctcagttaatcagaggaaatagtttcagtcttcatttgagcatgtctttccatctcaaaaaaatactcttagtaggttggagtgaagatagcaaggttttgaagcatatttgtcctaatccacagtgacactttttatcttccaggagcactcctaggaggttccgtgcctaatcaatgttgactgctttgcagatctcaagggaataaaatgacaaaagcagggaaagttacagattcaaacagcattttaactcatgttgatctggataattaatcttttctaaagatgtgtagtttcttggaaaacagtgatatcacatgattaaaattacatttttatcaacataattgtctggaaaagataagcccctcaattttctaccagttgacttttattcattagatacagaaggtgcagtattacacatcaccagctgcctttgtgaatggctcactacacagccattggggtacaactgtgtgcatgggcagaaacagcaagtgccctcattgtggtcattgggtggggagtgccttttgtcaaggagtctgcaggaattggcttatttctgtatgccaaagtgatcaacacaccaaagtctctgccataaagaatgtggcttccttgcatcctccatcctgttactctgggcccagtaatttgatgtaactgtctgattgtactagagacaggagtatacccagcttattcataatcaagtaaagagactcagattagatttgattttttagcctcctctagagccaatcaggcagttaagagtaataaaggaaaagggtttggtcacaaaccctaccattatctggagattacttcctgctgcactcctgtcttgccatgcacgtcttgccccctcacttttgctcagcctagcagtctacttcactttattgccttgtaagtgtcaggcctcctgggcgctctggaaaagacagggagccaggccctctcacccctactggtaacaggtcattgctgggtgcacaagagggaggtgatttgcatcatggtcatgctgcatgggcttcactgggatgctgttaaacaccagaggagccaacctatcagaatcccagcagcaaaggaaaactcagattttagaggctttttacaataaagtagcgtaactctaggtcatgattgatttcaaatgcctgccatgaatgatttgtaagtaattatgtaggatccatcaaagcagtattgtaggcttttgaattgtcccagtggatccgggaccccatttcactgtctctcttgatcgtgttaatgatgcaatcagagttcaagacaggccccatgaagtctgactgcactgggatggagaaatgaatttcttcccactgaaggaaactctttctcattcgcagccaagacgggagtgccactgttcctctcttcactcctgagatactgcttctggaagcgggtgtcacttcctctctagtacctcttctcttctctgaagtgtgtgactatctcctagtgtttaaatttggcagttactcgccatgtatgtcagcatagaaaaggaaatgtttttaccttatctcctgtatgtatgatagaacttaaaagaaatgtgcatttgttttcatagccccagcagagaaaatcctcttcatagattaaatgtgctgctgtggacaggagggaaaaaaaaaccctctacatattgaaaggcaccaaatgtaatatctgacactgttaagatgcccaaaagagcaaagttgtagtggagatgcagggtcatttccccatgccatccacagtgtttgttagtgagtccacggctgacttgcagtgataaagaaaagcatggagctgtgtctgcagacaatggtggctgcatctgtaagtggcttcagaggcagcagccctggggaaattgatgggtgtggcagtggacctgtgaagagggagaatctagccttcagcctgtccagtgttaaccactagagaaactgagctttatatccttttttaatgcctgtgaattttagcatattgaaacattagagcaaatactcaggggatttttcattaaacatccctcagataatttagctatatatcattagaaagggaaagctatcatttttattttaaaactaaacaaggccatcttataaactgtcaccaaagtcttcccttttttattgcatgtgtgccttgaatttcataaaacattaattcacaatgggggtcagaatgtactcttgttgaaacacttcttgtaccattttatgttcatattatgtttgagagggtaaaaatgtatgagcagcttaactgaagtagaactattcatgatgcttttcacacattgtggcataagatgtaaagtttgtaattaatgttaatctctgtgcattttaatattcttttataattattaatgttaatttctgtgcattttaatattcttttataattatgagcattttaataaattcatttttacaaacaaaaaagaaaaaaaaaaaaaaaaaa

SEQ ID NO: 24518 - DNA, 4296 bp, Homo Sapiens
cactcagagagctgggctggagctccaagcggaaaccgcgggagccgagcccagctaggaatgcagacctcctgaaaaccaagccgaggactgcggggtccggtgtccacgcagagtgtcagcttcctctggtgcaaccagcaagtcttccagtatgaatcccacagaaaccaaggctgtaaaaacagaacctgagaagaagtcacagtcaaccaagctgtctgtggttcatgagaaaaaatcccaagaaggaaagccaaaagaacacacagagccaaaaagcctacccaagcaggcatcagatacaggaagtaacgatgctcacaataaaaaagcagtttccagatcagctgaacagcagccatcagagaaatcaacagaaccaaagactaaaccacaagacatgatttctgctggtggagagagtgttgctggtatcactgcaatatctggcaagccgggtgacaagaaaaaagaaaagaaatcattaaccccagctgtgccagttgaatctaaaccggataaaccatcgggaaagtcaggcatggatgctgctttggatgacttaatagatactttaggaggacctgaagaaactgaagaagaaaatacaacgtatactggaccagaagtttcagatccaatgagttccacctacatagaggaattgggtaaaagagaagtcacaattcctccaaaatatagggaactattggctaaaaaggaagggatcacagggcctcctgcagactcttcgaaacccatagggccagatgatgctatagacgccttgtcatctgacttcacctgtgggtcgcctacagctgctggaaagaaaactgaaaaagaggaatctacagaagttttaaaagctcagtcagcagggacagtcagaagtgctgctccaccccaagagaagaaaagaaaggtggagaaggatacaatgagtgatcaagcactcgaggctctgtcggcttcactgggcacccggcaagcagaacctgagctcgacctccgctcaattaaggaagtcgatgaggcaaaagctaaagaagaaaaactagagaagtgtggtgaggatgatgaaacaatcccatctgagtacagattaaaaccagccacggataaagatggaaaaccactattgccagagcctgaagaaaaacccaagcctcggagtgaatcagaactcattgatgaactttcagaagattttgaccggtctgaatgtaaagagaaaccatctaagccaactgaaaagacagaagaatctaaggccgctgctccagctcctgtgtcggaggctgtgtctcggacctccatgtgtagtatacagtcagcaccccctgagccggctaccttgaagggcacagtgccagatgatgctgtagaagccttggctgatagcctggggaaaaaggaagcagatccagaagatggaaaacctgtgatggataaagtcaaggagaaggccaaagaagaagaccgtgaaaagcttggtgaaaaagaagaaacaattcctcctgattatagattagaagaggtcaaggataaagatggaaagccactcctgccaaaagagtctaaggaatagcttccacccatgagtgaagacttccttctggatgctttgtctgaggacttctctggtccacaaaatgcttcatctcttaaatttgaagatgctaaacttgctgctgccatctctgaagtggtttcccaaaccccagcttcaacgacccaagctggagccccaccccgtgatacctcgcagagtgacaaagacctcgatgatgccttggataaactctctgacagtctaggacaaaggcagcctgacccagatgagaacaaaccaatggaagataaagtaaaggaaaaagctaaagctgaacatagagacaagcttggagaaagagatgacactatcccacctgaatacagacatctcctggatgataatggacaggacaaaccagtgaagccacctacaaagaaatcagaggattcaaagaaacctgcagatgaccaagaccccattgatgctctctcaggagatctggacagctgtccctccactacagaaacctcacagaacacagcaaaggataagtgcaagaaggctgcttccagctccaaagcacctaagaatggaggtaaagcgaaggattcagcaaagacaacagaggaaacttccaagccaaaagatgactaaagaaatacaagttaaggtatctggtatctgcatgtaaaatcttcagctggtggatggtgacttttgaagaacaaaaggctttggcaacagaaaacaattgttctgggtgatttctagaatggtttttgttgagtctctgaacatcctaaatattggtttgttattcttttccagaaagaaaatgaatttgactggttcacctgtgtactgagtattgataaactttgaatttttttaattgccttcaattgggagagaaagctttatatttgtaagaaatatatttgataaagtttcttaaagcaacaccaaaaaaacaaaagaaaagctaagtgaatttttgcacattctacacacagtgcctgtaaatctcatttgtattttcagtttgcccttaattttttttgttagtgtttagaaaacaatgttttaaacattcttcagtgttctgatttcttattaccccctttcctcttgggcttttgaactgtatttgatgttgctttgggataatgtttataagtcaaacataagatattgtacattgggcacatatctcctcttgggctgctaataataaattaataacaggtaacctggacaaaccaggaagcaccaaaccccttttcagtttgaactcttctttgccaggtgtgaggacttctgcatcttacagtcagcacagaacacactgagacttgaatcaagtcagcaacagagcaaaataaaggttagataagtccttgtgtagcaaatttcgagcataagaaataaaatctaattaattcttagggtactcatctgacttgaactctgttggtttactgtgttagtaaactgtgctttctattatctatacataaaacctgagcagcaactgtgtctttagagctattgccacattagcctttgcactgtatagcatctggctttatggaacttaagtttaccaaatataaaaagaaacttctgcttttaaaaaaattatatatatatattaaatttgaaacctgcatttctcccacagcaatgtaagaagtaggctctgatgtcctaccactttgaatggttttctaatatcttaatgaatagttcctgaacattgcactgatatcatcgattagaattttgatatttaatttcatctttatttcctggtagagaatgcaggaaaagatgtcaggtacataacataaaacagattgggaatttattgtttccaaagggcatggccttccttagcatcagtttgaagcttttgttatgacttagctgacttgtggcagcggagcaagcaaaaacaataacactgcttataaatggcaccacatcttgttaacctcccccccaaatactctctgaaagtcatgcacatacctatgggattttacacaccaccagcttaaaatgctatgtctctatccatcagaaatagtcattattctatttttaaggcagcaacaagaaaagaaaaaacacttttcctgagggatttctaaccatgtatctaatcctcccatttgggcagtataggtgtttgcttttttgttttctttttttaagaaaaaccttgaaacctttgacactgacagatgtgtttgcaaggatacggctgcagtattactaatttccatgtgtatctggaagtatttttaaatggcataccaaaatccagaagtttaaagatgcctataaaagtaaacaacatttatttaaaaagaactctgaatatgccttcttttttaattagaaatatcttcgagacttgggtgtttgttaataactaataactggagtaagctacaggatctaaagcagccctttttacagtctagttaggagagagaaaataattgcaaatatccacttagaggcaaagaacaatttttttttatcaaaaaggtttctgcacattgttgtggcaatattgtatctgtttagaaaatgggcttttccaaaagcaaacaaagataggttcctcaggtgaccaaaactgaaaatcaatatttccatgtttcattaatcaaggcataaaatacaattaaagcaaaatattttacattaaaaaaaaaaaaaaaaaa

SEQ ID NO: 24519 - DNA, 4726 bp, Homo Sapiens
cccattgctgagctgtttccctgatatctggccatgcaacggagatcaagagggataaatactggacttattctactcctttctcaaatcttccatgttgggatcaacaatattccacctgtcaccctagcaactttggccctcaacatctggttcttcttgaaccctcagaagccactgtatagctcctgccttagtgtggagaagtgttaccagcaaaaagactggcagcgtttactgctctctccccttcaccatgctgatgattggcatttgtatttcaatatggcatccatgccctggaaaggaataaatctagaaagaagactgggaagtagatggtttgcctatgttatcaccgcattttctgtacttactggagtggtatacctgctcttgcaatttgctgttgccgaatttatggatgaacctgacttcaaaaggagctgtgctgtaggtttctcaggagttttgtttgctttgaaagttcttaacaaccattattgccctggaggctttgtcaacattttgggctttcctgtaccgaacagatttgcttgttgggtcgaacttgtggctattcatttattctcaccagggacttccttcgctgggcatctggctgggattcttgttggactaatgtacactcaagggcctctgaagaaaatcatggaagcatgtgcaggcggtttttcctccagtgttggttacccaggacggcaatactactttaatagttcaggcagctctggatatcaggattattatccgcatggcaggccagatcactatgaagaagcacccaggaactatgacacgtacacagcaggactgagtgaagaagaacagctcgagagagcattacaagccagcctctgggaccgaggaaataccagaaatagcccaccaccctacgggtttcatctctcaccagaagaaatgaggagacagcggcttcacagattcgatagccagtgaggtggcatcttgggaagacatggcctattcgtgtaattattgcccatttggctcattccccaagcccctaattcattttaattcattttaaacaaaagcagagtacaccggtattgctccagatcgctcacatcacctgggacagtcccatggcccctatgagtcaactcacagcttgcggggagtgggccttctcctggccttgttcttgctcataaacaggtcacttcctccatgaagagaccagtttccacgctcccatctctcactgctgactcagcgatgcctctgcctcggtctgcttttgaagactgtgaccttcaccaggaggttttacttacaccagtcgggaagattagtccctcattctgcctggagtgccccgtgtttgacttggcagcgggtgtggagccatccccgcgtcctcctggcgcattgccactgtggctgtccaggaacaggatgtggctgccttggccgaatgttgtcctactctccccaaccccggcgcctcagctcctcagctcctcgggcccctgcgtctggctggtgtttgcagggctttcgctctgctctggtattgctctgcctttatagaaagtcttattgaagaagtgtaagaaagacctaaggtggggaagactcctacacacaccattagtatcagtgacaccagcaatgtaggttcccagccccttcccagtggcagcttgtgtgtccaggagataggacatcatttaacgcatcagcaaagtagcagcagatgccacatacagagtagagcgaaggcatttggtggatcggtcactagagatctatcttgcagaaagtatgtttttcctcataaaagtgcctcttaattggccattgtaccagccacttgtcctagccaaatgtccaaaacacgcccttgggccccgccacgttacaatccacagattgtctgtctgagtcgtttaaggcatttcctggtgcttgtgttccatgaataaaaggacaaagtcagaagatcactgatgtcttactgtcaacagagatattttaaaagagagaagcaggaaaagatcttccttttttgatctacaacttatatagttttctgattatgcacataatagatatgccttccagatgcataaggcaaacatctggaaagaaatatacccaaatcttagcaggggttatctttgggagtggagtacatgggattttgctttcttcatttttataattttatattactgtcttggaagatgtgtttatgtgtgtgtgttacttttacaatcaggaaaacatatttaataacatatagtcaagaaaacagacttaaaaataaatactatgtgtccattgagaaaattcacaatataaacagaaatacaaataaatacatacacaattttaaagtcacctgtagccctacccttagaggtacccagggttaacattttggtggtattgtcttatcaatttttccgttgatacattcagcaaatttggagcacattgaccatggagttttgtgtccaaatccaatctgaatttacctggaagaggccttgacacctgcatggaaatgagctaagaaaaccactggagccttgggagctctttggcctcctggctggcccagtaatatctgagctcctttggttaatttataactgatataaaactacatcttctttataatataaattgtacctgtgagtctagaagctttaaatgtgtttaaattaaaatattcaagctaaatgttactgctctctcccaaattctgtaagtttgactcccgttaccccaattagaagtaacttctttgtttcatgccacttttatagcatttggtaattctgctataacacatcttgcccctattattaactgtgcacagctacacaaaggtgtgccttctacgtgggaacatggattgtgaatgactctgtaatgaggcctgagtcttagttatctttccactcactccccgtctcccctttccaaccccaaaggctcacgataggggctcactaaatgtcagtgtttcaccaaagtattttttccattgtattaagagtccagtcactgtatatggaagtattttattttttatttttttatatcacttgagtccactagtagtacttccttgctctgtttgacttgtcagatacaaagacacgggattagattttgggtggtaaaattgtgatacgcatggctgttgatggagtggaacatcttagtgatgtgagaaaggtcattttagttataaatgtaaaccaattactttagcacaacaataaagatgttctggaaattattataattattttagttaatggacttgcctgtaacaagtgcttatgtttggaatgtccattttattttattttcctctacaataaggaatccctaaagttatgccaacaaactggaattggattgagaaagacaaaagcaagtgagcaagtgtattagactaattatctctagtagggaataagcacttagagctaattttttaatttggtttatttattagtagctccctgattgtctgttaagcccctggttcccacagtttggtgtggtcagtcaacttaagcgaccttttaatgcagaatctttacttggttctgaagaggaggcagtagttaaaattgcttcctcttaatgactctgaatgtattgcctgtgattccaaagttgtacataattgttcagacctcctccatccttttaaattgcctgctgcagtaaataactagtttgagtagaactagatcctgtctatctatttggcacatgttctgctgcctggggagtaagcaagctaaagggatgagaaagaccacctccccctaccctggaaattgcactgcaaggcagggcgagaatggggtagctggcagacctggcctccttgttcccagtcttagtttttcttgagagattcagtattcagtaaagaatagcattcaattagtcaaaaaatatatatataacttcttcctttcccttcccatgaatcattgcagtcattccctaagtttcttctctttttttttcatggctgctagtattttattttagaatcacagactctcagcttagagagtcacagtatctcaattatttgctctgttcaatacttaacaatacctcctcactcaattctacataactccagcttagtcttccaaaattcaccttcatgatgccactcagcatctcaaatacctttcattggctctctgctgccaaaggataaaggtcaaagtcattagcctcaacagtgggcttcaaccagcctttggacctcagccccatttatccatcacagaggctggtaactagtctcactgctcaggctgtgagtgttcctgatcttgtgacattctgtgctgtgcttttacatggaacagctctttcctctctcttggcccattcagatcctcctcatccagcccccatctgaatcctgtaacagacacaaccacatctacacagtttccacataccacttggaattgctggttatgctgcaatgagagaatgtctttgtctttaaattgtaagcttcatgagggcagggaccatctgtttctctgtctctcctcacagtgccttgagcagtacgttgtctggaatgtcagaaccaataaatacttgtggattgaaaaaaaaaaaaaaaaaaaaaaaaaaaaaaaaaaaaaaaaaaaagaaagaaaaaaaaaaaaaaaaa

SEQ ID NO: 24520 - DNA, 11198 bp, Homo Sapiens
agagcgcttccttgtgcctcctcagcaaatacagggatctggagtttctccacagctaagaagatcagtatctgtagatatgcctaggcctttaaataactcacaaatgaataatccagttggacttcctcagcatttttcaccacagagcttgccagttcagcagcacaacatactgggccaagcatatattgaactgagacatagggctcctgacggaaggcaacggctgcctttcagtgctccacctggcagcgttgtagaggcatcttctaatctgagacatggaaacttcattccccggccagactttccgggccctagacacacagaccccatgcgacgacctccccagggtctacctaatcagctacctgtgcacccagatttggaacaagtgccaccatctcaacaagagcaaggtcattctgtccattcatcttctatggtcatgaggactctgaaccatccactaggtggtgaattttcagaagctcctttgtcaacatctgtaccgtctgaaacaacgtctgataatttacagataaccacccagccttctgatggtctagaggaaaaacttgattctgatgacccttctgtgaaggaactggatgttaaagaccttgagggggttgaagtcaaagacttagatgatgaagatcttgaaaacttaaatttagatacagaggatggcaaggtagttgaattggatactttagataatttggaaactaatgatcccaacctggatgacctcttaaggtcaggagagtttgatatcattgcatatacagatccagaacttgacatgggagataagaaaagcatgtttaatgaggaactagaccttccaattgatgataagttagataatcagtgtgtatctgttgaaccaaaaaaaaaaggaacaagaaaacaaaactctggttctctctgataaacattcaccacagaaaaaatccactgttaccaatgaggtaaaaacggaagtactgtctccaaattctaaggtggaatccaaatgtgaaactgaaaaaaatgatgagaataaagataatgttgacactccttgctcacaggcttctgctcactcagacctaaatgatggagaaaagacttctttgcatccttgtgatccagatctatttgagaaaagaaccaatcgagaaactgctggccccagtgcaaatgtcattcaggcatccactcaactacctgctcaagatgtaataaactcttgtggcataactggatcaactccagttctctcaagtttacttgctaatgagaaatctgataattcagacattaggccatcggggtctccaccaccaccaactctgccggcctccccatccaatcatgtgtcaagtttgcctcctttcatagcaccgcctggccgtgttttggataatgccatgaattctaatgtgacagtagtctctagggtaaaccatgttttttctcagggtgtgcaggtaaacccagggctcattccaggtcaatcaacagttaaccacagtctggggacaggaaaacctgcaactcaaactgggcctcaaacaagtcagtctggtaccagtagcatgtctggaccccaacagctaatgattcctcaaacattagcacagcagaatagagagaggccccttcttctagaagaacagcctctacttctacaggatcttttggatcaagaaaggcaagaacagcagcagcaaagacagatgcaagccatgattcgtcagcgatcagaaccgttcttccctaatattgattttgatgcaattacagatcctataatgaaagccaaaatggtggcccttaaaggtataaataaagtgatggcacaaaacaatctgggcatgccaccaatggtgatgagcaggttcccttttatgggccaggtggtaactggaacacagaacagtgaaggacagaaccttggaccacaggccattcctcaggatggcagtataacacatcagatttctaggcctaatcctccaaattttggtccaggctttgtcaatgattcacagcgtaagcagtatgaagagtggctccaggagacccaacagctgcttcaaatgcagcagaagtatcttgaagaacaaattggtgctcacagaaaatctaagaaggccctttcagctaaacaacgtactgccaagaaagctgggcgtgaatttccagaggaagatgcagaacaactcaagcatgttactgaacagcaaagcatggttcagaaacagctagaacagattcgtaaacaacagaaagaacatgctgaattgattgaagattatcggatcaaacagcagcagcaatgtgcaatggccccacctaccatgatgcccagtgtccagccccagccacccctaattccaggtgccactccacccaccatgagccaacccacctttcccatggtgccacagcagcttcagcaccagcagcacacaacagttatttctggccatactagccctgttagaatgcccagtttacctggatggcaacccaacagtgctcctgcccacctgcccctcaatcctcctagaattcagcccccaattgcccagttaccaataaaaacttgtacaccagccccagggacagtctcaaatgcaaatccacagagtggaccaccacctcgggtagaatttgatgacaacaatccctttagtgaaagttttcaagaacgggaacgtaaggaacgtttacgagaacagcaagagagacaacggatccaactcatgcaggaggtagatagacaaagagctttgcagcagaggatggaaatggagcagcatggtatggtgggctctgagataagtagtagtaggacatctgtgtcccagattcccttctacagttccgacttaccttgtgattttatgcaacctctaggaccccttcagcagtctccacaacaccaacagcaaatggggcaggttttacagcagcagaatatacaacaaggatcaattaattcaccctccacccaaactttcatgcagactaatgagcgaaggcaggtaggccctccttcatttgttcctgattcaccatcaatccctgttggaagcccaaatttttcttctgtgaagcagggacatggaaatctttctgggaccagcttccagcagtccccagtgaggccttcttttacacctgctttaccagcagcacctccagtagctaatagcagtctcccatgtggccaagattctactataacccatggacacagttatccgggatcaacccaatcgctcattcagttgtattctgatataatcccagaggaaaaagggaaaaagaaaagaacaagaaagaagaaaagagatgatgatgcagaatccaccaaggctccatcaactccccattcagatataactgccccaccgactccaggcatctcagaaactacctctactcctgcagtgagcacacccagtgagcttcctcaacaagccgaccaagagtcggtggaaccagtcggcccatccactcccaatatggcagcaggccagctatgtacagaattagagaacaaactgcccaatagtgatttctcacaagcaactccaaatcaacagacgtatgcaaattcagaagtagacaagctctccatggaaacccctgccaaaacagaagagataaaactggaaaaggctgagacagagtcctgcccaggccaagaggagcctaaattggaggaacagaatggtagtaaggtagaaggaaacgctgtagcctgtcctgtctcctcagcacagagtcctccccattctgctggggcccctgctgccaaaggagactcagggaatgaacttctgaaacacttgttgaaaaataaaaagtcatcttctcttttgaatcaaaaacctgagggcagtatttgttcagaagatgactgtacaaaggataataaactagttgagaagcagaacccagctgaaggactgcaaactttgggggctcaaatgcaaggtggttttggatgtggcaaccagttgccaaaaacagatggaggaagtgaaaccaagaaacagcgaagcaaacggactcagaggacgggtgagaaagcagcacctcgctcaaagaaaaggaaaaaggacgaagaggagaaacaagctatgtactctagcactgacacgtttacccacttgaaacagcagctctctctgctccctctaatggaaccaatcattggagtgaactttgcgcactttcttccttatggcagtggccaatttaatagtgggaatcgacttctaggaacttttggcagtgctaccctggaaggggtttcggactactattctcagttgatctacaagcagaataatttaagtaatcctccaacaccccctgcctctcttcctcctacaccacctcctatggcttgtcagaagatggccaatggttttgcaacaactgaagaacttgctggaaaagccggagtgttagtgagccatgaagttaccaaaactctaggacctaaaccatttcagctgcccttcagaccccaggacgacttgttggcccgagctcttgctcagggccccaagacagttgatgtgccagcctccctcccaacaccacctcataacaatcaggaagaattaaggatacaggatcactgtggtgatcgagatactcctgacagttttgttccctcatcctctcctgagagtgtggttggggtagaagtgagcaggtatccagatctgtcattggtcaaggaggagcctccagaaccggtgccgtcccccatcattccaattcttcctagcactgctgggaaaagttcagaatcaagaaggaatgacatcaaaactgagccaggcactttatattttgcgtcaccttttggtccttccccaaatggtcccagatcaggtcttatatctgtagcaattactctgcatcctacagctgctgagaacattagcagtgttgtggctgcattttccgaccttcttcacgtccgaatccctaacagctatgaggttagcagtgctccagatgtcccatccatgggtttggtcagtagccacagaatcaacccgggtttggagtatcgacagcatttacttctccgtgggcctccgccaggatctgcaaaccctcccagattagtgagctcttaccggctgaagcagcctaatgtaccatttcctccaacaagcaatggtctttctggatataaggattctagtcatggtattgcagaaagcgcagcactcagaccacagtggtgttgtcattgtaaagtggttattcttggaagtggtgtgcggaaatctttcaaagatctgacccttttgaacaaggattcccgagaaagcaccaagagggtagagaaggacattgtcttctgtagtaataactgctttattctttattcatcaactgcacaagcgaaaaactcagaaaacaaggaatccattccttcattgccacaatcacctatgagagaaacgccttccaaagcatttcatcagtacagcaacaacatctccactttggatgtgcactgtctcccccagctcccagagaaagcttctccccctgcctcaccacccatcgccttccctcctgcttttgaagcagcccaagtcgaggccaagccagatgagctgaaggtgacagtcaagctgaagcctcggctaagagctgtccatggtgggtttgaagattgcaggccgctcaataaaaaatggagaggaatgaaatggaagaagtggagcattcatattgtaatccctaaggggacatttaaaccaccttgtgaggatgaaatagatgaatttctaaagaaattgggcacttcccttaaacctgatcctgtgcccaaagactatcggaaatgttgcttttgtcatgaagaaggtgatggattgacagatggaccagcaaggctactcaaccttgacttggatctgtgggtccacttgaactgcgctctgtggtccacggaggtctatgagactcaggctggtgccttaataaatgtggagctagctctgaggagaggcctacaaatgaaatgtgtcttctgtcacaagacgggtgccactagtggatgccacagatttcgatgcaccaacatttatcacttcacttgcgccattaaagcacaatgcatgttttttaaggacaaaactatgctttgccccatgcacaaaccaaagggaattcatgagcaagaattaagttactttgcagtcttcaggagggtctatgttcagcgtgatgaggtgcgacagattgctagcatcgtgcaacgaggagaacgggaccatacctttcgcgtgggtagcctcatcttccacacaattggtcagctgcttccacagcagatgcaagcattccattctcctaaagcactcttccctgtgggctatgaagccagccggctgtactggagcactcgctatgccaataggcgctgccgctacctgtgctccattgaggagaaggatgggcgcccagtgtttgtcatcaggattgtggaacaaggccatgaagacctggttctaagtgacatctcacctaaaggtgtctgggataagattttggagcctgtggcatgtgtgagaaaaaagtctgaaatgctccagcttttcccagcgtatttaaaaggagaggatctgtttggcctgaccgtctctgcagtggcacgcatagcggaatcacttcctggggttgaggcatgtgaaaattataccttccgatacggccgaaatcctctcatggaacttcctcttgccgttaaccccacaggttgtgcccgttctgaacctaaaatgagtgcccatgtcaagaggcctcacaccttaaacagcaccagcacctcaaagtcatttcagagcacagtcactggagaactgaacgcaccttatagtaaacagtttgttcactccaagtcatcgcagtaccggaagatgaaaactgaatggaaatccaatgtgtatctggcacggtctcggattcaggggctgggcctgtatgctgctcgagacattgagaaacacaccatggtcattgagtacatcgggactatcattcgaaacgaagtagccaacaggaaagagaagctttatgagtctcagaaccgtggtgtgtacatgttccgcatggataacgaccatgtgattgacgcgacgctcacaggagggcccgcaaggtatatcaaccattcgtgtgcacctaattgtgtggctgaagtggtgacttttgagagaggacacaaaattatcatcagctccagtcggagaatccagaaaggagaagaggtaagagtgtgagagattgcatctgccatgttgttcagatcctgggcgaatagttccctcctcacacaggtcacttactcacttgtttcccaattctttgttgtgataaaaactctgtccataataggccagatgttcccaccctgcagtatctcacccttcaggcactccagttcaccttcctccacatggcagctctgtgagcatttgctgtcacctctcccttcccttctgtgccacgggttcagcatccccatggcacccaggtggtatcatttctgtgtgccataggatccttctttatccccttaacctggacacagtttggcagtgtcccctctgaagagcatccccgtccttctccaagggggccgtggctcctgagatggcactgttgggctgtgggcggcaaatctgggccgccgtgctgctgaggattgtgtgctcacgctggcgatcagtgtgtgcttaaccaagtgcccacatcgccacattcttcagcagttcaggtgtgggttgttgtcttcaaaatgccgagtgccaagcttgctgtttgtctccgtgctctcagaggtgactctggtccggcggctcacccattgggattatttttggccttaattgctgcatttgcttcccaccttggtctttcccactgtgattcaggtaccttggttctggaattggcatttcctggaaagctgtcactgagcagcaggcttggtttctgtaggaaacgtcccgcatttggggagtgaggcacctgagtgacttgactttgttggtgctcctctcccttcgtgaacatagccatgggattcgtgggattctatctgtattttgggtctttgtggaatctcctttcttagtcaagaataaggatccgactagacccaaggcccgttatacatctcaaagtaacgtgtaaataagacagtgtgtgggagccctggcacagtgccagtaaccaatggctaccatggtggtcagaagagactcagcccagggccacctgcctccttcctacttgagtattcttgagtaaatagtttaatatgagcccctattttatcttctgcaagatagagaaaatgacttccttaccaggctcttggaaggactcagcagatacctgaaagaaagcagtggaatcattgccaagaacagctgctcaataaacactggtttccttcctttctgtgtagaaggtctttccagctagcgtctagaatcatttcactcagaagagacctagaaattcctgggcctccccttcattttgcagcatcggctctctctggggtggtgggggttgcagggccgcgcactgaggcttgtaccgtgggactcacgcagactcccacctaccttgattggtctgagatgttaatttggtgacctctaaatagaaagacatcctttcagtcttgagtgaggaaaaatgaaggagggaaaacagagttagctggcagttcatctcacccagaattgcatgccccattcagtaaatcaggggaggtgaaaggcttctgggttttagggagagggctaggaaagcagttgcccttccagtcccctccatccacttgcagggacagcattatgagaagtcacagaaatacagctttctctggtcaggctcccgttctcagatctcgctgtttaaaaatactgcctccctcatttcctctgtgcaagcacaatgcctcttttcagggttcccccagggtcccatggaacctcaataaatcaggtcttccttaatttacgtctgtttcgtttgctggttttaaaatgcaagggagatggaggcagaaacgctattgccttccttgctgtcctttcttaccctgtgtctttgccgtgggcagctctgctatgactataagtttgactttgaagatgaccagcacaagattccgtgtcactgtggagctgtgaactgccggaagtggatgaactgaaatgcattccttgctagctcagcgggcggcttgtccctaggaagaggcgattcaacacaccattggaattttgcagacagaaagagatttttgttttctgttttatgactttttgaaaaagcttctgggagttctgatttcctcagtcctttaggttaaagcagcgccaggaggaagctgacagaagcagcgttcctgaagtggccgaggttaaacggaatcacagaatggtccagcacttttgcttttttttcttttccttttctttttttttgtttgttttttgttttgtttttcccttgtgggtgggtttcattgttttggttttctagtctcactaaggagaaacttttactggggcaaagagccgatggctgccctgccccgggcaggggccttcctatgaatgtaagactgaaatcaccagcgagggggacagagagtgctggccacggccttattaaaaaggggcaggccctctaacttcaaaatgtttttaaataaagtagacaccactgaacaaggaatgtactgaaatgacttccttagggatagagctaagggataataacttgcactaaatacatttaaatacttgattccatgagtcagtttattgtagtttttgatttctgtaaaataagagaaacttttgtatttattattgaataagtgaatgaagctatttttaaataaagttagaagaaagccaagctgctgctgttacctgcagaactaacaaaccctgttactttgtacagatatgtaaatattttgagaaaaaatacagtataaaaatagttattgaccaaatgctaccaggctctgcagcagctcgggggcttataaaatgttcatagggatgttacaatataattttgtgttataaaatatgccattataattatgtaataaccaaaatttcaacctagagtgttgggggttttttggaaaccgcagtctattagtactcaatggttttatacaccttacttctgacagagcggggcgtatgctacgactacaacttttatagctgttttggtaatttaaactaattttttcatattatattgttgcatccctacttcttcagtcaggtttttttgtgcttacaatttgtgataactgtgaataactgcttaaaaatacacccaaatggaggctgaattttttcttcagcaaaagtagttttgattagaactttgtttcagccacagagaatcatgtaaacgtaataggatcatgtagcagaaacttaaatctaaccctttagccttctatttaacacaaaaatttgaaaaagttaaaaaaaaaaaggagatgtgattatgcttacagctgcaggactctggcaatagggtttttggaagatgtaattttaaaatgtgtttgtatgaactgtttgtttacatttctttaataaaaaaaacactgttttgtgtttgcttgtagaaacttaatcagcattttgaaccaggttagctttttattttgtacttaaaattctggtactgacacttcacaggctaagtataaaatgaagttttgtgtgcacaattcaagtggactgtaaactgttggtatattcagtgatgcagttctgaacttgtatatggcatgatgtatttttatcttacagaataaatcaattgtatatatttttctcttgataaatagctgtatgaaatttgtttcctgaatatttttcttctcttgtacaatatcctgacatcctaccagtatttgtcctaccgggtttttgttgttttctgttctgtataatagtatctaatgttggcaaaaattgaattttttgaagtatacagagtgttatgggttttggaatttgtggacacagatttagaagatcaccatttacaaataaaatattttacatctataaaaaaaaaaaaaaaaa

SEQ ID NO: 24521 - DNA, 4507 bp, Homo Sapiens
aaaaagaaaaagagaaaaaaaacaaaaggctgttgcaatactgcaagctacagttgaaggtcacttgactaggaaggtagcgagggagatggagaaaagtatatgaattcagggttgattttgaaggcagagccaacaggacctgctggattgcctgtgtagggaaggacttaagcatgattccgagtttggagcctgcatgctcagtggatggtcctatcctttactgagtttggggaaactggaaagggagcatgtttggaagacagtggggaatcaagagttctgtcttagctgggatttaggaaaggggatggatataaatttttgtcaatcgacagtgggtggagcttagggtccattgggaagacaggctttgggctggagaaatgagggtttggattcaagatgggggaggtgaaggaagaaggatctggcttaggattatgagcactacgtttaaggacaagccctgacttacccgtgaggtactcagttgtgtcctcatccttctgtggaaaattgggaaaagagcaatgtctgaaggtgatggttgatttcagtacagggatcatcagagtgtccttatggagccaagcagggccaagaaggtgtcaggtggggaaagaccttccatgcaagatgaacagggtggcaactcaactctttgcctcttcaggaactggagctctgctatcgaagccctggagaagaccagctgttctcggagttctacgttggccacttgggatcagggatcaggctgcaagtgaaagacaagaaagatgagactctggtgtgggaggccttggtgaaaccaggagcggcacaaagagaagaggacagaacaaaagtaaccaaatctattctctctgaggaagatcatatgtagagagcagaggtctgtgtgtgtgaaagaaaacggggaagaggatgaaaatgtccagagtggtgagctctgctaggccctggaatgaagctgagatgctggaagcgctaagttctctctagtgggagaaaacccactgtggaaagctaatcatttgatgtagaacctcaccaacgaccaggaagaagcaatcagtgcccagctaggctaaactgggcctgcgatagggtgtgagtagggccagcttcctggaagtgcaacctgtgcaatggcagtaggcccccatgcttggggtttaatgcgtggcagtcagtgccttgaaactcttaataattgtatctttgaatttgtgctttgtaagtgaagtttgatgggacctggagcatgcataggggcaggaagggagggtaggggggcttggagccacagctcatgtggaatcccacctgccaggtgccacctcacagcgcccagacaggttcttagcttcccactgtctgccccgtggagccccaggctttactcagcctccccttctctgccttgctcagcaaccattgctacccctaaccccagcaggggattgagtggagcacggggatgatcagcattggatgtgagctcccagaagcctctcagggtggggcaggcagctgaccctgcattgggctagaagtgccacagcaccttcagcaggtgactaggcttatccaggcacatcctagtgtagaggttgcaatacacttgcaggtttcccatcaactgtgggtttgggtagaggacctgtggaaaggggagattcctggcttgacttcccttctcccagccagggcacgcatataaattagaagttggcaggagaggaattcggcagccatggtttccaggataacaaatagctatagcccaggcagcagagattcccagaaggtccttctctcccacccacccactgacacatacaccccaccaccaccaccaccaccaaagcctgtttcctcagctgggcatgaacacttcgagctaaaagtggcctttgtgaattttgcctcttgctctgtgtacacattctaaagggaacaagtctgttttgctgcagggtgaggcccagaatgcggcctgggaaaggctaacagggcacagtctttgatggtgagcaagcctggggtgggtagctgaggggattgggaggtatacctcttacccttgggtcagagagatgtgggttagaaccccagcagtcagtgttttattctattctattctattctattctattctaatttttttgagacagagtctcagtctatcacccaggctggtgtgcagtggtgtgatctcagctcactgcaacctccgcctcctgggttcaagcgattctcgtgcctcagcctcccaagtagctgggattacaggcatgtgccactatgcccggctaatttttgtattcttagtagagagggggttttgccatgttggccagactggtctcgaactcctgacctcaggtgatccacctacctcagcctcccaaagtgctgggattacagatgtgagccaccacacccggcccccagcagtcagtattagtggcagattttagattccttcacctctcagcctcagtttcctcattggaacattggagaaaatactggtgcctaatttagggggtcatgaaaattaagtgagaccatctctgcagaaatgttgagcacagttcccagcacacagtcggtggccagtgattggctgctgctgctgctgctgctatcatccatgtgtgtcctaggattcctcatagagggggtcaccaacatgatcaactggccattgtccagatccaggctttggcctggcagactcaaatctctgattcctattgactcagacagtgtatctttcttccagaggcaaatacccctaaatggatgaaggaaacctatcaaagtatagcaccggagaaaagatccccctagaagaggcctctctcacctctgagaggggtatgtactctgggcaggtcccagaagcaggagctaaaggtagcctttgtccattcagggtttttttttggtggattctggctccaggccctggactcatgaggtttttcctggaacgctctggtgtcgagcagagtgtgaagttgtagcttgggatcttccagtatctgtcctgtcagggatgtctagtggtcctgaagtccctgggctgggacgaagttagctcttgttgctgggcataggcatagcttgcaccaggatgaggccatggagtcagccaagctctctcaattcctgacagacagagcccccaggggtcacctgggctgggaccagcactgttttgtgatatattcatttctgtacaggtagaccaggtaaaaaataataaggtgtcctagagacacctgggcctctgctgtctgagctccggatttagcctcacatcttctcaatatgcaaaggaccctgcagttactaaagcatttttaacacctgcactcctcactgacacccagctcctccccaataagcctttgcatggttctgcccgagaccctcttggttactgagacttccccactacctactcccacttaagctgcataggtaggtttgggtgactttctcaatgccacagccttacataaagctcttccatcccactctacacacccttccattccaccttgaaaaccctctcattgcaccctacacaccctttcattctagcctcacatccttccaatcatccatcacacaattccatttcacccttcacacccttccattccaccttgaaaaccctcccattgcaccctacacaccctttcattctagcctcacatccttccattcatgcatcacacaattccatttcacccttcacacccttccagtccattattcattcacaccatttcattccattcttcacgccattccattacaaccttcatattcttccactccaccttacacaccttatattccacccttgacactcttccagtccactacatgtccttccgtttctctcttcacatcttccatttcaccctaagcaacctcccatttcacccttcacacccttcaattccacccttcacacccctccatgacatccttcaagctcttccgtgccacccttaacatcctctcattccacttttcactctctggtccttccatgtccttccattctgccttctgcaaccttccattccattcttcacattctttcactccacctaaaccatccttccattccaccctccacacctttcaatttcacccttcatatacttccacccggcttggcgcagtggctcatgccagtaatcccagcagtttgggaggccgaggcaggtggatcacttgaggtcaggaagttcaaaaccagcctggcccatgtggtgaaaccctgtctctactgcaaatacaaaaaattagctgggcatgatggtgtgggcctgtaatcccaggtactcagaggctgaggcaggagaatcgcttgaacctgggaggcagaggttgcagtgagccgagaccgctccactgcactccagcctggacaacagagcaagaccccgtctaaaaaaaaaaaaaaaaa

SEQ ID NO: 24522 - DNA, 2484 bp, Homo Sapiens
gacgattacaagaactctgcctcaaagagcttacaatcaaatatgtcagctctcagtctttttggagaagtaggaagtaggaagataaatctgagacttaaaaaaacacaaaacattcaagaacctgatgtcttaaaattgtcctacgaacaaaagctctctgaaagctctggcttggaaactactctcagaatccagctaacgctccagggaagtggcctgagtcagggaagctaagtggtgaagagcacaggctggtagtcctgcgattgaagccagaatgaccagctgtgtaaccaaaggcaaggtgctgaacctttctctgcctcaattctctcatctgcaaaatgggaaataataatgatcccaacctcagagaactgaacaagataatacatgaaggtgcacatcaaagagtctcacatgctctgctgggtaagtatgccctccacccgccacaggaaacactgaattgcttctccatagctgcaggttagagacctgcttgttcagacactccacctcaacttgccctcctttgcttagtgtcaccattatcttgaatgcctcctaggggccacataagactaatagagctattaggctctgaagccggaatcaaaaatgcaaatctggttatgtgatttgtctacttaaactttgtcaatagctcctaatagccttcatgtgaaaatgtgaccagaaacacgttactaacactggctagagtgcagtaggagagtgtggtaggacaggctgacctctgccctgttactaggaagacagacactcacccagcctttctgaacagcaactctgctaagagcttttaaaatatgcatattctatgacctaaggaatacttagaaaatcaaaattatatacacactggctgggcgcagtggttcacatctgtggtcccagcactttgggaggtcaaggagggtggatcacttggggccaggggttcgggacaggcctggccaatgtggcgaaaccccgtgtctactggggatacaaaaattagccaggcgtggtgccgcgggcctgtggtcccagctactcggaaggctgaggcacaaggattgcttgaacccagaaggcggaggctgcggtgagctgaggtcgcgccactgcactccagcctgggcgacagagccctgtctccaaaaaaacaacaacaattatacacacaaagattatcattgtattatttataatagcaaaactggaaaaatccagtgatgcagttgtgttttgtaacaaggaagaacgttcacactattaaatttttaaaagcgggttaggaatagcacaatcccatttttgttgaataaatatatacacaagtatataaataaatacatatatatcaaaagatatatatccaaaagataaatactagctggcaaggtaatctttcaacaatgaacatttataattgtaaaggactttgttgttgttgtttatggatcatttggatgtgagaattttgatatcatgtgaagttttttaaaaagtgtgtttataggcccggccgcggtggctcgtgcctgtgatcccagcactttgggaggctgaggcgggcggatcacaagtcaagagatcgagaccatcctggccaacgtggtgaaacctcgtgtctactaagaatgcaaagattagctgggcatgggggcgggcgcctgtggtcccagctgctcaggcggctgaggtaggcaaattgcttgaacctgggaggcggagattgcggtgagccgagatcgcgccacagcactccagcctgacaacagagcgagactccatctaaaaaaaaaagtgtgtataggccaggtgcagtggctcacacctgtagtcccagcacttcgggaggctgatgcaggaggattacttgagctcaggagtttgaaaccagcctgagcaacatagtaagaccccatcttttcaaaatattttaaaattacccaggcttggtggggtgtatgtatagtcccagctactcgggaggctgaggtgagaggatcacttgtgcccaggaggtcgaggctgcggtgagccatgatcataccactgcgctccagcctgggccacggaatgagactgcctcaaaaaaaaaaaaaaaaaaaaatatatatatatatatatatatatatatatattaatcttagaggttagaaagatgaacaaaattatcaatatttgtttctggatggtgagacttaaaacatttcctgcctcttttgttttactgtacattccaacttttttgaaataattaagtagaagtcggccagtgcggtggctcacgcctgtggtcccagctacttgggaggctgaggcacaattgcttgagcccgggaggcggaggttgcggtgagtcgagatcacaccactgcactccagccttggcgatagagggagactccatctcaaaaaaataaaataaaataaaaataaataagatttaaaaaaaaaaaaaaaaaa

SEQ ID NO: 24523 - DNA, 2822 bp, Homo Sapiens
gtttctctgaatagcagaggcatcaaattttggtggggaatgagaggagtattaggggaaagtttgaaaatagctctcctggagatggagggcacacagagtggtcctcaggctcaccttgactgagttgattcacagttatcctgcatcagaccattagatttctttagtgctatgattataatagggatttttgaatcaccaaaaacagtttttagatgtttatgttctttgttttactatcaatgttgtgctggttaagggagagaaaagttcaagaagatcttacatatttgaaaggaaattggtactcttgaaggctatgcaacatgagtctttgaacaagaattccttgctactttgattcattcatcaaatactgagtgcctgtgtgccaggcacaggtgaactctggggattcaggggtaactaaaacagattgcaaccctgcccttgtgaagctttcagtctagaagggagacgtgaaacaaattttagcttcaaaagcaacatctatttttgcctgttagcatgcatttattttaaaagtcatattagagttacctggttccgcttcagagcagactgggaaaatcaggcttacaatggaatcagatgctgtgggcctaaaacagctctttaaaaatctatttttttaggccaggtgcgttggctcacacctgtaatcccagcactttgggaggccaaggtgggtggatatgaggtcaggaggtcgagaccagcctggtcaatatgatgaaaccttacctctactaaaaataaaaaattagccgggcatggtggcacatgcctgtagtcccagctactcgggaaactgaggcagaagaatcgcttgaacccgggaggcggaggttgcagtgagccgggatcacgtcactgtactccagcctgggcaagagtgagacaccgtctcaaaaaaaaaaaaaatttttttttaaatggaatcagagaaaccaacaaaatatgtaacatgtataaatgcctgaggagatcagttattgagaaatccatttacaatgctggaggagaggggatggccaggaaagaagtgcaacaaataaatggaagatgaccctaaaaatgcaccagtgacagtcagtcaatccatcagaccacctcacatgcagggtagaaacatggagtgtgcggcagcatcctcctcacatccctttgtgagcacggctgctccggaatactgaccatctgggctagcacgacttagcagagggttctgcaggatgtgctattttaaagcagctgggtgcaacttgtgaaaacgggaatctagagcagaacatgtaatcagcgatggctgggattggtggacaggattgacaggagtatttgaggctctaccaggcctgtctacaggacagcttcatcaaagggacattttttaacctgttattttaaatgccacatatatgttgtaatgctgaagcatacaggtagaatttctggatcgtaactactagtgacttctgaggtttacagttagaaaatgttctcaaaggtttatcagttatgtattgatgattggtaatctagaccctctggaggctgtagaatgtgaaaagatacagctgagctgacaagttttagggcactatcttctggaatgaaatcggccaagaaaatggttcaagggcatgggggttagagaatgtttcttttacctaaaaatgttaagccaactatggaagattggggtcgtgggggcatgaaatacaaaattatgataatttatacagaactaggtttctttatgttctgcaagaaggtttttattagctaatttggggaggggggcatgctgcagtattttttttcctgggaacatgcatttctgatgggaagttattttgtttacaagagttggttttacacacaaccctgaatgaatgtgtctatggcctaaaaatggtagacctgtatttccttcccgaggcaggctgattcgtttcctgattccttctgtctgagattacctgatgctgaccagacttatttttcctttcctgaatcttcacagctgagtttatggcacccatccaagaccttcccatttgaatgactagatttctattctatccccgatcatccttttgaaatagttctagtgataaactcagagaaattcaatatattgattgaattttattttttcgctttgtatctacaacagaaattgatttgttcatttttatttcaaatctcttcatggcaagttgggctaatggactttgcactcaagaaaggtttgtttaccagttttgtagccatgtttggcaaatcttagcaactagaaaccccgtcctttcttttccttctttatatgttcttgcagttactcttgtattgcaagattttctgactttaagctttgagactactgcatcttaaaagaagaactaggctgactggcaaaaagtcttgccagtggccctgtcactcccatgatgctttggttttgagagttgggaaaactctgagaacttaagggaaccaaactcaggaatcccaaaattggtggcattgtgccattcgtttaggggctgaacataggacctgtctgaaactgagtgagctagatgcatttgggtttgaatttttgtcacatactgaaatgtaagtcagccctaaataatcaaaacactttattttatttttctttttttaaataggaactttctgaagaaaaagtggtgtgtaaaacatttgatatttaagacaataaagtttttatcataaaaaaaaaaaaaaaaaaaaaaaaaaaaaaaaaagaaaaaaaaaaaaaaaaa

SEQ ID NO: 24524 - DNA, 3914 bp, Homo Sapiens
attccttcttctgctcttcattttggaagtactgtcaagtattcttgtgtaggtgggtttttcctaagaggaaattctaccaccctctgccaacctgatggcacctggagctctccactgccagaatgtgttccagtagaatgtccccaacctgaggaaatccccaatggaatcattgatgtgcaaggccttgcctatctcagcacagctctctatacctgcaagccaggctttgaattggtgggaaatactaccaccctttgtggagaaaatggtcactggcttggaggaaaaccaacatgtaaagccattgagtgcctgaaacccaaggagattttgaatggcaaattctcttacacggacctacactatggacagaccgttacctactcttgcaaccgaggctttcggctcgaaggtcccagtgccttgacctgtttagagacaggtgattgggatgtagatgccccatcttgcaatgccatccactgtgattccccacaacccattgaaaatggttttgtagaaggtgcagattacagctatggtgccataatcatctacagttgcttccctgggtttcaggtggctggtcatgccatgcagacctgtgaagagtcaggatggtcaagttccatcccaacatgtatgccaatagactgtggcctccctcctcatatagattttggagactgtactaaactcaaagatgaccagggatattttgagcaagaagacgacatgatggaagttccatatgtgactcctcaccctccttatcatttgggagcagtggctaaaacctgggaaaatacaaaggagtctcctgctacacattcatcaaactttctgtatggtaccatggtttcatacacctgtaatccaggatatgaacttctggggaaccctgtgctgatctgccaggaagatggaacttggaatggcagtgcaccatcctgcatttcaattgaatgtgacttgcctactgctcctgaaaatggctttttgcgttttacagagactagcatgggaagtgctgtgcagtatagctgtaaacctggacacattctagtgggctctgacttaaggctttgtctagagaatagaaagtggagtggtgcctccccacgctgtgaagccatttcatgcaaaaagccaaatccagtcatgaatggatccatcaaaggaagcaactacacatacctgagcacgttgtactatgagtgtgaccccggatatgtgctgaatggcactgagaggagaacatgccaggatgacaaaaactgggatgaggatgagcccatttgcattcctgtggactgcagttcacccccagtctcagccaatggccaggtgagaggagacgagtacacattccaaaaagagattgaatacacttgcaatgaagggttcttgcttgagggagccaggagtcgggtttgtcttgccaatggaagttggagtggagccactcccgactgtgtgcctgtcagatgtgccaccccgccacaactggccaatggggtgacggaaggcctggactatggcttcatgaaggaagtaacattccactgtcatgagggctacatcttgcacggtgctccaaaactcacctgtcagtcagatggcaactgggatgcagagattcctctctgtaaaccagtcaactgtggacctcctgaagatcttgcccatggtttccctaatggtttttcctttattcatgggggccatatacagtatcagtgctttcctggttataagctccatggaaattcatcaagaaggtgcctctccaatggctcctggagtggcagctcaccttcctgcctgccttgcagatgttccacaccagtaattgaatatggaactgtcaatgggacagattttgactgtggaaaggcagcccggattcagtgcttcaaaggcttcaagctcctaggactttctgaaatcacctgtgaagccgatggccagtggagctctgggttcccccactgtgaacacacttcttgtggttctcttccaatgataccaaatgcgttcatcagtgagaccagctcttggaaggaaaatgtgataacttacagctgcaggtctggatatgtcatacaaggcagttcagatctgatttgtacagagaaaggggtatggagccagccttatccagtctgtgagcccttgtcctgtgggtccccaccgtctgtcgccaatgcagtggcaactggagaggcacacacctatgaaagtgaagtgaaactcagatgtctggaaggttatacgatggatacagatacagatacattcacctgtcagaaagatggtcgctggttccctgagagaatctcctgcagtcctaaaaaatgtcctctcccggaaaacataacacatatacttgttcatggggacgatttcagtgtgaataggcaagtttctgtgtcatgtgcagaagggtatacctttgagggagttaacatatcagtatgtcagcttgatggaacctgggagccaccattctccgatgaatcttgcagtccagtttcttgtgggaaacctgaaagtccagaacatggatttgtggttggcagtaaatacacctttgaaagcacaattatttatcagtgtgagcctggctatgaactagaggggaacagggaacgtgtctgccaggagaacagacagtggagtggaggggtggcaatatgcaaagagaccaggtgtgaaactccacttgaatttctcaatgggaaagctgacattgaaaacaggacgactggacccaacgtggtatattcctgcaacagaggctacagtcttgaagggccatctgaggcacactgcacagaaaatggaacctggagccacccagtccctctctgcaaaccaaatccatgccctgttccttttgtgattcccgagaatgctctgctgtctgaaaaggagttttatgttgatcagaatgtgtccatcaaatgtagggaaggttttctgctgcagggccacggcatcattacctgcaaccccgacgagacgtggacacagacaagcgccaaatgtgaaaaaatctcatgtggtccaccagctcacgtagaaaatgcaattgctcgaggcgtacattatcaatatggagacatgatcacctactcatgttacagtggatacatgttggagggtttcctgaggagtgtttgtttagaaaatggaacatggacatcacctcctatttgcagagctgtctgtcgatttccatgtcagaatgggggcatctgccaacgcccaaatgcttgttcctgtccagagggctggatggggcgcctctgtgaagaaccaatctgcattcttccctgtctgaacggaggtcgctgtgtggccccttaccagtgtgactgcccgcctggctggacggggtctcgctgtcatacagctgtttgccagtctccctgcttaaatggtggaaaatgtgtaagaccaaaccgatgtcactgtctttcttcttggacgggacataactgttccaggaaaaggaggactgggttttaaccactgcacgaccatctggctctcccaaaagcaggatcatctctcctcggtagtgcctgggcatcctggaacttatgcaaagaaagtccaacatggtgctgggtcttgtttagtaaacttgttacttggggttactttttttattttgtgatatattttgttattccttgtgacatactttcttacatgtttccatttttaaatatgcctgtattttctatataaaaattatattaaatagatgctgctctaccctcaaaaaaaaaaaaaaaaaaaaaaaaaaaaaaaaaaaaaaaaaaaaaaaaaaaaaaaaaaaaaaaaaaaaaaaaaaaaaaaaaaaaaaaaaaaaaaaaaaaaaaaaaaaaaaaaaaaaa

SEQ ID NO: 24525 - DNA, 3740 bp, Homo Sapiens
agcgacgcgcctgctgggccctgctgccgcccgtgccctgctgcttgggctgcctggccgaacgctggaggctgcgtccggccgctcttggcttgcggctgcccgggatcggccagcggaaccactgttcgggcgcggggaaggcggctcccaggccagcggccggagcgggcgccgctgccgaagccccgggcggccagtggggcccggcgagcacccccagcctgtatgaaaacccatggacaatcccgaatatgttgtcaatgacgagaattggcttggccccagttctgggctatttgattattgaagaagattttaatattgcactaggagtttttgctttagctggactaacagatttgttggatggatttattgctcgaaactgggccaatcaaagatcagctttgggaagtgctcttgatccacttgctgataaaatacttatcagtatcttatatgttagcttgacctatgcagatcttattccagttccacttacttacatgatcatttcgagagatgtaatgttgattgctgctgttttttatgtcagataccgaactcttccaacaccacgaacacttgccaagtatttcaatccttgctatgccactgctaggttaaaaccaacattcatcagcaaggtgaatacagcagtccagttaatcttggtggcagcttctttggcagctccagttttcaactatgctgacagcatttatcttcagatactatggtgttttacagctttcaccacagctgcatcagcttatagttactatcattatggccggaagactgttcaggtgataaaagactgatgaaagtcatccctcactgttagtaaggaagcagtatacatcaatgggaacagggcccatggaaatgtacaggagtttccctattttggtgttcagcttgaaaaaggacttgtcagaatcaactgtgtcatcaaaatttaagtaatgtgcattgaaaataaggttgatcatgggaatatgcagaatttccaatgtatttttaaatacaaataaaattgtaatttagaatttttaatcttaggtttcttgattaatttataagagatcaattattgtcagtcttttttgtatgttttttaaaaacatagtccagagcatgggcagaattgacacctctcttttaagtgaaatttggattgctcacaaagcactaggaaatgtcatggggttcaaatatatatcctacacaactgggcaatacatttttgtttgatttttaggtctgtgtatacattaacagttcatgtaattaatacctgatcatttgggataatgaaagtgaagttagttgtagatgaagtaaagttataaaagagattaaaaatgcggtaactttttaagataataatcatacagaaggtatgaagttcattttcggtagtcttccaacctctcaggtgcctaataatttatgtttgaggataacaggtaacaaagatagtcgagataggagaacgtgtctattagtctttgcatctaaaaggcagtgagttacgttcctgccttccactgtgtttctgacatagcaatgtttgtttgatattggaacctggattcatattttatgtaaataatatcaagctgtatatttttcaaaggttttttaaactttggagactctttcttttgttaagcagttaaaggaataaaagagctggaaaaaaaattgtaccttcaactcaggttgttccatataacatacgtattctctgctgttacgtaagttttccgattcacagagtccattcatgtacatcacttacacttaaattgtaaaaataattagtctgaccatctgactttaaaagactgttgctacacgtacatcatgtttaggagaatgtgggatatggggaaggggagaagaagacagtccagtggtgactagttgctgctgcttaacctatggcctattgctgcccattgtccctggttttaatccaagcctattatggaatactgcagtgagattatccattctcagcctgttgagctgcattaaattagaatgggaggctgtaagtaaaactcatgcctcttggccaggcattctgcaccagcgtgtccctctgtggcttgctggtcctggttgttctcagactggcagctgagctgcgcttggcttgaagcatactgaagcctgcagccagggacaccgccattgaatcagatggagggggatgaaaaagcagagaagggggcatgtggctggctattcttgctctctggagaacagcttcattgttaggagtagttaggctgaaagtggacttcccactgctgagccacccaagaggcacactgagcattagtgacgggtgagccacataagaataatgtttaaaaaagagaggacttgaagtagctatgcgaaaatttagaactttgcactttgttaacgcttatttatggtttagtgttgatgccatttggagtgacctatgggttggacccatatctttttattattaaggtctcaatctggctctggttaataaacgtttcccgcttcatcccttaggaaaatggtccaagtctcctcaggcttttggatactgaattgttataaaacacatcaattctgccagtttataaaacactggaattgtattagacatgtctgagtatgtacttgtttatagactcaaaacatgatgaaaattcatttcattgtcttcactgaatagacttaaccttgacagtaagcttaaagcattagtgtcatttaattacatgtctgaggaatttatgctaactagattttgggcttttgcagcgaattttagtcggggcctcattcctgagcccaagtgaccctttcacctcagcttcccaagtagctgggattacaggtgcacaccaactgtgctttgcagttttgtttgtgtgtgtgtgtgtgtgtgtgtgtgtgtgtgtgtgtgtgtgtgtgtattttgttttttttacaagcccacaacatcatagctttgcagtttttaaccaggagctggtggagatctttgaaatcatttaggccaattcttttagttacatttatgatgaaactagggatctaccttaaagttttgggaagctctttcaaaacttcagacacctagaaatatatatagtgcagttcagttttagtttctgcagcatggtttggaaacaaaagatacataggatttaaactcgatttgttttcttcttacagtagaagtaaatgctcttgtggcttgaatcgcatctcccaagaaagatacgttcacgttcaaacccccagtactgtacatgtgaccttatttggaaatagggtctttttagatgcagtcaagatagaattagatcatactggattacagtgggccccaataactaggtttttttgttaaaaaaaaaaaaaaaaggaaatgtgaacagagagagaatgccgtgagatgatggagggatagattggaatgatgtctgcgagctaaggaatactgaggattgctgccaaccatccgaagctgggagaggagatggaacaactccctcggagcctccaagaggaaccaaccccactgatgctttgatttgggatttccggcctgaactgtaggaaaataaatttctgttcttttaagccatttttaccagtttgtggtaacttgttacagcagctgcaggaaattaataaatgccaatgttgaaaattaaaaaaaaaaaaaaaaa

SEQ ID NO: 24526 - DNA, 5448 bp, Homo Sapiens
catctctagacttagaactggaccttcaggcatctctgacccggcagagccgcctcaatgatgagctgcaggcgctgagggacttgcggcagaagctggaggaactgaaagctcagggagagactgaccttccaccaggcgtgctggaggatgagaggttccagaggcttctgaagcaagctgagaagcaggctgaacagtccaaagaagagcagaagcaaggtctgaatgcagagaagttgatgaggcaagtctccaaggacgtgtgtcggctccgggagcagagccagaaggtgcctcggcaggtgcagtccttcagggagaagattgcctacttcaccagagcaaagataagcatcccatccctgccagctgatgatgtgtgattacatgacttaagaaattattttttcatctgttcactttcttagggagggtaaaagactgaagatttgtgtttttgttttggtgtttggttttttttggtaacgtaactgtcaactcttgaagaacttttatttcacatcagattttcaacacattaatttgtaaagtaccttgagtgtaatttttatatgcttaaaaaagaaaaaatcatataagaaagatgggataacctggtacacaaatgttgcccagtatgtgcgcattgccagtggacttcattttgtaaaaatggaatagaggcagtaccccacatgtgtactgttgagccggctgttgagaaacaacttggttcagccggtggttttgcttctcctttgtgttcctgtgagtaggctgtgccgatggcagcagcgccacgtggtatctgtgcgctggcgaggagaggagcgctttccatttggaggcagtgtgagcacacgctggagtgcagcgttccaaagtccgcccgaaatggatgctgcgtccacggccatcacctgtgcgggaacacctggtttccttaagacaatttcctttttgtccttttatatttttctaaagaaaactaagatataaactaccaagtgctcttaagaataaaaataagaataagaatacaaaggagcactactcttggctacacgaaagatcttgggattcatgacactgagggcagggagaagaaagaacaccagccacgcagagatacaaataagctcatcaaatgagcagctggtttgtctcactcagcctgaatttgcattaagtgttcaaaagtgagtttctggcttgcactagtgttttgccctaaatctaaggatggtgcctagtggtggccctgtgttctgaggacagagagagctggaggggtggaggggaatgcatcggcactcatttggtgtaaccaagaagagggggaaagatgtcttgatagaatcaaagttgccaaaaacaaagaagagtttatcaagcagatttctaacatttagtagaaactacttcatagctctcatttttagggggttctatctataatttatggtaaatagttgggaggcaaagggaagaatgtgtgtggggggattattaatttgaagtataagctaaattgtttattaaaaagcctattttggatgaacaagtttagagagataaactgactaatgtgtcctccagtttagaatttcaccttacccgacccaggcacttcttaaaaacacagatcctcagtgcagctctgccagcatcaaggcttttaaaatatgtagtatttaggccatttaaaccatacttattactcaataacccaagaaacaattttgggttagccatctaatatagcaaataaaatagattttttaaagaaatccaaaattgtcttaaaggaatggaccccttgaagaaaaaaaaaaaaagttttgttcctcagttagaatgctcactagctcactagcaagaatttttattttcttgaaagcaattatatatattttggaaagttcatgttattggaattgaagttcaaattaagcaacttctgagcctagaactttaattactttttcctaaatgtcccaacacttacatacaaatttctttgaagacataactggacatggcagacactgctttgaacaaaaaccagcctagtgaattgactgagtacagtcctttaaggctgcccagttcattctattagatgactaaggaaaactagaaaaagaatacagttcacccttgtcaaggtcaaatgtgaaagacagaagtttatttaatgtagaggtaaatgaaggtgagctgttttcagcatcttagtttgaccatgaaaatgtctatagaattatgtgtagttgttccgtacgattttattttcttcatttatttatttacagtcttatttatgttctgtttaatatatagtttgattctggccattttaaatatttgacacagaagagactatattggaatatttacagctttataagtctttcatcagattagctgttgactttttgtaatacaaaaagtttcagacaagtattaaagaataaaatctgtctcaggctggtagttagcagttgtgaccaagatgcttttggttgttgtatttcacaaaatttcctcatttctaacatgagagatgaacttattttaatataatcctttttctacactttaaaagtcagcaatagtgttatgtatttataggcagcttttaataatcttgtcatatttgtactaacccaaatgattcacagtgacaaaacattttaataacttgatcacaaaaccatatggacaaatatgaattttaatattataaatactatttttaaaaggtagaatttattcgcacagggtaaaaagaatgtaatatttagttctcaagtttgaattatcagtatattattacaattttgtatatcagaatcttaagtgttacaggtacaaaaagaatattgctagccaaatgaacaaagtttagctaaatctctgtagcatgcaaatcaaataaattaaaattttttgctattgctttatctatattgtcttaaatatcaaaagctcaggactgaacttaatatttaatcaggttaaattctgaacatgtttctgttttaatttgtcttgtttgtaaacgtatgcaaatacatcacatagattaactggtttctgcactttccatgtgtttgtgggtggaaaaaaattcagtggtttttttttaaaaaaaaaagcaaaaacaaagctacatattgcctaatactctatttcagtgtcgtttattgttcagtttatttccctgattggcacaaacacaagagtttccttgaaccatgtaccaagcaaatacaaaatatttcatgaagaaatccccaggctggcagtttgtgatgaatagttcttgttggaactatatgtattgctgataaaaaaggacgaagtattttcattgagcaaataaaatgaagggctccagaatatgtgctctgtggtcgctgcgcctgggctggcagtgtgctccacagagaggcagccgtcccaggaggttatctacccacacaccccagtcctgccctgccgtgccccccacaggctgctcagtgcctgggaagccagaaacgctgcccgtgaaatacagaacacaggatgcagaagcacgtttgtgtggcagagtctacttgaatcatccaaaacccaagatcgccctcctgcctctgacagtatagaaggcgtgactgaatgtggctgccttttgaaaaaggttccatagagacactgaggtctctgattcagaaggagatgatgtgtctacacctttcacctctgaagcttctaaagagctagtaattattttatataataagacgtcatgcattttaaataaatatgcaacaagacctcaggcttattatactaggttatcttaaacacctgaaagaagtaaatgatttgccaaatgattccgctccatatgaataataccttcaaagatacatagagattaatgttttatttaccacttctgtgcaatcgctattttaaaattgagaaaactcatccacagtaatgggtgtcattactattcagtcttgattgattttggtctcagactagaagataaaaatggtttaccagtcttggaaagaaactatagtttaatagccacaggaaaagatgcattttcaaaaatcaaaagcacagtgagatgactagagcgggacatcctaccaaatccagtgttgagcaagcgtctcctgaacagcagacgcttgtcctttctggcttagtgtttcaggttggtgtttctcgtctccagttcttgatgatgatcttgtgtttgtgccactgcgtagtggcccgaagctaggggagcgtggctggagcaggctgcacagtggagcagacaccctcctagcagaagagaaagtccagcaaaccagcccagaaacagggcctccccaaactcccacctggggacaaagtctgggacgttctcatcccagaactcctgaaccgtcttgtgggcaacccaagagacgggaaccagggctgtgactcccgaggcccaggacagaattcctcccaggatcagcagtcgcctcttgagatctctctgactctctccaattctcaaacagtccaggccaaacccagagaccagcaggcccagaaatcccagcccatttgacagaaacattaagatcctggagaccctgagttcagcaggcaaagccaggaaggagtcaaagtccttgcattgcatccccacttcctcttggatgacacaggtttgccagagtcccatggtccagttttccatttcatttaagtccaggttgaggttcttccagtgtggcaggtagtttgtaagacaggataaaacccatcccagcaaagataatgaaactccagctagttgagctacagttctaaatactaaagccattataatgtcctgagagctttagccaaactaactcctgcccttcggttgctgtgaaaagaagtgtgacacttgtgttataacttatgaaactcagaaatatttcttcattgtgtatataggaggattcttgccagagttgctattgtttgattccatgttgaatgggtttcacaaaaggatagggaaataatgccgccaaccagtaatgccaaggtgtggccaagattgtgtttgtgtcctgtgggctggatttgacagaaagcagtttgtcactgaaatataattaagtgataatctcctttcattgtcaaggttaaaatggctttcatgttattcccaacctttctaacaaagaattaagtctaaatgcaaaatgtttaactgatggttttggttcaactcctcctgctttgtgtttcactaactgcacctgtcagattttcatctcttatagttctcacatttcaaatgtgcatgttatggtaatactgagtgttattttttaaaaataggtttaagaaaagtatttcttaaccaaataaatcaatcttatcagaaaaaaaaaaaaaaaa

SEQ ID NO: 24527 - DNA, 6255 bp, Homo Sapiens
ctcaacgggtctcggctgagccaccgggtgagctcaccgcccagcccaaaccaggagattgcgagggagcgatgcggtgcagcgcgtgttcttggggaagatcccgactaagccattttccagtggcacctcttccatcatgagttcctgaggcagtccgatggggctactttattccagaacaatcacaatttgcttgtaaatgcatcacgaagaggcagcccagaatgaagaaagcaagcaggagtgttggctcagtgcctaaagtgtctgcaataagtaaaacgcaaacagcagaaaaaattaaacctgaaaacagctcttcagcatctacgggaggcaaacttgtaaaacctggaacagcagcatcattgtcaaagaccaagagcagtgatgaccttttagctggaatggccggaggggtaacggtgactaatggtgttaaaggaaagaaaagcacctgcccatctgcagcaccttcagcatctgcccctgccatgaccaccgtggagaacaaatccaagattagcacaggcacagcttcttcaaccaagcggagcacttctacaggtaataaagaatccagttctactagagaaagattacgtgaacgtacccgattaaaccagagcaaaaaactaccttctgcaggtcagggagctaatgacatggcattggccaaacgttcccgcagtcgaactgctacagaatgtgacgttcgtatgagcaagtctaagtcagacaatcagatcagtgacagagctgctttggaggccaaagtgaaggatcttctcacgctggcaaaaaccaaagacgtagaaattttacatttgagaaatgaactgcgagacatgcgtgcccagctgggcattaatgaggatcattctgagggtgatgaaaaatctgagaaggaaactattatggctcaccagccgactgatgtggagtccactttattgcagttgcaggaacagaatactgccatccgtgaagaactcaaccagctgaaaaatgaaaacagaatgttaaaggacaggttgaatgcattgggcttttccctagagcagaggttagacaattctgaaaaactgtttggctatcagtccctgagcccagaaatcacccctggtaaccagagcgatggaggaggaactctgacttcttcagtggaaggctctgcccctggctcagtggaggatctcttgagtcaggatgaaaatacactaatggaccatcagcacagtaactccatggacaatttagacagtgagtgcagtgaggtctaccagcccctcacatcgagcgatgatgcgctggatgcaccatcctcctcagagtcggaaggcatcctcagcatagagcgctcccggaaggggagcagcgggaatgccagtgaagtgtccgtggcttgcctgactgaacggatacaccagatggaagagaaccaacacagtacaagtgaggaactccaggcaaccctgcaagagctagctgatttacagcagattacccaggaactgaatagtgaaaacgaaaggcttggagaagagaaggttattctgatggagtctttatgtcagcagagcgataagttggaacactttagtcgacagattgaatacttccgctctcttctagatgagcatcacatttcttatgtcatagatgaagatgtaaaaagtgggcgctatatggaattagagcaacgttacatggacctcgctgagaatgcccgttttgaacgggagcagcttcttggtgtccagcagcatttaagcaatactttgaaaatggcagaacaagacaataaggaagctcaagaaatgataggggcactcaaagaacgcagtcaccatatggagcgaattattgagtctgagcagaaaggaaaagcagccttggcagccacgttagaggaatacaaagccacagtggccagtgaccagatagagatgaatcgcctgaaggctcagctggagaatgaaaagcagaaagtggcagagctgtattctatccataactctggagacaaatctgatattcaggacctcctggagagtgtcaggctggacaaagaaaaagcagagactttggctagtagcttgcaggaagatctggctcatacccgaaatgatgccaatcgattacaggatgccattgctaaggtagaggatgaataccgagccttccaagaagaagctaagaaacaaattgaagatttgaatatgacgttagaaaaattaagatcagacctggatgaaaaagaaacagaaaggagtgacatgaaagaaaccatctttgaacttgaagatgaagtagaacaacatcgtgctgtgaaacttcatgacaacctcattatttctgatctagagaatacagttaaaaaactccaggaccaaaagcacgacatggaaagagaaataaagacactccacagaagacttcgggaagaatctgcggaatggcggcagtttcaggctgatctccagactgcagtagtcattgcaaatgacattaaatctgaagcccaagaggagattggtgatctaaagcgccggttacatgaggctcaagaaaaaaatgagaaactcacaaaagaattggaggaaataaagtcacgcaagcaagaggaggagcgaggccgggtatacaattacatgaatgccgttgagagagatttggcagccttaaggcagggaatgggactgagtagaaggtcctcgacttcctcagagccaactcctacagtaaaaaccctcatcaagtcctttgacagtgcatctcaagtaccaaaccctgctgcagctgcaattcctcgaacgcccctgagcccaagtcctatgaaaacccctcctgcagcagctgtgtcccctatgcagagacattccataagtggaccaatctcaacatccaaacccctgacagccctgtcagataagagaccaaactatggggaaatccctgttcaagagcatctgttaagaacatcttcagccagccggcctgcttccctgccaagagtgcctgcgatggaaagtgccaagaccctctcagtgtctcgacgaagtagtgaagaaatgaaacgggacatttctgcacaggagggagcgtcgccagcctctctgatggctatgggaaccacgtctccacagctttccctgtcctcttctccaacggcatctgtgactcccaccacccgaagccgaataagagaagaaaggaaagaccctctctcagcattggccagagaatatggaggatcaaagaggaacgccttgctgaagtggtgtcagaagaaaacagaaggctatcagaatattgacattacaaacttcagcagcagctggaatgatgggctggccttctgtgccctcctgcatacatatctccctgcccacattccatatcaagaactgaacagccaggataagagaaggaacttcatgctggctttccaggcagctgaaagtgtcggcatcaaatccacactggacattaatgaaatggtacggactgaacgacccgactggcagaacgtgatgctgtatgtgacggcgatctacaagtactttgagacctgagcatgccgggaggagccgccccaatagcgggggtacccctccacagcgaccgagcgacaccgacgccattagctacgcacccctgtaaagcttccagcaactctgggctgccccacagcgtgtgagcctccagctcggggcttccgtattggaagaactcagccgtgtggcccacagctcccaccagggcccctcccacatgacccgtccattcaggtcatgtgggctcagcacacatcctgcaggccggtggctgctggagttttccttctgaagagaatattgaactacactagtgctccagggcaccaaacaaaaagggctcatgcacagctgaatttgggaaaagggattcagttctgtgggaaactcactagggttgatgaaggctcggccgcggcacttcctgactattggctggggtgggttccggtgctggtgagaacccagaaggagagtcagcgcctggcagttcccagcgccctgggcccttcaccgtcctagtttggaggagcatgttcaccacagacgtgggtcagctgccccacacctgacggggctgtcccggccgacacaatccaggcgtgttcagcctgagctaggagagtatctagagggcgtggtgcgggcacgccagggctggggtgctgctgctgcactcacgcggctgggctttctggcgggaagcagttacgggggccccttgcctggactcagcgacctgtcttccagcctggaaggggtttggagtcccagctctggctttagatttcttcatcataaggagtttttctagttaacatttttgttttgttacgagcaatgctggaaaaggtcgctcctgttctgttagtaccaaagttacattgtttcaataagcatagaaatctaaacaacatctgtacattagcatggtgagagcaaggaataaagcaggaaataggagaaaagtaaacaactttagggagcccaggcagtgtcatttaaactcactgagtcactaagacataattctcctaggccagagttaaagaaagtgccttaactcttcttgtgagggcagccactgccctccatggccaaggcaggacctccaagactcagtggttgagttgtctcctaccaccatgcccgccctccccaggtactgggtccatgccccctgtgcccaccctccccaggtgctgggtccatgctgtttgaaccaaagccttatttaaaggtggtcactggagatgctctcaggccagaactcaacagctatttttgggaatagggatctcccgtgtgcctaacgcagtagctattggtttgaacaatgtccagacaagacctgtacctttgagaatataactgtgtttggcacctgcatagcaccatgaggaagaccagccaccagtggaagcggggtcactgccccacagactggatgcaatgaggggctcacaggaggcccagccagcccgattgtgggctgaggggtctgcattcaagcacgatgttctagaataggagtttaacgtgtctacgtaacctagaatgtggttattaggaaaggggctgtgcatgtgggtgcagctggcggcacacctggtcaccagatggccagaagctgcccatcagccctgcccagatgtcagcctgggagctcaggctgctgccgctggctggatgccctttagtgaaatgcctgttttcagctaagaaaggagaggccaggcaagcaaagtcatgccacaaagcatatcagagacccccgcagactcctggccccgtcccgccccccgtctgagttgtgtttttgttgctgttcctctgttgatggccagctctgctgttggcatgagccactgatgttcatgtgagaattactgtttttaagtgtctctccacttaggtgtcctcagttcccacttttgctctcatttgccttcacagaggccactccacctgtccggatccagctgtctggtcatggtttggtttatttattttgtccttcaggggctgttttgccctaagaatgagggggcttcccctggtctgcagttcccaactttatcccttgctggccatgcgagcccagccctggtgcctcatgggatgggggggtaggggtccccaggatcttctggaggaaggtggccatggatggatgggctgtatctgtgttttctctctgggagtctcatgggtccagcatcaggcctgaggtcagcaacagggaaagagggtgggcacggggagggcttggccccgcctatctagagacttgcctcgggcccctccttggggaaggtttgcgtgcagagctgcaagggagagggttccagaagcattgccttttgcctcgtctaataggatccttaggacactgtgggctttaggaatgactatagatgctcacacgtgtttaaagtgacatttggagatgctctcagtcctgtggcatctggcacgaagtctccaagaagccactttgcctcttctcccttcaagcacaagctttactgcaaaagggccagtcgcgtttctatttctctcgatcccaggcttctgcggaccgacgatacgtttaaatgttgttctagtaaatattcttgaatgtattaaaatggctgaaacaacaaaaaaaaaaaaaaaaaaaaaaaaaaaagaaaaaaaaaaaaaaaaa

SEQ ID NO: 24528 - DNA, 4399 bp, Homo Sapiens
ggaggagaggtcggagccgtctccaggagcccttagagaccgagtcccggcggcgacggcggggcagcgcaccggcaggcggattcattccacttaaaacctgaaaacattggaccacacaaagtcttactgatttcaggtaaaaacaataattgaagatgtccagcaaaacagcaagcaccaacaatatagcccaggcaaggagaactgtgcagcagttaagattagaagcctccattgaaagaataaaggtttcgaaggcatcagcggacctcatgtcctactgtgaggaacatgccaggagtgaccctttgctgataggaataccaacttcagaaaaccctttcaaggataaaaaaacttgcatcatcttatagtggaatagagaaacagctcctcgcctcttcccaacaacgcaaattatgagcagctccttgaagagatttaccttcagcttatttggtaaccactgctaataactaaaatgttctcagcttggaataatggactctgaagtctctattttccaagttgtcctttctcttaaaataccctttactgatttaatacagaataacaatcttattttccacttggtaactatggctttatgttgggttactgtttaaggaaagttgatctgggcctttttaaaaacataattatatactttagaaatacaagggattccgatatgtcaggacctaaatggcctaagcacctgtcaaattaaaattccaaaattcattgaaatcctaaagccttgatattatattctttataaggcgtgtgccagcctgtatagtatataagagagaggggtgtttgtgtgtatatatatatgcctttgtgtatacacttatcaaagctattttcttatgaaaacgtccctctctccataccatcagtttctcagttccagaagttatacctttattttgagctgtgtataggtagaataaaaaattcctttcatatcgttattgtacaaaaagtaaagagtatcctaaagattgtattcattgtaatcaagtaatgcaatcatctctcctctcttgaaatcttgctggacctcttaggctacaataaactgtaccaaactaaactgacagtccttcgataatatgaaacattaatttacaaggacccgttagggcttcaatgatgctgagtctggaaaaggggaggagacccttgggaggactccaggcagctgtgctcccagggctcatgttctctactggattagggataggcacctctgaaatctccaccctgatgattggaatgaaacggagtgaacatgagcccagctgagagaggagcaggaatgtgtgaaaaacagctgctctccttgtcccagctttgtgattgagccctctgtcttgctctctctgccttccctgtgtctttcttctcttaccagagcatctgtttgcagaggtaacattaccttccccagccacaggtatgtggaatacggtgaggaaaaaaaaaattaaaaaaaaaaatgcaagctgtcaggatgcttaagctcttttcagacatctgcagtttcattcctaccttgttcacataccatccaagaggcacataggctacccaagagagccttggattcagtggtacactccttgggcccaagggctttagcagctggatatggggttccttgattttcctctgggcccaaatatagccctcacactcttggaatttccaggtatgggggtagccccaaaaggaggaatctcctatggccaataaggtatcttgactttatcaaagtagaagagagggtcacttcggagtcaaatcatacactaggcctttgatgctttaattcttcttcagttcattaaaagtaactactaaggaaaggttaaaaacttcccctcaaaaaggaatcaaccccaggaagtaattatttacaacgattttcccaaattttgtacaatctgtcctggaaagcaaaccccttttaaaatctaatgtctgggctttgagtattagctcatttagggtggacaaatgcattactgttttcaaactgctcacatttattcagtatttctccaagttgctatctactcagccttatgaatgcccctcgcttttctaaggccatgtgaaaatcacggcactgcccttagccttgtgtcatctgctttttcgttctgcgatatgcccagttcccaaatcaattataggtacctgtttaggagagaggaagattttacctctcaaagggtgagatttgaaatttacactaaaaagacaactttacatttaatgcttcacttaatgagacattcttttttttataagtctatttttctactcagtttcagaacactaatctgattttcactctgatttttaacgtttctttaaatatttataatgtagcttctttcaaaatattttcatgaaaaattacttttattataccattatgtgcatgttattggtagcaggcatagtttattatttagtactgaaacatgctcttttacctaacagtaaacaagtatgttttgatatatatctgttaatatgcttatagtggtaagaaatggacttgaggtcccaggagatttcattttattcaccctggtcagatacaataaaggctatgagtataaatacataacttcctaaccaggtgtagggcatgttcatgaatatcaaatcttttgatgctggacccaagagaggaaaagttgtagctaaatgttgatttacttataactagacgtctatgtgagaaaatatatgtatacatatatatgatatgcagaagtcactttttttatcaggctttattctccttacaaagccacagtttaactgtctgcaacagttggtttatgttaatgatagacaaatacccagtgtttgttactttttccaactaccactgtaatgataatctttctcacgtatatacatgcaacttcttggcttcatttccatgaagctgtttcaatatattcagtatactttgtccttaatgctgcttctgttaacagtgatctctttctttttttcattcttatatcttcattagttcatcataaatctgtccagttgaggcctcaggaccacggcatgatttcatgactccgaagtattttacagaaacattttttaaataagggaaatattttatataccagatggttcacaagtgatggctcatagctagtttttttttttcttctaaaaaatgtcaggtttttaaaatcatttaccttattaaaatgaaaagtgccatacttaacttttaaaggaaagacctgacttgctttttctctatttagactgtttttgtactttactaatctttaaactatcaggaaaaaaaccaaaactttataccaatgatttagtaattttgaggcatagggtagcttacgtagtggaggatgtgccaaatattctcttcaaatgccaccttctcaatttataactaaaatagtgttatctgactaattcctctgaattttgatgtaagatctatataggcccccaaaatgatcgtagtacatgccagtcatttctcagtgaaataaatacaataccagagtacattatgggttttattgctttcttttatggtagacctgttaatggggaaaaaatacatcaaatcaaatagaatcttatatctgtatgttaaaatagagcacttacctgaagtcagtggcctggatcatagccctggatcatttcccagtctgtcctgtgctgtgtgaccttggacaaggcgcttcatctctctgggcctctatttctccatttgtaaaacaagtggctgcagtagatgatggctgagagcccttcctgttcccagatgccttggtccaaagaccccacccctctgctggtcctgccaacgtgttggtgctataagctgcttcagatataaaattggtttatctataatgtttgttcatttaatagcttctaaaaggcctttttgttatacagtgctttttttctagttttatggacttggttactgtaataatgtcttgtttttagccatgtaactacaaacagatattctcttgatgtcttagtaaatttgcatttgatatatcattgatgagattttgttgttatgtaatattctttggctacgcatctgtccagcatcttattaaccataatactgtgatcattatttggaaatatgtcctatggaaagaataaaagcatgtacttcacagctagcatgttcacagatttgaaagaagtttcattaaaagcaccattgctttctgtccaaaaaaaaaaaaaaaaaaaaaaaaaaaaaaaaaaaaaaaaaaaaaaaaaaaaaaaaaaaaaaaaaaaaaaaaaaaaaaaaaaaaaaaaagaaaaaaaaaaaaaaaaa

SEQ ID NO: 24529 - DNA, 3037 bp, Homo Sapiens
ggctgccgcgccgacgagctgctgagctggaagaggccgctgcggagcctgctcggcttcgtcgctgccaacctgctgttctggttccttgcattgactccatggagagtatatcacctgatttccgtcatgatacttgggcgtgttattatgcaaataataaaggatatggttttgtctagaacaagaggtgcacagttgtggagaagcctcagtgaaagctgggaagttatcaattccaaaccagatgaaagacccaggctcagccactgtattgcagaatcatggatgaatttcagcatatttcttcaagaaatgtctctttttaaacagcagagccctggcaagttttgtctcctggtctgtagtgtgtgcacattttttacgatcttgggaagttacattcctggggttatactcagctatctactgttactgtgtgcatttttgtgtccattgtttaaatgtaatgatattggacaaaaaatttacagcaaaattaagtcagttctgctgaaactggattttggaattggagaatatattaatcagaagaaacgtgagagatctgaagcagataaagaaaaaagtcacaaagatgacagtgaattagacttttcagctctttgtcctaagattagcctcacggttgctgccaaagagttatctgtgtctgacacagacgtctcagaggtatcctggactgataatgggaccttcaacctttcagaaggatacactccacagacagacacttctgatgatcttgaccgacccagtgaggaagttttctctagagatctttcagattttccatctctagaaaatggcatgggaacaaatgatgaagatgaattaagccttggtttgcccactgagctcaagagaaagaaggaacagttggacagtggtcacagaccaagcaaagagacgcaatcagcagctggtctcacccttcctctgaacagtgaccaaacctttcacctgatgagcaacctggctggggatgttatcacagctgcagtgactgcagctatcaaagaccagttagagggtgtgcagcaagcactttctcaggctgcccccatcccagaagaggacacagacactgaagaaggtgatgactttgaactacttgaccagtcagagctggatcaaattgagagtgaattgggacttacacaagaccaggaagcagaagcacagcaaaataagaagtcttcaggtttcctttcaaatctgctgggaggccattaatctaggaatcagcttgcaacagagcacaaaaaacaccaaaaaaatttcaaacaagaaaaaaaaaaaaaaaaaggaaaagaaaaaaattgaactgtaagctttaatgattactttagatttgttttattttccctcctgcagtgaattaattggatatatatcagctgacactgatagattgatatttctgatcgttatttttgtgtaataagcatggaaatgaactttatacacaccactgtgttgtcagagataaatattaggggttgtttttaaagcaaaaagaaaaaaacaaaaaccaaactattaaaatcctcctataaatattctttttctttacagtttttcaagcatgcaaaacagtttattgtaacttactgaaaaatattaacaattaattgtgaatacatgctgttaccagcttccttattcctaatacctggaaaatttttttttcaacggatagattttgatgtaaaaaagaccgaaattatcaaggtatcttagttgaaggacttgggaaatactatcaaaattaatttcttaggaaaaaatttaaaagtatatttaagtactctggatagactgaaacgtttccatgttatttctgcagttgtagacttaggcttatttgtaaagaagcatgctccattgactgccatctctagtcttgcagtgggtggtattaacccatagaaagcaagcagttgtgtatcacatagacaatggttatgatgtaaacagattcagttgttttgttgttcattcgtcatatgtttgtgatagggatgttgggagcacagctctattctgcctgctcagacttaagttagacccttatcttttatattatgtcatgaaaaaagtctcctaaaattgtgaaactagttcttgatgagtgatgtgatcatcagcaataaagatataataactctgttttcttagcctgtatagaggagaggaacttgcttggctttaaaatatatttatttgccatttaagtataaatatggaatctgtttcttattgggaagatagaatatatatattttcctttaaactttttaaggtcacttttaaataaccaaatttgatttatggtttttaacaaaggactaaagagctgaaaccaacctagttttgtttttgtgatataaactttaagtgtcgagggaccatgccagcaactaccaaaaatctcttaaatcttcaggtacagctggcattttggcagatgcatagagacatctgagaccctcagaaaggaaggataatccaagaatataggaaatctgtgttctcttcctttcattttatcccttatatttctaaagactaattataagtaatctgacattttaatgtagctactcttatttattttttctttctgaggtattaaaatatctggactgagttttgccaaatgttaaagggagaagagttactgaagactttgaacacttgctttttgtgattgcttatgtcattagtgcctcatgactgtgtttgatgtcctttattgatacaaagtgagcctgtgccttcattatcttgcccattttaatacaaatggaaacctggtgtttgaaaatctctgaactgtgtgggttttggaggaatatacctgaattttattcaataacagtttctggacaggaagaaaaatacagttacatatttataaaaaaaaaaaaaaaaaaaaaaaaaaaaaaaaaaaaaaaaaaaaaaaaaaaaaaaaaaaaaaaaaaaaaaaaaaaaataaaaaaaaaaaaaaaaa

SEQ ID NO: 24530 - DNA, 3076 bp, Homo Sapiens
ggggcaagatagccaactagaagcagctgcaattcgaggctcccactgagaagaactaaaacagtgtgcaaatcctgcaccagcaactgacatatccaggttctatgatcaggactgactaggtagttggcatggcccatagagaacaaggaaagatgggctggtggattggcccacctgggagccacatggggcaaggggagccctcaccctcagccagccaagggaggcagtgagtgagcatgctacccagcctgggaaactgctttttccatggatctttgcaatccacagatcagaagatcccactcatgagaccacaccaccagggccttgggtgccaactacagagccatgcagattctcaacagccactcagctggagtctgcctaaaaagttggggagggttgtcatcatcactgtggctgcctgctgcctaaaccctctgagttccctgggggagggggagcagtcatcactgtggttgctggctgcctaagacaactgagcttcccaagagaggggcagtcatcatcactgcagctgcctgctgcctgagaaaactgagctccccaagaagggacagcagccatcactgtggctgctagctgcctaagacactgaactcctggggaggaagggcggcagccatttctacagagccaggctgctgtttttcctttgctgatgccagggagactggacggcttggtcccaagaggtattccccacagcgcagcatactggctgtggcagatcatggccagactgcctctttaggctgaccctcacccatccctcctcactgggtggggcatccctgcaggaactccagcaactcaagccagggaattagggagagaactctgatctctctaagtctgagtccctagcaggaggggtggctggctgttgtctccacaaaccagaagacttattctttccccctgctcactctgaggaatccaggcatcccagacgagtgggatttcccccagcacagcatacccccttcacaaagggacaactaaagtgcttcattaagcaagtcctggatcctgtgccccccaactgggtgagacaccccaatgggtcaccagacaccttatacaagagcatttctactggcatcaggtgggtgcccctcaaggacagagatcccagaggaaggagtggggtctcatctttgctgttctccagcactctctggtgacatcttcaggtgtgggagggacccagataagtagggcttgaagtgaatccccagcaaactgcagcagccctacagaagaggtgcctgactgttcaaaggaaaacagaaagcaacaacaacatcaaccaaaaagtccccacgaaaacctcatctaaaggtcagcagcctcaaagatcaaaatgagacaaactcatgaagatgagaaaggaatgaaaaacccctcacaactcaaaaggccagagtggcttgtttactccaaatgatcacaacacctctacagcaagggcacagtgctgggaggaggttgagatggatgaattgacagaagtaggcttcagaaggtgggtagtagcaaacttcactgagctgaaggagcacgttctaacccaacacattggaacgaatcccagaacttaaagattggttctctaaaataagacagacaaaaataaaaaagaataaaacggaaggaacaaaacctccaataagtatggggttatgtatagaggccaattctacaaatcactggcatccctgaaagggaggtggagaaatcaatgcgttgggttggaacatgctcctttagctctgtgaaatttgttattacccaccttctgaaccctacttctgtcagcaaagaagctaagaaccatgttaaaaggttacagaagatgctaactagaataaccagtttagagaggaacataaatgaccggagccaactataaagcacataaggggaacttcgtgatgcaaacacaagtatcaacagctgaattgatcaagcagaaaaaagaatatcagagcttgaagactatcttgccaaaataaggcaggcagacaagattagagaaaaaagaatgaaaaggaatgaacaaaacctcaaagaactgtggaactatgtaaaagaccaaacctatgactgcttggactacctgaaagagacaaggagaatggagccacgttgggaaaacacacttcaagatatcatccaggagaacttccccaacctagcaagacaggccaacattcaaattcaggaaatccagagaaccccagtaagatactccacaagaaaatcaaccctcaagacacatagtcatcagattctccaagatcaaaatgaaggaaaaaatgttaaaggcagccagagacaagggcaggtcacctacaaggggaagcccgtcagactaaccgtgggcctctcagcagaaaccctacaagccagaagacagttgggtccaatggtcaacattcttagagaaaagaatttctaacctagaatttcatatctggccaaactaaccttcataagtgaaggagaaatccttctcagacaagcaaatgctgagggaatttatcaccaccaggcctgccttgcaagacctcctgaaggaagcactaaagatggaaaggaatcagaatgatgctggcctcataaaatgagttagggaggatttcctctttttctattgattggaatagtttcagaaggaatggtaccagttcctccttgtacctctggtagaattcggctgtgaatccatctggtcctggactctttttgtttctccacagacactacccaaagcagtccttcactacagtggcagacagacctgaaaattttcatctgaagcagcagagtgaactgcagagtcagagatagaatctcactatgttgaccaggctggtcttgaactcttggcacccaagcgatccttttgcctggaatcccaaagtgtcagatttactgaagaatatttcattgtaattactttttatactttataggtcaagagctctgttttaaagacaaaatttattgaatatactttttcaaacaaaaaaaaaaaaaaaaa

SEQ ID NO: 24531 - DNA, 1541 bp, Homo Sapiens
aaaacctacaggcgtttggggtcccatgattgttccagaccatgactcttcctggttgtgggtttgttacagagcaggagaagcagaggttatgacagttatgcagactttccccctcctttttctcttttctcttccccttgcttttccactgtttcttcctgctgccacctgggccttgaattcctgggctgtgaagacatgtagcagctgcagggtttaccacacgtgggagggcagcccagtactgtccctctgccttccccactttgagaatatggcagcccctttcattcctggcttggggtaggggagaccattgaagtagaagcctcaaagcagacttttccctttactgtgtgtactccaggacgaagaaggaagatcatgcttgatacttagattggttttcccagggaagagggcggagcagagcaaagtcactgtgaaccctgggccaggccctggctgggccagctcctgagagcgtctcgtgttgcagacccttgcccacttcacccacctgcaccttctccccctctcacagtgtcactgctgctaatggtcaaagtcaaatgtgtggccacatgggatgggccaggtcctctcaggctactttctggatgtcatttttaaaatatggaaacatgcaggtgccttcccaaagaggcttggactggtatatccaacgagaaacaaataagctaaagaaagtttaaactcaagaagaaagatgttgacagtctatgtaacagctggaaagtttataggcacccacctttgggacaacccagtgattatgaacatgtgatatctactatttaaaagaaatgttctcaccttgggttgattgtggtataccatgtgttatgaaaattgttgagctgaagctttgaatcgatttagttgagtctgactcacttgctttggttcctgtgtattttactacccctcttgtcagtgaccttccttccccaccccacccagagtgaatttgtagcatgattgtataaacctctatgtagaaaatggagatttcttgctctgaaatgttaagctctaactgatccatttctgtgtcctttagcctagtatgtctgaacttccattcttgttatatatttaaactttccctctatattataggttttgtggcatccacggtcaggtgtagaggaagctgccccttgcagaactgtactgtaatatttttcttttataaatattttcacaggactgattgtacacagggcttgtaataaaattttaacactgtgctgtgaaacaactatggggaatctccattgaaggctacttcatgggcacctgaaagtggagtgttatagctatgactttctatttcttgtttcctaagtaaattaaacctaattttcaccctttcattctgtttcagcctcctgtataagaagtaccgtattttctgcccatcatactttgtaataaaacttgaacatgtaaaaaaaaaaaaaaaaaaaaaaaaaaaaaaaaaaaaaaaaaaaaaagaaaaaaaaaaaaaaaaa

SEQ ID NO: 24532 - DNA, 3171 bp, Homo Sapiens
cagagtcccgttgctccgccgcgatattcagtaaaccactgggagtccggcagcatggaggcagcgcgccctcccccgacggcagggaagttcgtggtggtcggcggcggcatcgcgggcgtcacttgtgcggagcagttggctactcactttccatcggaagatattctcttggtaacagcttctcctgttattaaagcagttacaaatttcaagcagatttctaaaatattggaagaattcgatgttgaagaacaatcaagtaccatgttaggaaaacgctttcccaacattaaggttatagaatctggcgtaaagcaactgaagagtgaagaacactgcattgtaacagaagatggcaatcagcacgtatataagaaactctgtctgtgtgctggagctaaaccaaagttgatatgtgaaggaaatccttatgtattaggaatccgtgatacagacagtgctcaggaatttcagaaacagcttactaaagctaaaagaataatgatcatagggaacggtggtattgcacttgagttagtgtatgaaattgaaggctgtgaagtgatttgggccattaaagataaagctatagggaatactttcttcgatgcaggagcagctgaattcttgacttcaaagctcattgctgaaaaatcagaggctaaaattgcacataaaagaaccagatatacaactgaaggaaggaaaaaggaagctagaagcaaatctaaagcagataatgtaggaagtgcattgggaccagattggcatgaaggcttgaatcttaaaggaacaaaagagttttctcataagattcaccttgaaactatgtgtgaagtaaagaaaatctaccttcaggatgagtttagaattttgaagaaaaagtccttcacttttccaagagaccataagtcagttacagctgatacagagatgtggcctgtctatgtggaattgaccaatgaaaagatatatggctgcgatttcattgtcagtgctacaggagttacaccaaatgtagaaccttttctccatggtaacagttttgatctaggagaagatggtggcctgaaagtggatgatcatatgcacacatcccttcctgatatctatgctgccggtgacatctgtactacatcctggcagctgagcccagtctggcagcagatgaggctgtggacccaggctagacagatgggatggtatgcagcaaagtgcatggctgcagcgagttcaggagactctattgacatggatttcagctttgaactgtttgctcatgtgacaaaattttttaactataaggttgtactgctgggaaaatacaatgcacagggcttaggttcagatcatgaattaatgctgagatgtaccaaaggacgagaatacatcaaagtcgtcatgcaaaatggacgaatgatgggagctgtcttaattggtgaaaccgatttagaagaaacatttgaaaacctaatcttaaaccaaatgaatctttcatcatatggagaagatctgctagatccaaatattgatatagaagattattttgactaaaaatggaatttcttcaggaatcatataaagttccaaatgacaccagaaaaatcacaagtcaataaaatgaatgactgtattgagttaatgatgaccacactgaaaattacagaagtgataatgatattcgtggaaaaatataaaaacataaattctaagtttgaaatcagttcaaagtttatttatagatatatctttccaacacaacactgaccgcttagataaaaatcttaagttatttatttctgtgttttaaacataaatatgtttacttgtgatttagctttggagcaaatttaggtaagttatctacttagccaaatgtactctagtagactagaaccattctttgtgaaatgtcaaaatatggctatggtttcaggaactttaaaatcggttgtattttactttaaatagagatgtagcaatatctcgtttgctaatatttatattgatgacttactccttttttgttgaattgtacttctggttttataacctgaaatcatctacaagcttgtccaactctagcccacgggtctaatgcagcccagaacagctttgaatgcagcccaacacaaatctgtaaactttcttaaaacatgagatttttcttgcaattttttttttttttaagctcatcagctatcgtcagtgttagcatattttatgtgcggcccaagacaattcttcttccaatgtggctcagggaagccaaaagattggacatccctgatctacatatttaacttaaagtatcactcagtgaacctctgtcagtataatattgctttcaaaaagatggttatgtcaaaagaaaaaatatagctaagtatataaaggcataaaaaacttaagacaattacatgaacttattctcaaatattttacattttttgtaaactttcttaaaacatgagatttttcttgcaattttttttttaagctcatcagctatcatcagtgttagcatattttatgtgcggcccaagacaattcttcttccaatgtggctcagggaagccaaaagattggacatccttgatctacatatttaacttaaagtatcactcagtgagcctctgtcagtataatattgctttcaaaaagatagttatgtcaaaagaaaaaatatagctaagtatataaaggcataaaaaacttaagacgattgtatgaacttattctcaaatattttacatttaaagggttttacataaaaatttttcccttgttttatactggaaaattatataattcatgatctctaattttcaaacattctcaaaagtttagatcttcagagataagctctgaaaatatagatccatacatataaaatatctatgaaattcttttaaaaactattgtctaactacaaaaataatggcatatacatgcataaaccatctttaattagaaaatttagtaacagtcatatcaggcatcatcgatttttcttttcttagctcctgtattcttagaaccagattgctgaagcatgtttgcagccttcttctggaagttgcctgaatttttttcctccatctttttatcaccttgttcagaatgacaagtttgagacgattcagcctacaaaaaaaaaaaaaaaaa

SEQ ID NO: 24533 - DNA, 4912 bp, Homo Sapiens
gcggcggtgtctcaggcggcaatggaaggatccgagcctgtggccgcccatcagggggaagaggcgtcctgttcttcctgggggactggcagcacaaataaaaatttgcccattatgtcaacagcatctgtggaaatcgatgatgcattgtatagtcgacagaggtacgttcttggagacacagcaatgcagaagatggccaagtcccatgttttcttaagtgggatgggtggtcttggtttggaaattgcaaagaatcttgttcttgcagggattaaggcagttacaattcatgatacagaaaaatgccaagcatgggatctaggaaccaacttctttctcagtgaagatgatgttgttaataagagaaacagggctgaagctgtacttaaacatattgcagaactaaatccatacgttcatgtcacatcatcttctgttcctttcaatgagaccacagatctctcctttttagataaataccagtgtgtagtattgactgagatgaaacttccattgcagaagaagatcaatgacttttgccgttctcagtgccctccaattaagtttatcagtgcagatgtacatggaatttggtcaaggttattttgtgatttcggtgatgaatttgaagttttagatacaacaggagaagaaccaaaagaaattttcatttcaaacataacgcaagcaaatcctggcattgttacttgccttgaagatcatcctcacaaactggagacaggacaattcctaacatttcgagaaattaatggaatgacaggtttaaatggatctatacaacaaataacggtgatatcgccattttcttttagtattggtgacaccacagaactggaaccatatttacatggaggcatagctgtccaagttaagactcctaaaacagttttttttgaatcactggagaggcagttaaaacatccaaagtgccttattgtggattttagcaaccctgaggcacctttagagattcacacagctatgcttgccttggaccagtttcaggagaaatacagtcgcaagccaaatgttggatgccaacaagattcagaagaactgttgaaactagcaacatctataagtgaaaccttggaagagaagcctgatgtaaatgctgacattgtgcattggctctcttggactgcccaaggctttttatctccacttgctgcagcagtaggaggtgttgccagccaagaagtattgaaagctgtaacaggaaaattttctcctttgtgccagtggttatatcttgaagcagcagatattgttgaatcactaggcaaacctgaatgtgaagaatttctcccacgaggagatagatatgatgccttaagagcttgcattggagacactttgtgtcagaaactgcaaaatttaaacatcttcttagtagggtgtggagccataggctgtgaaatgttgaaaaattttgctttacttggtgttggcacaagcaaagagaaaggaatgattacagttacagatcctgacttgatagagaaatccaacttaaatagacagttcctatttcgtcctcatcacatacagaaacctaaaagctacactgctgctgatgctactctgaaaataaattctcaaataaagatagatgcacacctgaacaaagtatgtccaaccactgagaccatttacaatgatgagttctatactaaacaagatgtaattattacagcattagataatgtggaagccaggagatacgtagacagtcgttgcttagcaaatctaaggcctcttttagattctggaacaatgggcactaagggacacactgaagttattgtaccgcatttgactgagtcttacaatagtcatcgggatcccccagaagaggaaataccattttgtactctaaaatcctttccagctgctattgaacataccatacagtgggcaagagataagtttgaaagttccttttcccacaaaccttcattgtttaacaaattttggcaaacctattcatctgcagaagaagtcttacagaagatacagagtggacacagtttagaaggctgttttcaagttataaagttacttagcagaagacctagaaattggtcccagtgtgtagaattagcaagattaaagtttgaaaaatattttaaccataaggctcttcagcttcttcactgtttccctctggacatacgattaaaagatggcagtttattttggcagtcaccaaagaggccaccctctccaataaaatttgatttaaatgagcctttgcacctcagtttccttcagaatgctgcaaaactatatgctacagtatattgtattccatttgcagaagaggacttatcagcagatgccctcttgaatattctttcagaagtaaagattcaggaattcaagccttccaataaggttgttcaaacagatgaaactgcaaggaaaccagaccatgttcctattagcagtgaagatgggaggaatgcaattttccaactagaaaaggctattttatctaatgaagccaccaaaagtgaccttcagatggcagtgctttcatttgaaaaagatgatgatcataatggacacatagatttcatcacagctgcatcaaatcttcgtgccaaaatgtacagcattgaaccagctgaccgtttcaaaacaaagcgcatagctggtaaaattatacctgctatagcaacaaccactgctacagtttctggcttggttgccttggagaagatcaaagtaactggtggctatccatttgaagcttacaaaaattgttttcttaacttagccattccaattgtagtatttacagagacaactgaagtaaggaaaactaaaatcagaaatggaatatcatttacaatttgggatcgatggaccgtacatggaaaagaagatttcaccctcttggatttcataaatgcagtcaaagagaagtatggaattgagccaacaatggtggtacagggagtcaaaatgctttatgttcctgtaatgcctggtcatgcaaaaagattgaagttaacaatgcataaacttgtaaaacctactactgaaaagaaatatgtggatcttactgtgtcatttgctccagacattgatggagatgaagatttgccgggacctccagtaagatactacttcagtcatgacactgattaatacaagttgtcttaacgttactccaggaccacttgattttggaaagagtgcacttaattcagaagctaaagaaaatcagttcataatactatggatttctctttcattaagccttaattttaagggaaacatcagtaagaaactgcactgaagaattataaaacattttggggcatagcatacacttgtctaacggttcacacgtggctatgatcacaagcaactttgaactggaatgctatttacaaaagttttgtgtattaatctgtgtattaatctctctggataaaaagaaggaaaaaatatgtatgaccagaacagatatggatgaagagattgaaagcaacgaatgcaactattcaaaaagtttaatattatgaatttcttttttgtttagtcttgaagactgattttctatgcaaatagtgtttggcatcctgcacctctgatatgatttggctttgagaatttaataccactgggaagaagtatggtagtggtggatgaagggtggatattttaaattgtgcagttacagtttactgtcctattacctctgctcgtttaaccagtttgttatatcactgtgtccccaaaatcaggatttttgttgatagcatcagtgttgtaggagcaataggtcagatgagacatattaacttagactaaacgtgaacagtattatatggactctcacaacgctcttagagaatccgtgaatgtgaacagacaaatgtggctaaccatttgattcttcagtatgccttctaatgtggctattttatttatgtgagactctaaacctgattgtcctaatatataaaactaaaagattttgtaaagggagtgtctttagaaatagatgaaatgtagaatgttaaaaattattgctagggtagtctttttttttttccagaaacctaattagggtattaaattttgtgttttttttgttttttttttttaaacagaagcatgttatttcattcccattcccagaaagggagttaatgaagataaaaatttattttttaaggtctttattgagagaaactttgttttctgatatgaactattgcagatgtttttataaatactttcattaaaatgatgtaaacagtagtacccaacactgtaaactcagtgaaaatagtaaatgattcttttattactaagactgtcatgcattctgaagcagttggcttttttttaaccataggaagtaatttccctctagctcctttccttctactctcctgctcagaccattagtaggtactttgttaaataaaaaactagattaacatcaatattactccaatttggtatcttttacactatgtattatacctactttctttttatttcatttacaaatagtttaaattactttatcaaccagctgtattgtttccctcttgtaaaagtaccatcaagtggggaaaatgtatgtggaagtggagagtgaatttgtatgactaaaggataatctgtacatggggaagtgggcaaaagtggataggatgaatttaaagaaaatgactacctttggaaaaaagaaattaaattttgttcacatatcctaccctttcccattgtgcatatcccaagtgtcatatttaaaactaaggttacttaaaacagaatccaggaatatcaaggctctgtggcttggaattttagaggataggactaataaaaggacttttgtaaagaaaaaaaaaaaaaaaaa

SEQ ID NO: 24534 - DNA, 4508 bp, Homo Sapiens
gagtagcccgggcggcgagggctgggggttcctcgagactctcagaggggcgcctcccatcggcgcccaccaccccaacctgttcctcgcgcgccactgcgctgcgccccaggacccgctgcccaacatggattttctcctggcgctggtgctggtatcctcgctctacctgcaggcggccgccgagttcgacgggaggtggcccaggcaaatagtgtcatcgattggcctatgtcgttatggtgggaggattgactgctgctggggctgggctcgccagtcttggggacagtgtcagcctgtgtgccaaccacgatgcaaacatggtgaatgtatcgggccaaacaagtgcaagtgtcatcctggttatgctggaaaaacctgtaatcaagatctaaatgagtgtggcctgaagccccggccctgtaagcacaggtgcatgaacacttacggcagctacaagtgctactgtctcaacggatatatgctcatgccggatggttcctgctcaagtgccctgacctgctccatggcaaactgtcagtatggctgtgatattgttaaaggacaaatacggtgccagtgcccatcccctggcctgcagctggctcctgatgggaggacctgtgtagatgttgatgaatgtgctacaggaagagcctcctgccctagatttaggcaatgtgtcaacacttttgggagctacatctgcaagtgtcataaaggcttcgatctcatgtatattggaggcaaatatcaatgtcatgacatagacgaatgctcacttggtcagtatcagtgcagcagctttgctcgatgttataacgtacgtgggtcctacaagtgcaaatgtaaagaaggataccagggtgatggactgacttgtgtgtatatcccaaaagttatgattgaaccttcaggtccaattcatgtaccaaagggaaatggtaccattttaaagggtgacacaggaaataataattggattcctgatgttggaagtacttggtggcctccgaagacaccatatattcctcctatcattaccaacaggcctacttctaagccaacaacaagacctacaccaaagccaacaccaattcctactccaccaccaccaccacccctgccaacagagctcagaacacctctaccacctacaaccccagaaaggccaaccaccggactgacaactatagcaccagctgccagtacacctccaggagggattacagttgacaacagggtacagacaaaccctcaaaaacccagaggagatgtgttcattccacggcaaccttcaaatgacttgtttgaaatatttgaaatagaaagaggagtcagtgcagacgatgaagcaaaggatgatccaggtgttctggtacacagttgtaattttgaccatggactttgtggatggatcagggagaaagacaatgacttgcactgggaaccaatcagggacccagcaggtggacaatatctgacagtgtcggcagccaaagccccagggggaaaagctgcacgcttggtgctacctctcggccgcctcatgcattcaggggacctgtgcctgtcattcaggcacaaggtgacggggctgcactctggcacactccaggtgtttgtgagaaaacacggtgcccacggagcagccctgtggggaagaaatggtggccatggctggaggcaaacacagatcaccttgcgaggggctgacatcaagagcgtcgtcttcaaaggtgaaaaaaggcgtggtcacactggggagattggattagatgatgtgagcttgaaaaaaggccactgctctgaagaacgctaacaactccagaactaacaatgaactcctatgttgctctatcctctttttccagttctcatcttctctcctcttctcccttttatcaggcctaggagaagagtgggtcagtgggtcagaaggaagtctatttggtgacccaggtttttctggcctgcttttgtgcaatcccaatgaacagtgataccctccttgaaatacaggggcatcgcagacacatcaaagccatctgtgggtgttgccttccatcctgtgtctctttcaggaaggcattcagcatgcgtgagccataccatcctccatcctgattacaaggtgctccttgtagcaaattatgagagtgagttacgggagcagtttttaaaagaaatctttgcagatggctatgatgttatgtgttcggtgttgtaccatgagtagtattgacttcccttgagatatgatgttcaatgtgcttgtgaaattgacttaccctcttcacttaagttagttctggcctgacctgaactttgacttttactgccattcactttataaaataagggtgtgtaacatatcaagatacatttatttttatctgtttttttttcctgttaaagacaattatgtagagtgggcacgtaatccctccttagtagtattgtgttttgtgtaaatgtgctattgatattaagtatttacatgttccaaatatttacagactctagttgcaaggtaaagggcagcttgtgatctcaaaaaaatacatggtgaaatgtcatccagttccatgaccttatattggcagcagtaggaaattggcagaagtgttgggttgtggtaacggagtgatgaatttttttttaatggccttgagtttgatctctgcaaaggataggaaacctttaggaagacaagaaactgcagttaatttagaactgtcactgtttcaagttacactttaaaaccacagcttttaccatcataacatggctctggtaatatgtaggaagctttataaaagttttggttgattcagaaaaaggatcctgttgcagagtgagaggaagcatagggggaaactccattggaacagattttcacacaacgttttaaattgatataagtttaggcagttgtagttcataacttatgttgctcatgttgtgctgtgtcaggatgggataggaagcaagtcccatgcttagaggcatgggatgtgttggaacgggatttacacacactggaggagcagggcaagttggaattctaagatccatgaaccccccaactgtatttcctccctgcatattttaccaatatattaaaaaacaatgtaacttttaaaaggcatcattcctgaggtttgtcttaatttctgattaagtaatcagaatattttctgctatttttgccaggaatcacaaagatgattaaagggttggaaaaaaagatctatgatggaaaattaaaggaactgggattattgagcctggagaagagaagactgaggggcaaaccattgatggttttcaagtatatgaagggttggcacagagagggtggcgaccagctgttctccatatgcactaagaatagaacaagaggaaactggcttagactagagtataagggagcatttcttggcaggggccattgttagaatacttcataaaaaaagaagtgtgaaaatctcagtatctctctctctttctaaaaaattagataaaaatttgtctatttaagatggttaaagatgttcttacccaaggaaaagtaacaaattatagaatttcccaaaagatgttttgatcctactagtagtatgcagtgaaaatctttagaactaaataatttggacaaggcttaatttaggcatttccctcttgacctcctaatggagagggattgaaaggggaagagcccaccaaatgctgagctcactgaaatatctctcccttatggcaatcctagcagtattaaagaaaaaaggaaactatttattccaaatgagtgtatgatggacagatattttagtatctcagtaatgtcctagtgtggcggtggttttcaatgtttcttcatggtaaaggtataagcctttcatttgttcaatggatgatgtttcagatttttttttttttaagagatccttcaaggaacacagttcagagagattttcatcgggtgcattctctctgcttcgtgtgtgacaagttatcttggctgctgagaaagagtgccctgccccacaccggcagacctttccttcacctcatcagtatgattcagtttctcttatcaattggactctcccaggttccacagaacagtaatattttttgaacaataggtacaatagaaggtcttctgtcatttaacctggtaaaggcagggctggagagggaaaataaatcattaagcctttgagtaacggcagaatatatggctgtagatccatttttaatggttcatttcctttatggtcatataactgcacagctgaagatgaaaggggaaaataaatgaaaattttacttttcgatgccaatgatacattgcactaaactgatggaagaagttatccaaagtactgtataacatcttgtttattatttaatgttttctaaaataaaaaatgttagtggttttccaaatggcctaataaaaaccattattcaaaaaaaaaaaaaaaaaaaaaaaaaaa

SEQ ID NO: 24535 - DNA, 3361 bp, Homo Sapiens
gagcgcggagccggccgcggccccctgttgtgttgctgcggagaggcgcagtcatgcaggaaaacctcagatttgcttcatcaggagatgatattaaaatatgggatgcttcatctatgacattggtggataaattcaacccacacacatcaccacatggaatcagctcaatatgttggagcagcaataataactttttagtaacagcatcttccagtggcgacaaaatagttgtctcaagttgcaaatgtaaacctgttccacttttagagcttgctgaagggcaaaagcagacatgtgtcaatttaaattctacatctatgtatttggtaagcggaggcccaaataacactgttaatatttgggatttaaaatcaaaaagagttcatcgatctcttaaggatcataaagatcaagtaacttgtgtaacatacaattggaatgattgctacattgcttctggatctcttagtggtgaaattattttacacagtgtaaccactaatttatctagtactccttttggccatggtagtaaccagtctgttcggcacttgaagtactccttgtttaagaaatcactactgggcagtgtttcggataatggaatagtaactctctgggatgtaaatagtcagagtccataccataactttgacagtgtacacaaagctccagcgtcaggcatctgtttttctcctgtcaatgaattgctctttgtaaccataggcttggataaaagaatcatcctctatgacacttcaagtaagaagctagtgaaaactttagtggctgacactcctctaactgcggtagatttcatgcctgatggagccactttggctattggatcttcccgggggaaaatatatcaatatgatttaagaatgttgaaatcaccagttaagaccatcagtgctcacaagacatctgtgcagtgtatagcatttcagtactccactgttcttactaagtcaagtttaaataaaggctgttcaaataagcccacaacagtgaacaaacgaagtgttaatgtgaatgctgctagtggaggagttcagaattccggaattgtcagagaagcacctgccacgtccattgccacagttctaccacaacctatgacatcagctatggggaaaggaacagttgctgttcaagaaaaagcaggtttgcctcgaagcataagcacagacactttatctaaggaaacagacagtggaaaaaatcaggatttctccagctttgatgatactgggaaaagtagtttaggtgacatgttctcacctatcagagatgatgctgtagttaacaagggaagtgatgagtccataggcaaaggagatggctttgactttctaccgcagttgaactcagtgtttcctccaagaaaaaatccagtaacttcaagtacttcagtattgcattctagtcctcttaatgtttttatgggatctccagggaaagaggaaaatgaaaaccgtgatctaacagctgagtctaagaaaatatatatgggaaaacaggaatctaaagactccttcaaacagttagcaaagttggtcacatctggtgctgaaagtggaaatctaaatacctctccatcatctaaccaaacaagaaattctgagaaatttgaaaagccagagaatgaaattgaagcccagttgatatgtgaacccccaatcaatggatcctcaactccaaatccaaagatagcatcttctgtcactgctggagttgccagttcactctcagaaaaaatagccgacagcattggaaataaccggcaaaatgcaccattgacttccattcaaattcgttttattcagaacatgatacaggaaacgttggatgactttagagaagcatgccatagggacattgtgaatttgcaagtggagatgattaaacagtttcatatgcaactgaatgaaatgcattctttgctggaaagatactcagtgaatgaaggtttagtggctgaaattgaaagactacgagaagaaaacaaaagattacgggcccacttttgaaatttcagtgaataccttaatgttctgtaatttgggaagtttctggcaacacagaactacatagaatcagtattgttttcatggcctccagggaaaaaatgtttttcaagtaagagtaaaagggtgatgggattttataccaacaactgtttcatcttaaaaatatgtatatttttatattaaaaattgtacagtatgtcatctacccaataggaaagtcaacaggatctttattttttgaaagctttagccatccactaagtgccctttttcataagagaagaaaattgtgcataaaaattggttatgtttgttttttagtcatcttttttaacatatatttttgattgacaaattgcctttcaaatttttggggctagttgagatttaaagagtttgatatgccttctatttttatggagaaagtaattttaaaatggcaattggtgtttctaagccattgactaataaaacatagggttggctagtaattattttgttaacttgatgaagtcaagtatgactattatttattgtacatttgataagacaatttttggaattttgaattgcacaaattacatgatatcttttgcatttatgttactatattgtacttctgacaaatctttattcctgggtggtatttttaagatatctttacctataaaaaatgtttaaggttcataggactcgacaagagctatctggtgattttctcattagtaacatgcaacgttgtactgcaaaatttcaatcaacatgacaacttataatgagtggagatttcatattaggtactaaatattatagtattatttctattttctttttccaaataagaagcttggattattttattttgtggtctttatcattaactttaattctttctgtactgtgtataatatttttatattattggccttaccataaaattatttagaaaggttgtcaaaataagttatacctctttggcaatagatagatgtatacatctacctactatgatctacaattttaggttaagtgaagcttgggggggctactgacttggttaccttcttgtctcttgtcccaaagatttaaactgtgtacctttgtatagctcttctgccccattttgacttctgagatgaaagtatttactaaaattaaaaaaaaaaaaacaaaaaacaaacctttagctcactaactttatgggtttctgaagtgatggaaatttttaaggatatatttaataagcataaacttactaataattacttccaaaaataaaaacaggaatattacttttaaaaaaaaaaaaaaaaaaaaaaaaaaaa

SEQ ID NO: 24536 - DNA, 4840 bp, Homo Sapiens
ggcaggcggtggcgagtggatatctccggagcatttagataatgtgacagttggaatgcagtgatgtcgactctttgcccaccgccatctccagctgttgccaagacagagattgctttaagtggcaaatcacctttattagcagctacttttgcttactgggacaatattcttggtcctagagtaaggcacatttgggctccaaagacagaacaggtacttctcagtgatggagaaataacttttcttgccaaccacactctaaatggagaaatccttcgaaatgcagagagtggtgctatagatgtaaagttttttgtcttgtctgaaaagggagtgattattgtttcattaatctttgatggaaactggaatggggatcgcagcacatatggactatcaattatacttccacagacagaacttagtttctacctcccacttcatagagtgtgtgttgatagattaacacatataatccggaaaggaagaatatggatgcataaggaaagacaagaaaatgtccagaagattatcttagaaggcacagagagaatggaagatcagggtcagagtattattccaatgcttactggagaagtgattcctgtaatggaactgctttcatctatgaaatcacacagtgttcctgaagaaatagatatagctgatacagtactcaatgatgatgatattggtgacagctgtcatgaaggctttcttctcaatgccatcagctcacacttgcaaacctgtggctgttccgttgtagtaggtagcagtgcagagaaagtaaataaggtagtttattttataatctagcagatgatttgactctttaagactgatgatatatcatggattgtcatttgaatggtaggttgcaattaaaatgatctagtagtataaggaggcaatgtaatctcatcaaattgctaagacaccttgtggcaacagtgagtttgaaataaactgagtaagaatcatttatcagtttattttgatagctcggaaataccagtgtcagttgtgtataaatggttttgagaatatattaaaatcagatatataaaaaaaattactcttctatttcccaatgatatctttaacaaatctgaagatagtcatgtacttttggtagtagttccaaagaaatgttatttgtttattcatcttgatttcattgtcttcgctttccttctaaatctgtcccttctagggagctattgggattaagtggtcattgattattatactttattcagtaatgtttctgaccctttccttcagtgttacttgagttaattaaggattaatgaacagttacatttccaagcattagctaataaaccaaaggattttgcacttttcttcactgaccattagttagaaagagttcagagataagtatgtgtatctttcaatttcagcaaacctaattttttaaaaaaagttttacataggaaatatgttggaaatgatactttacaaagatattcataatttttttttgtaatcagctactttgtatatttacatgagccttaatttatatttctcatataaccatttatgagagcttagtatacctgtgtcattatattgcatctacgaactagtgaccttattccttctgttacctcaaacaggtggctttccatctgtgatctccaaagccttaggttgcacagagtgactgccgagctgctttatgaagggagaaaggctccatagttggagtgttttttttttttttttaaacatttttcccatcctccatcctcttgagggagaatagcttaccttttatcttgttttaatttgagaaagaagttgccaccactctaggttgaaaaccactcctttaacataataactgtggatatggtttgaatttcaagatagttacatgcctttttatttttcctaatagagctgtaggtcaaatattattagaatcagatttctaaatcccacccaatgacctgcttattttaaatcaaattcaataattaattctcttctttttggaggatctggacattctttgatatttcttacaacgaatttcatgtgtagacccactaaacggaagctataaaagttgcatggtcaaataagtctgagaaagtctgcagatgatataattcacctgaagagtcacagtatgtagccaaatgttaaaggttttgagatgccatacagtaaatttaccaagcattttctaaatttatttgaccacagaatccctattttgagcaacaactgttacatcccatggattccaggtgactaaagaatacttatttcttaggatatgttttattgataataacaattaaaatttcagatatctttcataagcaaatcagtggtctttttacttcatgttttaatgctaaaatattttcttttatagatagtcagaacattatgcctttttctgactccagcagagagaaaatgctccaggttatgtgaagcagaatcatcatttaaatatgagtcagggctctttgtacaaggcctgctaaaggattcaactggaagctttgtgctgcctttccggcaagtcatgtatgctccatatcccaccacacacatagatgtggatgtcaatactgtgaagcagatgccaccctgtcatgaacatatttataatcagcgtagatacatgagatccgagctgacagccttctggagagccacttcagaagaagacatggctcaggatacgatcatctacactgacgaaagctttactcctgatttgaatatttttcaagatgtcttacacagagacactctagtgaaagccttcctggatcaggtctttcagctgaaacctggcttatctctcagaagtactttccttgcacagtttctacttgtccttcacagaaaagccttgacactaataaaatatatagaagacgatacgcagaagggaaaaaagccctttaaatctcttcggaacctgaagatagaccttgatttaacagcagagggcgatcttaacataataatggctctggctgagaaaattaaaccaggcctacactcttttatctttggaagacctttctacactagtgtgcaagaacgagatgttctaatgactttttaaatgtgtaacttaataagcctattccatcacaatcatgatcgctggtaaagtagctcagtggtgtggggaaacgttcccctggatcatactccagaattctgctctcagcaattgcagttaagtaagttacactacagttctcacaagagcctgtgaggggatgtcaggtgcatcattacattgggtgtctcttttcctagatttatgcttttgggatacagacctatgtttacaatataataaatattattgctatcttttaaagatataataataggatgtaaacttgaccacaactactgtttttttgaaatacatgattcatggtttacatgtgtcaaggtgaaatctgagttggcttttacagatagttgactttctatcttttggcattctttggtgtgtagaattactgtaatacttctgcaatcaactgaaaactagagcctttaaatgatttcaattccacagaaagaaagtgagcctgaacataggatgagctttagaaagaaaattgatcaagcagatgtttaattggaattgattattagatcctactttgtggatttagtccctgggattcagtctgtagaaatgtctaatagttctctatagtccttgttcctggtgaaccacagttagggtgttttgtttattttattgttcttgctattgttgatattctatgtagttgagctctgtaaaaggaaattgtattttatgttttagtaattgttgccaactttttaaattaattttcattatttttgagccaaattgaaatgtgcacctcctgtgccttttttctccttagaaaatctaattacttggaacaagttcagatttcactggtcagtcattttcatcttgttttcttcttgctaagtcttaccatgtacctgctttggcaatcattgcaactctgagattataaaatgccttagagaatatactaactaataagatctttttttcagaaacagaaaatagttccttgagtgcttccttcttgcatttctgcctatgtttttgaagttgttgctgtttgcctgcaataggctataaggaatagcaggagaaattttactgaagtgctgttttcctaggtgctactttggcagagctaagttatcttttgttttcttaatgcgtttggaccattttgctggctataaaataactgattaatataattctaacacaatgttgacattgtagttacacaaacacaaataaatattttatttaaaattctggaagtaatacaaaagggaaaatatatttataagaaagggataaaggtaatagagcccttctgccccccacccaccaaatttacacaacaaaatgacatgttcgaatgtgaaaggtcataatagctttcccatcatgaatcagaaagatgcggacagcttgatgttttagacaaccactgaactagatgactgttgtactgtagctcagtcatttaaaaaatatataaatactaccttgtagtgtcccatactgtgttttttacatggtagattcttatttaagtgctaactggttattttctttggctggtttattgtactgttatacagaatgtaagttgtacagtgaaataagttattaaagcatgtgtaaacattgttatatatcttttctcctaaatggagaattttgaataaaatatattacaaaaaaaaaaaaaaaaaaaaaaaaaaaaaa

SEQ ID NO: 24537 - DNA, 1900 bp, Homo Sapiens
ggctttgcttgtcttttggccccggcgactcaccatcgtcagtgcgcaaccgttcgctaactgaaatgatggcgactggaacgccagagtctcaagcgcggttcggtcagtccgtgaaggggcttctcacggagaaggtgaccacctgtggtactgacgtaatcgcgctcaccaagcaggtgctgaaaggctcccggagctccgagctgctaggtcaggcagctcgaaacatggtactccaggaagatgccatcttgcactcagaagatagtttaaggaagatggcaataataacaacacatcttcaataccagcaagaagctattcagaagaatgttgaacagtcatcggatctacaggaccagttgaatcatctgttgaaatagaatgacatgtaagagtgctgtaggactcctttgcctaatgctgaggagtaaataccttacacagctgtcctctgggtttggttttctattttcttctccaaaagttaagttagaaaagttctgtgttagggccgggcgcggtagctcacgcctgtaatcccagcactttgggaggccgaggcgggtggatcacgaggtcaggagttcgagaccagcctggccaagatggtgaaaccccgtctctactaaaaatacaaagaattagctgggcgtggtggcgggcgcctgtaatcccagctactcgggaagctgaggcaagagaatcgcttgaacccaggaggtggaggttgcagtgagccaagatcgcgccactgcactccagcctgggcgacagagtgagattccatctccaaaaaaaaaaaaaagaaaaaaaaaagaaaagttctgtgttgatgtacagtttctcctaagaagaagcgaggtggttgaattttggaagcacttcttgaatcggattaacccatgctcttattgaattttttcatctgctctgtttagtttgatattaaagcaaaattaagaggtcttagtttttcctatagaacttttaatatgtcaaaagctatattgtctaaatttcagtacttaagcaaatactgagtagtgttttaaattcagaaatagagcttctattatgaacacatgagaatgatttttttctcttaatcattattaaggaaatattttaatttcatggtcatataatggtgataagtaatacctgattgtttccttttctgttctagtaactcagaggagatacgtgttttatttgtgatagcaaattcctaaatgaacattaggcaagtggtatcattatcaggccagctgcagcctcttgccttgacctgcattcctagaatttctttgttgctgtaattcttgattaagtgaccttgactttcattttgtaattttgctaatcatcagcaaattcacttgcatgacgttactgccaaatatgaaggcagttgaattattatgagtgattgtggcagaggtttgtgccatggtgaaaactttgatgtttgtctgtgttcattggatccatctttttaaatgacattaccatgagtctgttgtcaaacctaaatatctttgtttgaatttaaaatgggactctatattgttgtagttcaggtcttcattgactaagagattgagagaaatctgacataagaaaatattgttttcactgcaggaataaagaggaagtaacagtgaatccaatatagttcatattgttattgtccaatcatcaagttaactaagcattatcagattacgtttatttctcatacatatggatattaacttaaggtaaaaaagctggatgtgaaggatctgaaaaggcattaatttatgtactaattctataaacatgtattaataattgcagtattattaaatacagatggactcaaaaaaaaaaaagaaaaaaaaaaaaaaaaaaa

SEQ ID NO: 24538 - DNA, 5544 bp, Homo Sapiens
ggcccgcggcaaacatggcggtggactcggcgatggagctgttatttttagatacttttaaacacccgagcgctgagcaaagttctcatatagatgtggttcgttttccatgtgtggtttatatcaatgaagtccgagtcatacccccaggagtaagagcccatagcagtctgccagacaatagagcatatggagagacatctccccatacatttcaattagacttattcttcaacaatgtaagcaaaccaagtgcccctgttttcgataggttgggaagcctggaatatgatgagaatactcccatcatctttagacctaactcaaaggtgaatactgatggtctggtgctaagaggctggtataactgtctgacactggcaatatatggatcagtggatagagtgataagtcatgacagagactctccaccaccaccacctccaccgccaccacctccccagccacaaccaagtttgaaaaggaatccaaaacatgctgatggggagaaagaagatcagtttaatggaagccctccaagaccacagccaaggggaccaagaactctccaggaccccctccacctgatgatgatgaagatgatcctgtgcctctgccagtgtctggtgacaaggaagaggatgctcctcatagagaagattactttgagcccatttctcctgatcggaattctgttccccaggaagggcaatattctgatgaaggagaagtagaagaggaacaacaagaagaaggagaagaagatgaagatgatgtggatgtagaggaagaagaggatgaggatgaggatgatcgacgaacagtagacagtattcctgaggaggaagaggaagatgaagaggaagaaggtgaagaggatgaagaaggtgaaggggatgatggttatgaacaaatttccagtgatgaagatggaattgctgacttggaacgtgaaacatttaagtatccaaactttgatgttgaatacactgctgaagacttagcttcagttcctcctatgacatatgatccatatgacagggagcttgtaccactcttatacttcagttgtccatacaagactacttttgaaattgaaatcagtagaatgaaggatcaaggtccagataaagaaaattcaggggcaatcgaagcctcagtgaagttaacagaactcttagatttgtatagagaagatagaggtgcaaaatgggtaacagctttagaagaaattccaagtttaataataaaagggttaagctatttgcaattgaaaaacacaaaacaagactcccttggccagttggtagactggaccatgcaagctttaaatttacaagtagcgcttcgccaacctatcgccttaaatgttcgacagctcaaagctgggaccaaattagtgtcctcactagcagaatgtggggctcaaggagttacaggactgctacaagcaggagtgatcagtggattatttgaacttctgtttgctgatcacgtatcatcttctcttaagttaaatgcttttaaagctttggacagtgtcattagtatgacagaaggaatggaagcttttttaagaggtgggcagaatgaaaaaagtggttatcaaaagcttctggaactcatacttttagatcagactgtgagggttgttactgctggttcagctattctccaaaaatgccatttctatgaagtcttgtcagagattaaaagacttggtgaccatttaccagagaagacttcatctcttcctaaccacagtgaacctgatcacgacacagatgctggacttgagagaacaaacccagaatatgaaaatgaggtggaagcttctatggatatggatcttttggaatcctcaaatataagtgaaggggaaatagaaaggcttattaacctcctagaagaagtttttcatttaatggaaactgcccctcatacaatgatccaacaacctgttaagtctttcccaacgatggcacgaattactggacctccaagagggatgatccataccctgttctctttagatatcttcacagtcatcacttcttggagttggttaccttgcttctgtcaattccagtaacaagtgctcaccctggtgtgctgcaagccacaaaagatgttttgaagtttcttgcacagtcacagaagggtcttcttttttttatgtcggaatatgaagcaacaaatttattgatccgagctctgtgtcacttttatgatcaagatgaggaggaaggtctccaatctgatggtgttattgatgatgcatttgccttgtggctacaggactcaacacagacattgcaatgtattacagaactgttcagccattttcagcgttgtacagccagtgaagaaacagaccattcagatctcttgggaaccctgcacaatctttatttgattacttttaatcctgtgggaagatcagctgttggccatgtttttagtctggagaaaaatctccaaagtcttattactctaatggagtactattccaaagaagccttgggtgattccaaatctaagaagtcagtagcttataattacgcatgcatacttattttggtggtggttcagtcttccagtgatgttcaaatgctagaacaacatgcagcatctctcttgaagctttgtaaagcagatgaaaataatgctaaattgcaagaacttggcaagtggcttgaacctctgaaaaaccttagatttgaaattaactgcatcccaaacttaattgagtatgttaagcagaatatcgataacttgatgaccccagaaggagttggccttaccactgccttacgtgttctctgtaatgttgcatgcccaccacctcctgttgaaggtcaacagaaagatctgaaatggaatcttgccgttattcagcttttttctgctgaaggaatggacacgtttattcgagttctgcaaaaattgaacagtattctgactcagccttggaggctccatgtcaacatggggactacccttcacagagttactactatttcaatggctcgctgcacactcactcttcttaaaactatgttaacggaactcctgagaggtggatcctttgagtttaaggacatgcgtgttccttcagcgcttgttactttacatatgctcctgtgctctatccccctctcaggtcgtttggatagtgatgaacagaaaattcagaatgatatcattgatattttactgacttttacacaaggagttaatgaaaaactcacaatctcagaagagactctggccaataatacttggtctttaatgttaaaagaagttctttcttcaatcttgaaggttcctgaaggatttttttctggactcatactcctttcagagctgctgcctcttccattgcccatgcaaacaactcaggttattgagccacatgatatatcagtggcactcaacacccgaaaattgtggagcatgcaccttcatgttcaagcaaagttgctccaagaaatagttcgctctttctctggcacaacctgccagcccattcaacatatgttacggcgtatttgtgttcaattgtgtgaccttgcctcaccaactgcacttctgattatgagaactgtgttggatttgattgtagaagacttgcaaagcacttcagaagataaagaaaaacagtatactagccaaaccaccaggttgcttgctcttcttgatgctctggcttcacacaaagcttgtaaattagctattttgcatctaattaatggaactattaaaggtgatgaaagatatgcagagatattccaggatcttttagctttggtgcggtctcctggagacagtgttattcgccaacagtgtgttgaatatgtcacatccattttgcagtctctctgtgatcaggacattgcacttatcttaccaagctcttctgaaggttctatttctgaactggagcagctctccaattctctaccaaataaagaattgatgacctcaatctgtgactgtctgttggctacgctagctaactctgagagcagttacaactgtttactgacatgtgtcagaacaatgatgtttcttgcagagcatgattatggattatttcatttaaaaagttctttaaggaaaaacagtagtgctctgcatagtttactgaaacgagtggtcagcacatttagtaaggacacaggagagcttgcatcttcatttttagaatttatgagacaaattcttaactctgacacaattggatgctgtggagatgataatggtctcatggaagtagagggagctcatacatcacggacgatgagtattaatgctgcagagttaaaacagcttctacaaagcaaagaagaaagtccagaaaatttgttccttgaactagagaagcttgttttggaacattcaaaagatgatgacaatctggattctttgttggacagtgtagttggacttaagcagatgctggagtcatcaggtgaccctttacctctcagtgaccaggatgtagaaccagtactttcagctccagaatctcttcagaatctgtttaacaataggactgcctatgtgcttgctgatgtcatggatgatcagttgaaatctatgtggttcactccatttcaggctgaagagatagatacagatctggatttggtaaaggttgacttaattgaactctctgaaaaatgctgtagtgacattgatttgcactcagaattagagcgctcatttttgtcagaaccatcatctccaggaagaaccaagactactaaaggattcaaacttgggaagcacaagcatgagacctttataacgtcaagtggaaaatctgaatacattgaacctgccaaaagagctcatgttgtgccaccaccaagaggaaggggcaggggaggatttggacagggtatacgacctcatgatatttttcgtcagagaaaacagaacacaagtagaccaccatctatgcatgtggatgactttgttgctgctgaaagtaaagaagtggttcctcaagatggaatacctccaccaaaacggccactcaaagtatcacagaagatttcttcccgtggtgggttttcaggcaatagaggaggacggggtgctttccacagtcagaataggtttttcacaccacctgcttcaaaaggaaactacagtcgtcgggaaggaacaagaggctccagttggagtgctcagaatactcctcgaggaaattacaatgaaagtcgtggaggccagagcaattttaacagaggccctcttccaccattacgaccccttagttctacaggttaccgcccaagtcctcgggaccgtgcttctagaggtcgtgggggacttggaccttcctgggctagtgcaaatagcggcagtggaggctcaagaggaaagtttgttagtggaggcagtggtagaggtcgtcatgtacgctcctttacacgataaaaatccttttgggaacatcttaactgtatatgaacatttcacgaggacaataaaaataagacattgaaggacctaaaaaaaaaaaaaaaaaaa

SEQ ID NO: 24539 - DNA, 3854 bp, Homo Sapiens
gatcccacatggcggcgctcctgaggagactgctgcagcgcgagaggccttcggcggcctctggccgccccgtaggacggcgcgaggccaacctgggcactgatgccggggttgcggtgcgagtgcggttcgctcccagccccacaggcttcttgcacctgggtggcctccgcactgccttgtacaactacatctttgctaagaagtaccaggggagcttcatcctgaggctagaggacacagatcagactcgcgttgtgcctggggcagcagagaatattgaggacatgctggagtgggcaggcatcccgcctgatgagagcccccgccggggcggtcctgctgggccctaccagcaatctcagcggttggagctgtatgcccaggccacagaagcgctgctgaagaccggagctgcttacccctgtttctgctcaccccagcggctggagctcctgaagaaggaggccttgcggaaccaccagacgccccggtatgacaatcggtgcaggaacatgagccaggagcaggtggcccagaagctggccaaggaccccaagcctgcgatccgcttccgcctggagcaggtggtgccagccttccaggacctggtgtatggctggaataggcatgaagtggccagcgtggagggagacccagtcatcatgaagagcgacggcttccccacataccacctggcctgcgtggtggacgaccaccacatgggcatcagccacgtgctgcgaggctctgagtggctcgtctccactgccaagcacctgctcctctaccaggccctgggctggcagccaccccacttcgcccacctgcccctgctcctcaacagggatggcagcaagctctccaagaggcaaggggacgttttcctggagcactttgctgctgatggcttcctgcccgattccttgttggacatcatcaccaactgtggctcaggttttgcagagaaccaaatgggcaggaccctgccggagctgatcacacagttcaacctgacacaggtcacctgtcactcagccctgctggacctggagaagctcccagaattcaacagactgcacctccagcggctggtgagcaatgagagccagaggcgccagctggtggggaagctgcaggtccttgtggaggaggcctttggttgccagctgcaaaacagggatgtcctcaacccagtctacgtggagaggatcctcctgctgagacagggtcacatttgccgcctgcaggacttggtgtccccagtatactcttacctgtggactcgccctgcagtaggtcgagcacagctggacgccatctcggagaaggtggatgtgattgccaagcgtgtgctggggcttctagaaagatctggtatgagcttaactcaggatatgctgaatggagaactgaagaagctatcagaaggtctggaaggcaccaagtacagtaatgtgatgaaactccttcggatggccctcagtggacagcagcaaggacctcctgtagctgagatgatgttggccttgggaccaaaggaagtacgggaacggatccagaaggtggtttccagctagggagaggatgtgtcgggcagtggagatcgccctaagaacctgtgagcttagaaacagctttcagagaccagaaggaggcctggggcccgtcgggaagtttgctgaaggaactaagagtggaaacaatctctgactgcacacaagtgcatttgtgatccaccacaggcacgtttttgtcaattggctggggaagcacaacccatctaacctcctggactctggaaaggcattctccgggtctggtttctcacacattacacagcagaggtttggagttagttcacagaaaagttaacatcccggaacagtgcagaaggcttgggtttcagtttgctagggcccccataacaaaatgccacagaaccaggtggtttaaacagatttattttctcacatttggaggctagaagttcaagatcaaggtgtcagcaggcctggtttttcctagaggcctcttttgttggcttgcagacagctgtcttctcactgtgtccttgtgcggtcttccctccatgcacacacatctctagtttcattatgtgcccaacgttcctcttctaagaacaccagttggactggattttaactttaaccagcctcatttaagttaatcacctctttaaatgctcaatctccaagtacagtctcattctgaggttccaggggtttctcaacgtaagaatttagggggacagaattcagcccgtagcagctgggcagcaggactcatgggtcccagttctcaggccccaaggactcagagcagcaaaggatacgtgacacaagcagggctgaactggacaccagactttctttggggttgtaaaaggagaagtgtgactccactgccaaggtcttccagacctggtccttggactggagaccttcacccttcctattttgtggctttctcttcaaatccacctcgtccttcctccatgacttataagtcatcatctctgctggtttctgaaatgagatatgcttcttggggtcttcagtgaagaggaatagcaagtgaaaggaggatggtggcagggtacatgaacccctaccaggcttctaggcttcccctgcatggcagccagcctctaagttggcccccaaccatccctgccttcttctattcacacccttgtgtggttccttcccacattgaataggcctgacttgtgtaaccactacactattgaagaaatgagagtttgacttctgagggtaagtcataaaatacatcgtggcttctgtcttgttttctttgatcgcttactttgggggaagccagcttccaggtcatgaaaatactcaagcagccttatggagtgctccacatgacaagggatggaggcctcccaccaatagccatgggagtgtgcaatcttgaaagctggtccttcaattccagccaagcattcacatgaccgcaatcctagctgatctcgcttgtgacctctatgggagaccctaagccagaaccactcagagaagctgctctggaacgtcagacacacatgaactgtgagatagtaaacgtttattgtttaaagctacttggtttggggataatttgcgtttcagcagtagacaatatatttattttgtccaggggagtggaaaggcgattacagagtttgttgagccccatagagtcctagtctttgcttaaagaaatataccagttctttctaatacagaatccattaagttcgttggttgcaaacaatagaaaccaactctgcctcacttatgtttattggaggccataagagagccacagcatctaccaaaaagccaaaaaaaaaacaggttttggaaaagacaggaactagctacaggagctaatggccaatcttgtctgagttctttgatggcgacacatgaactacagccgttttgttgttgttaatttctccgtgttttcccctcagttttggatgactctgctcaaggttcagattctgaggagcaagtatctgttgggctatctgaggtcctgctaccattccttggccagtaataggtagtttcacagggattatatgcaatggaggaaaagttgttctcaaggaaaactagggagctttctccagaagatgatgtaatggcagaaacaacaggtggttgaccacagaaggggacaataataatacttgtaatttattgtgcgcttatatgagcctcaccctctcccaggtgtcagataatgctcgtaaatgccttagtccatcatctcagtaaattttttttataacactaaaaaaaaaaaaaaaaaaa

SEQ ID NO: 24540 - DNA, 5523 bp, Homo Sapiens
gggaagcggtgttgtgtctgcagctctggcagaggactgttccactagacacgctgaagggactgggtacgtgttttccttcaggaccagagctgagaggagctgggatcgcggcggcaatggaacgggcctcagaaaggcgcacggccagcgcgctttttgcggggttccgggccttgggacttttcagcaacgacattccacacgtggtgcggttcagcgcgctcaagcgccggttctatgtaacaacctgcgtgggcaagagtttccacacctatgacgtaattctgttccacaggatatctgctgtatggcagctgatggcagattagtctttgctgcttatggaaatgttttctctgcatttgcccgtaataaagagatagtacatacctttaagggtcataaggcagaaatccatttcttgcaaccctttggagaccacattatctctgttgatactgatggcattcttattatttggcacatatattcagaagaagaatacctgcagttgacttttgataaatcagtatttaaaatttctgcaattttgcatccaagtacctacttgaataaaatacttctggacagtgaacaaggaagcctgcagttgtggaatgtaaaatccaataaacttctatatacatttccaggatggaaagttggagtgacagctcttcagcaggcaccagccgtggatgttgttgctattggtcttatgtcaggtcaagttatcattcacaacattaaatttaatgaaacattaatgaagtttcgtcaagactggggacccattacttcaatttcatttcgcacagatggtcatccagtaatggcagctggaagcccatgtggccatattggactctgggatctagaagacaaaaaattaatcaaccaaatgagaaatgcacactctacagcaattgccggactgacatttctccatagagagccacttcttgtcacaaatggcgctgacaatgctcttaggatatggatatttgatggtcctacaggtgaaggccgacttttgagattcagaatgggtcatagtgctcctcttaccgatatcagatattatggacagaatggacagcagattctaagtgtcaagatggaactcttcagtcattttccacggtacatgaaaaattcaataagagcttgggacatggattaataaataaaaagagagttaaacgtaaaggacttcagaataccatgtcagtgagacttccacccatcacaaagtttgcagcagaggaagctcgtgaaagtgactgggatggtatcattgcttgccatcaaggtaagctatcttgctcaacctggaattatcagaaatctacaataggcgcttactttctcaagccaaaagagttgaagaaagatgacataactgcaacagcagtggatataacttcttgtggaaactttgctgtaattggcctctcatcaggaactgtagatgtatataacatgcagtctggcatacatcgaggaagttttggcaaggatcaagctcacaagggatctgttagaggtgtcgcagtggatggattaaaccagttgacagttacaactggtagtgaaggattactcaaattctggaactttaaaaacaaaattttaatccattctgtgagcctcagttcatctccaaatatcatgttgctacatagggacagtggcattctgggactcgccttggatgacttctccattagtgttctggacatagaaactaggaagattgtcagagagttttctggacaccaaggccaaataaatgacatggcttttagtcctgatggtcgttggttaataagtgctgcgatggattgctctattaggacttgggaccttccttctgggtgccttatagactgctttttgttggactcggctcctctcaatgtttctatgtctcctactggagactttctggcaacttcccatgtggaccaccttggaatttatctatggtccaatatttccctgtattcagttgtttcattacggccacttcctgcagattatgtcccttcaatagtgatgcttcctggtacttgtcaaacccaagatgtagaagtatcagaagaaacagtagaaccaagtgatgaattgatagaatatgattcgccagaacagttgaatgagcaattggtgactctttcacttcttcctgaatcacgatggaaaaaccttcttaaccttgatgttattaagaaaaagaataaaccaaaggaaccacccaaagtacccaaatcagcaccatttttcattccaacaattcctggccttgtacccagatatgctgcacctgaacaaaataatgatccccagcagatgacactgctctcaaccttctgaaagaatcaggcccatcaggaattgaaacagagctgcgaagcttgtctcctgattgtggtgggtccatagaagttatgcagagcttcttgaaaatgattgggatgatgctggacagaaagcgtgattttgagttagcccaggcataccttgcattgtttctaaagttacaccttaaaatgcttccttcagagccagtactcctagaagaaataacaaatttgtcatcccaggtggaagaaaactggacccatttgcaatcactcttcaatcaaagcatgtgtattttaaattatctcaaaagtgctttgttgtaaaaataaatttgtgactaaacaaagactttcatattaaatgggttcaattgaactcatttcttattttccaagtgtcaatgtgaaaagaaaataaatgctagcactactgactagtcagtatatctccactttaaatgctaaatactttcttgaaataaaatcgcacctcccggccaggcatgatggataatgcctgtaattccagcactttcagaggccaaagcgggaggattgcttgaagccaggaatttgagcccagcctgggcaacatagcaagcaagatcccatctctacaaaaagttaaaaaaataaattacacctgccttttgttttgaagtcttaaagaatctgctcaaatgatttattttctgagtctcttcacattaacttttatatgatttttaaaaaattattacctgcttatattttttgagtatctgtttcatataaagagatgctgcatgttcactgtgaagtattgctgaattaaattgaaaatgtcagataaaactgatacatgatgtagttataaaaatgctgttatgaagaaaaaaggaatgcttttttcctcggtggcctttgataaaaatatgaatgattgactctcagagttggaggataaactaatcatcttctagcacagccctgttgtgttgcaggagaggaatcaggctaaagtctgctggtatttcagtgacagattaaaactttctaacagtggcctagtgctttctccattgtaatgtactgaaaggaagttgttcatggatcagaaatgtgggaggcccttccttgcccaaggcaagtcgctgtagatggttaaactgataccaaggataggtaagggaaattccaaattccattggaagatggccttttactgacactgcagacatgtagataacaatagtttaatgtcctctgaaaaggtaaaaattccataaatccttgcaaacaatttttagcaatattgtttattgctaccacagccaagaatgggtatttcaaagccagggttttttttattttgttttgttttttttttttttggctacacttttttgggggggaccttttaatttgggaagaaaatgctgagtatacttttctttcacaaccattgcaaacccaggtagccctggagttttctttttttctcatcatcattgttttgttttttttatggttcaagacttttgcaatacatgaattaaaaataagcagttctttaaagcatagcgctctaaaaactattcttagtttataccctcaaaagttgggtctttcatgaaacacagtggtttgaatatgaacaccagtagcattctcgttcgttgttagggtaagagagttttgtagaatgatctccaaaagaagcagtcctcaaaaggcatttaccagtgatatcttttaatattcatgtttttatttaatgatgtaagatagaattaataaactactaaggaaataagccaatgtggttattgtactcaatttcgtttttcttttagaaatgtgtattgacttattaaagccactgacagaaatgttaatcatgacttaagttctaatttaaaaaactattttcctctttcctaaatactatattctaaattggaatatggcaaaatcccaatatataattctatacctagtaaagattgtaaataactaaaacaaaatgatgagagctgtgaactgaaattgtattgcttacagaaatcatgaactgaattttcttctctttttaaagtgagcataaagacttaagtgtattgttaccagagatatatttagatagtatacatcattttggcaggtaatcttctagaacctttcatgtactgtttccatcaagggagggaaagaaatagaaaatataattttatctatattttccttaaaatatatcaatctgtgcacactctttcagttttttaattactcatgtaatatatgactacattttgcttgtgtgctttttgaaaaccatcttcagtcccaatatcctctgtagaagtaatagttttaactctcctagatcttcttttagagtgtttttatgagtgtttaatgtaggaatgtgtatatattatctacagccacaggaaatgtatagttacgatttttacatacgtgtatgtatattattgtacaacttgctatttctacttgggagttttttattttggtacattcacatttacctaatctcttgtgcactgtccaacagtactttgcctataatagacacttaaggaagttttccttctttttattcctttataattacaaacaatgctgaaaggaacatcatcctacatgagccctttttgtacatataaggctctctctgtggtatatgcttaggatttgaatttcaggccagagtataaccatttttaatttgaagagatacttccatttgggttccagaatggctgtatcaagttacagttcccctgagcaagatatgagcatctgcttccccatgtaattaatgacacttgctattggatttttgtaatttaattactctgaaaaaattattttggttttaaatcagaaatttctcactagtgaagatggacatatttttgtatgtttattttagaacatataaacatttgttaattttctttttcctctcatttttctattgaatgatttgtccttttatctcatggatttgttaggagttctcttgtattttctgtattttatgtctgttgccaatgttttctcctacttagccatttggctttaattttacatggtgtctgtttaaataaatgttttatatttgtatacaaaaaaaaaaaaaaaaaaa

SEQ ID NO: 24541 - DNA, 2422 bp, Homo Sapiens
ggctttccaagatggcgacggagggaggagggaaggagatgaacgagattaagacccaattcaccacccgggaaggtctgtacaagctgctgccgcactcggagtacagccggcccaaccgggtgcccttcaactcgcagggatccaaccctgtccgcgtctccttcgtaaacctcaacgaccagtctggcaacggcgaccgcctctgcttcaatgtgggccgggagctgtacttctatatctacaagggggtccgcaaggtaccgacccgggcgtcaccggagccagccagcggcgctgctgacttgagtaaaccaatagataaaaggatatacaaaggaacacagcctacttgtcatgacttcaaccacctaacagccacagcagaaagtgtctctctcctagtgggcttttccgcaggccaagtccagcttatagacccaatcaaaaaagaaactagcaaactttttaatgaggaaagactaatagacaagtcacgagttacctgtgtcaaatgggttcccggttcggaaagccttttcctagtagcccactcgagtgggaacatgtacttatataatgtggagcacacttgtggcaccacagccccccactaccagcttctgaagcagggagagagctttgccgtgcacacttgcaagagcaaatccacgaggaaccctctccttaagtggacggtgggcgagggggccctcaacgagtttgctttctccccagatggcaagttcttagcgtgcgtgagccaggacgggtttctgcgggtgttcaactttgactcagtggagctgcacggtacgatgaaaagctactttgggggcttgctgtgtgtgtgctggagcccggatggcaagtacatcgtgacaggtggggaggacgacttggtgacagtctggtcctttgtagactgccgagtaatagccagaggccacgggcacaagtcctgggtcagtgttgtagcgtttgacccttataccactagtgtagaagaaggtgaccctatggagtttagtggcagcgatgaggacttccaagaccttcttcattttggcagagatcgagcaaatagtacacagtccaggctctccaaacggaactctacagacagccgccccgtaagtgtcacgtatcggtttggttccgtgggccaggacacacagctctgtttatgggaccttacagaagatatccttttccctcaccaacccctctcaagagcaaggacacacacaaatgtcatgaatgccacgagtcctcctgctggaagcaatgggaacagtgttacaacacccgggaactctgtgccgcctcctctgccacggtccaacagccttccacattcagcagtctcaaatgctggcagcaaaagcagtgtcatggacggggccattgcttctggggtcagcaaatttgcaacactttcactacatgaccggaaggagaggcaccacgagaaagatcacaagcgaaatcatagcatgggacacatttctagcaagagcagtgacaaactgaatctagttaccaaaaccaaaacggaccctgctaaaactctgggaacgcccctgtgtcctcgaatggaagatgttcccttgttagagccgctgatatgtaaaaagatagcacatgagagactgactgtactaatatttcttgaagactgtatagtcactgcttgtcaggagggatttatttgcacatggggaaggcctggtaaagtggtaagttttaatccttaatgctgcaccagatctagaacttgaataggtagtgactttttttctttttcgtgggaggggtggggtgtacaatgaatgtgaatgacacttcttattcttaatgtaaatctcaatgcatcagagccataattttggatactgcatgccatgtaattctgaatcatttgataatttaccttagagcatttaaaaaaatataatcaaactaattgccagccaagtcagtcatcctcctgggagtatatagagtcccaaggttagcgctcctgtattagactatttcaattttaggaaaatcatgaccatgtggggaaacaatgactttaaaatgctgaaattaaaatttatgctttaactggaatattttttgcttaactactcaattagaatattgtacacctgatcaatgtgtgttcagcacagatggccatgaattgtcatttatagtccaattttttatcttaatcataaaatgtttaggaatctatgaaatttaactttaggaacaaaacgtttagcagggttgattgatattatttttacattgttctggcaatccacagaaagagaagagccttaatttttaaaacccattttagtcattttatgacaattaaagttgtttaataaacatcttttttcaaagaaaaaaaaaaaaaaaaaaa

SEQ ID NO: 24542 - DNA, 3725 bp, Homo Sapiens
gacgcgacctgtgaccatggtggctgtgctgggcggccggggcgtgttgcgcctgcggctgcttctctcagcgctgaagcccgggatccacgtcccacgggccggacccgcggccgcgttcagcacctcggtaacctctgccaaagtggctgtgaatggcgttcagctgcattaccagcagactggagagggagatcacgcagtcctgctacttcctgggatgttaggaagtggagagactgattttggacctcagctcaagaacctcaataagaagctcttcacggtggtcgcctgggatcctcgaggctatggacattccaggcccccagatcgcgatttcccagcagacttttttgaaagggatgcaaaagatgctgttgatttgatgaaggcgctgaagtttaagaaggtttctctgctggggtggagtgatgggggcataaccgcactcattgctgctgcaaaatatccatcttacatccacaagatggtgatctggggcgccaacgcctacgtcactgacgaagacagcatgatatatgagggcatccgagatgtttccaaatggagtgagagaacaagaatgcctctagaagccctctatgggtatgactactttgccagaacctgtgaaaagtgggtggatggcataagacagtttaaacatctcccagatgatggagtctcactctgtcaccaggctggaatgcaatggcatgatctcagctcactgcaatctctgtctcctgggttcaagcgattgctctgcctcagcctcccaagtagctgggaccacaggcgtgcaccaccacacaggcacatttttttgtattttagtagagacagggtttcaccatgttggccaggatggccttgatctcctgacctcgtgatccgcccgccttggccctcccaattgctgggattacaggcctgagacaccatgcccagcctcctattctttatctgaaaaattaacaagatttccagttaaagtaagaattgacatctttaagagaaattctgaattatagtttattttcatacagctgtttatgtttataatctcatttttttttaattactgagaaaatagagtagctaagatctaatcttggagtgcattgttacaaaatggttgtgattgaaggaccaatttgatccattaggtaatcatttcctgcatgaatcatctgccaaaactttcacaatgaaaaggacatttggaaatgttactcttctggtttgagttgaaaacagcaaatatatcaaatgtatgccttataatgtttctgttcagatgcagcatccacccatggagacaggccctggaaatctctgctcttaaaacaaaaaaatgccatgaaacgatgtttgagacagttctccattaaagagggcacatttgtaaaatgtaaacttggatgttttgttgaagagagtagtgaaaagacaggaagatttaaaggtggaaatagggttaaatcagcaattcaaaaatacgttcatgatacagaggctgtagcagtgtataaactgtctcacagcgaggcccttcgtgatgcgtcccccttctgtgctgactcatttggtaggagccctcttttccgactgtcctctcaggtttatggatgcttggtatagtgtagggattcattgcattgcacggctctggagtgcgatggccctgagtgtgagttctgcctgtgtccccggcttgctgttagaatggatctgggcaggtaacttagcttcttgaagcttcggtttcctatctgtgacctcgaaaagctgttgttgtggggattaaatgagatattatctattcagctttggtgcaggatcaaagacagagtaagtgtctagtgaaaggttggtattactgttattacagaagtccttaatgaacaaacatttttatatgctgaatgagttaaaacatgtaactactgtgtttaacagatgtgaaattgtttaaacagttgctggcaccaagtgagcactcaggcatgttgactttgatcatcacgtgatgatgcagctggccggtgtgtgtcatctcgggacaggagagggaagtgtcagagacctggagaagtatttccctagtcagcaggtccgcttctcacttagcaggcagtgacttcccactgaagaggagggaaaggcctggggcccgtgcagggcgggggagcactgccccgtcggggcagctcccagccttctcagagctgcagtgccttcctcttgacacacacggagagggaatggagaaggaaagagctagcttagggatgccaggaaccgcagacgcaactctctttttagccccacaacagccccggggaactgtgattgttcctgtttgtggctgaagctcccagtggttaaggagccaccacagcctcacagaggcaggaaactgcagtacagggactagggcccaggctgtccatcattgcctcaggaaagttctcataaatgggggtaagtccttacagtctctccaaagtatgttagtcaggagtgtcacagatgcatcagcgataaggagaagctgctttaccgtgcgcaagttgtataattaattccttgtgaggttcatatgctttgagggctggccggggcccctacactcatctgaaacgtgatttccagggaaaagctctacaggtgtcaagcacctaccactgttttcacggtgggaaccgccactgtggaatatagtggtggggtgtttatttgattttcctactattttatgcgaatttaaatcaggctgcttatttactagtagaactcagaaacaggcaaacaaacaagaaacagagagaaacagaaaagggaacccaaagaatgttagagctggaaggaatcccaggcacggtcaaatccaaaacacagtttttacggatagggaaactgagggccaaggaggggcagggctcgccgagtttcgcctcctctgaccgcgtagaatggttgcactaaagcagattcctcgtgccgtgtatccgtcaggtaacatctgccggcacctgctgccccgggtccagtgccccgccttgattgtgcacggtgagaaggatcctctggtcccacggtttcatgccgacttcattcataagcacgtgaaaggctcacggctgcatttgatgccagaaggcaaacacaacctgcatttgcgttttgcagatgaattcaacaagttagcagaagacttcctacaatgagaatgcacactccagtcttggtggttccttcgtgtggggcttgatcgtgttgctgcctgttaacatgatgcctttgaaactctccgcctttgaaactttctacccctcccttcaatcttatcctaaccaaatgagaataatgacatattgaaaacagcctctagcttcaggctgggcacggtggctcacagctataatctcagcactttgggaggctgaggtgggagaattgcctgagcccaggagttcaagaccagcttgtgcaatatagggagactccggctctacaaaaaagagtttttcaaaattagccaggcgaagtggcacacatctgtggtcccaggtgctcaggaagctgaggtgggaggatcacttgagcccaattcaaagctgcagtgagctgtaattgcatcactgcactccaacctgggcaacagagtaagaccttgtcttaaaaaaaaaataaaaacaaaaaaaaaaaaaaaaaaa

SEQ ID NO: 24543 - DNA, 2605 bp, Homo Sapiens
ggaagacgtggagcgctgcggcggctgatttgtcaaagatgaaagtgaccttatcagctttggatacttctgagagttctttcacacctttggtggtcatagaacttgctcaggatgtcaaagaagaaaccaaagaatggctgaaaaacagaattatagctaaaaaaaaagatggaggtgcccagttgttgtttagaccattgttaaataaatatgaacaagaaacactagaaaatcagaacttatatcttgttggtgcctccaagattagaatgttactaggggcagaagcagtgggattggtaaaagagtgcaatgataacaccatgagagccttcacatacagaaccagacagaacttcaaaggttttgatgataacaatgatgatttcctgacaatggcagaatgtcaattcattatcaaacatgaacttgaaaatcttagagctaaagatgaaaaaatgatccctggttaccctcaggcaaagttgtatccaggaaaatcattgttgagaagattgctcacgtctggcatcgtgattcaggtgtttccactgcatgacagtgaagccctgaagaagcttgaggacacctggtacactcggtttgctttgaagtatcagcccatagacagtattcgtggctactttggggaaacaattgctctgtactttggatttttggagtatttcacttttgcattaatccccatggctgtcattgggttaccttactacttgtttgtgtgggaagactatgacaagtacgtgatctttgcctcgttcaacctcatctggtccacggtgattctggaactgtggaagcgtggctgtgccaacatgacctacaggtgggggacactgctcatgaagagaaagtttgaggagccccggccaggatttcatggtgtcttgggtatcaattccatcactgggaaggaggagcctctgtaccccagctacaagagacagttgcgcatttacctggtctccctgccattcgtgtgcctctgcctctatttctcactgtatgtcatgatgatttacttcgacatggaggtttgggccttgggtctacatgagaacagcgggtctgagtggaccagtgtcctgttgtatgtgcccagcatcatctatgccattgtgattgagatcatgaatcgtctctatcgatatgctgccgagtttttaacttcatgggagaatcacagattggaatctgcctatcagaaccatctaattctgaaagttttagtgttcaacttcctcaattgctttgcctcactcttctatattgcctttgtcttgaaagatatgaagcttttgcgccagagcttggccactctcctaattacctcccagatcctcaaccaaattatggaatcttttcttccttattggctccaaaggaagcatggtgtgcaggtgaagaggaaggtgcaggctttaaaggcagacattgatgctacattatatgaacaagtcatcctggaaaaagaaatgggaacttatttgggcacctttgatgattacttggagttattcctgcagtttggttatgtgagccttttctcctgtgtttacccattagcagctgcctttgctgtgttaaataacttcactgaagtaaattcagatgccttaaaaatgtgcagggtcttcaaacgtccattctcagaaccttcagccaatattggtgtgtggcagttggcttttgaaacgatgagtgttatatctgtggtcactaactgtgcgctgattggaatgtcaccacaagtgaatgcagtctttccagaatcaaaagcagacctcattttgattgtagtagcagtggagcacgcactcctggctttaaagtttatacttgcatttgccatacctgataagccacggcatatccagatgaaactagccagactggaatttgagtctttggaggcactcaagcagcagcaaatgaagctcgtgaccgagaacctgaaggaggaaccaatggaaagcgggaaggagaaggcaacctgagtgcccagcgtgcccagctgccctgttggcagaggcctgtgtctgtgccacacctgccacggtggcagggggggtacccggggcagcatcgtggctcctgaacccagacccaatgcttagccaaacgaagtggctcccatgtggcaagcacccttctcagtttcgcagtggcttggctcgggatccttggcagttcccccagccccaccctgtctgctccttcccagttccttcccgggccccacacgctgctccagctgccaactttgctgcagagccactgccgcccttgagcctctcaccatgagtgagccaccagctctccacgttcccctcatagcagtgtcactcccaaccccaccatggcccagggacccgtggacaggttggggatggggtgtgtgcccactgtgctcatcacaggagcctcagttgagagtgagcggggtacagtaaggcagtgcttcccacactggacctctttcctggttctcttttgcaatacattaacagaccctttatcaacataaacaatagtaactgagctattaaaggcaacctctctaaaaaaaaaaaaaaaaaaa

SEQ ID NO: 24544 - DNA, 3820 bp, Homo Sapiens
ggggcgcccccacactgctcgcgtcaggagggacgggggcgcccccacactgctcgcgtcaggagggacgggggcgcccccacactgctcgcgtcaggagggacgggggcgcccccccacactgctcgcgtcaggagggacgggggcgaccccacactgctcgcgtcaggagggacgggggcgcccccccacactgctcgcgtcaggagggacgggggcgcccccacactgctcgcatccagtggacaagggtgatgaacggggatttcctggggacctcccttctctttattcgagagctcaggagatactgggaaccaaaggctactgagggccgttttgcagacacgtcaggcaggatccggtgtcctgggagcgcgctgtgccatatcccacatcgggtctcctgtaaatgagccgccgagccgacatgcgtggctgagggcttagctctggacactgtgcctgagagtttcgtgttgagaaggagcccacatgcagagcagtgtgcagtcacgggtgtgtgggcttcgcatccggaaggtgagcctcgtgcccccttcgactgagcacgctcccgagggcaccgtgggtcaggacgtaactcacgtggcatacgcggcgccccgcgcccagctgctttcgctctagcaagcctgtttgggaaacatcttgttgccatgatggtcttagtgctctgtgtgcacatgctcctgtgtaaggttagttgcttttcctgttcaaccctgtggctgtagtttgttgttgcttgggcgagtgtgcacgtgtgagcatatgagtgtgcgtgcaagggtgctgtgtgggcctgcacatgtgaacatgtgtgtgtgctcgtgcacacacatgtgcagccgctcaaggttggggtctgtgttttgttccctgctccatccctgtgtgtagaatgcactggcaggtggtaggtgtgctgtgcatagttgttgactgaatgggtgttggaggggacagagcttgctgcgtgtcccagggtctcctgtgggcgggcagagcagtcactgggccggggcggagggcaggggtgcaggtgctgtctgtgctggtcccgcagagttgacgggcgccgacctgaaggactgcgtcagcaacaacagcctgagcagcaatgccagcctccccagcgtgcagagctgccggcgcctgcgtgagaggagggtcgccagctgggccgtgtcctttgagcgcctgctgcaggaccccgtcggtgtccgctacttctctgattttctaaggaaagaattcagtgaagaaaacattttattctggcaggcctgtgaatattttaatcatgttcctgcacatgacaaaaaggagctttcctacagggcccgggagattttcagtaagtttctctgcagcaaagccaccaccccggtcaacatcgacagccaggcccagctagcagacgacgtcctccgcgcacctcacccagacatgttcaaggagcagcagctgcagatcttcaatctcatgaagtttgatagctacactcgctttctgaagtccccgctgtaccaggaatgcatcctggcggaagtggagggccgtgcactcccggactcgcagcaggtccccagcagcccggcttccaagcacagcctcggttcagaccactccagtgtgtccacgccaaaaaaggtttccatttgatgacagttaagtggaaaatcaaaatccggccgatccctgaatgaagagctgggggatgaggacagcgagaagaagcggaaaggcgcgtttttctcgtggtcgcggaccaggagcaccgggaggtcccagaaaaagagggagcacggggaccacgcagacggtttgtggggtggctcctgggctgtggtgtccaggccaggcagccgcgtccccgtcctggcgtcgctctggtggttggcggtgaccttgggccatgtgtgcagtgagaggccctgttggcgggtcgaggaagcttctctgaatgaataaggaatgccgctgtgtctggggacacgacctgtcagccagccagagggcagcagggctgctccagaatcttccagagaaaagggctcaatacatttcagcccatgcctacctcaggcctaccccacacagtggcggctgaacatctgtgtcctctcctgcttttcactatccaagtaataggtgtttttggtagaaaatttggaaaatacaatcaagtaaaaataggaacacacaaatgtgctattgggtgtctcccccaatggcagcttggttctctgccagggctttttcctaggtagatgtcagggtccatgtgccttttacatgtgtgtggttttttaaaatgtagtagcatagttggagtagtgagcatttttcaagttaagattggtatttgatattgggggctgcccattctggatgctctgtcccttttttcttcgcacatctgagacttcctgtaacaaaagttaggcagagagacggctcccagggcgccagggggtggggctgcagggcccttggcggctcctggccgagctccagacaccagccgggtggttttggcgggtggcagggcagagggcatggagatgcccatgctgaacgctggcgaagatgaggctgttctgtaccaggtgctgaaaagcacataggggagaactgggaagattttcttctctagagatttttgggaaagggattagttttcaggaatgagtgtcctgcctgaaggcaggggactggcacttagcctgtggtctccaagtttaaatcaggcagtgaggtgattgcgatagcaccagctggcatggccctggtggaggcaggtgagcagggtgctctgcgctccgtggctgcggctcctgtgtgtgccctgcagtgccaagcatttgtgcgtggctgctccccgcctgcagggggaagcgttgttcccggggcgctgaaggacgcgctggtgagggcttgacgtgggcagccctgagcttctggccatgctgtgaggtgctcttctccgagcaaaggcagctgagagttgcagagttcacctttgtcggaggccacctgggagatggacactatgttattaggtggggccaggcctcccgagtacctgggagatgggagtgttcgcttcagacagtccatccactcgtgcccatccccatacctggcagatctgcaaagggctttgaaaaccttgatagagccaggcgtgggagctcacgcctgtaatcccagcactttgggaggccgaggcaggcggattgcctgagctcaggagttggtgaccagcctgggcaacatggtaaggctctactaaaaatacaaaaaaaaaaaaaaaaaaaaaaaattaggggccaggcacggtggctcatgcctgtaatcccatcactttgggaggctgaggtgggcagatcaactgaggtcagaagttcgagaccagcctggccaacatgatgaaaccccgtctctactaaaaatacaaaaattagccagatgtgatggcacatgcctgtaatcccagctactcaggaggctgagacaggagaattagttgaacccgggaggtggaggttgcagtgagctgagattgtgccattgaactccagcctgggcaacagagcgagactccgtctcaaaaaaaaaaaaaaaaattagctgggtgtgatggtgggtactttcagtcccagttacttgggaggctgaggcatgagaatcgcttgaacccgggaggcagaggttgcagtgagtggagaactacactccagtttgtgtgacagaacaagactgtctcaaaataaataaatgaaaaaaaaaa

SEQ ID NO: 24545 - DNA, 1504 bp, Homo Sapiens
ggaaaacatttattttaaaatacaggatgaagtgaattaaaagatttaaatgcacatttctttaaggataatatttctgtgttggcaaaatttgagagtaaattggtcttgaatggaatggattgtcttgactcacacattgcggagcagagcccgccctgaagaaaggtgttgctgtggtgggatcttcccacgagggtccttgcctgttctcctaggggatggttgctgggtgccctgggctactggggagagcgtacggggctggagaagatggccattcctgggctgtttcctagggaatgagttgtacatctcatggctggattttgtaaaatcagtttttaaaataccgcatatatctgttttcttactggaacacctttttcttggtctgttgtgcacagcccaggtttggggggtactggtcattgactgtttcagaagccgctgtgtttggggaaactgccctggcggcttcagaggtgtgtgtgggttgaagggcaggcagctctgcaatagacctcaccttggactaacacctgagggctgcctcgccaggaaggattcaggggctcaaccccagcctgagtgcctgggctgggtggatccacagcggggcgaagggtcccacacacagcatcgatgggggctcagggtgctcagccctgggcattacataaaagctgtttattgacattacgttcttcagagtaacaaacccccttggaggactctcctgccgggatgtccatgtccgcctttgctccgagctggggtctcatgtctgtggtgctggaatccagagccctgacggtaggggagtgattttgcaacacagttgcatttcacatcttctgacaggattccttgagggagggctggaccctggcacctggccagctccaggaagggtggccaggcccctcactgccccatcaagagtacttggtgttggagatcttcttccagagcagagtcttgaggtggctgagcaccagcgagtgatgggcctccacctggctggccagcccgctcagcgtggtacaggtgcgcagctgtgtgcccagctcctcgcggaggtcggcgggcgcgccaggcagcaggtagccccgtagcagtgcgcacaccttggccaggttgggctggatgaggtcgcccttgcactgcctcatgagcctgtcacacggggccctgcagtcgcgcccgtaggtgcagtcggtgctgtgctcgcagcggcggccctgcaggaagcggcgcacggtggcctcgggtgccacctgctgcaggtcggccatcttgaagtcgtaggtggctgtgtagcccacattggccagtgtggtctcacacatgtagaaagtcccgtaagagccgtggaagagctcctccacgaactccagcaggccgatggcgatcttggcccgccaaggccacgcaggccccagccactgctggagagcaccctgcagggcaggcggcagcagtgggcgcaacaggggtggga

SEQ ID NO: 24546 - DNA, 2635 bp, Homo Sapiens
gaggacacaatttggaagccatcacacttaatggaggcccttttaaatgtaacactttgtcctatcaattctcttctaaattagttgtcactacctggagaaaacccacccttgattgttttatgctattgcttaaaaatacatagtcttttatatagattttcctataccagttttaaaaactctctgataagttccattactaaacttactttcgttaagtaaggagtggaacgtaatttgtgtagcaacacccagtgtaacatgtatgtaattatcattggcctctaaatctagttgcacaaattaactcaaaatgtaaagaaaaagcgaattggtcctattagaaacaaggccttgaccacagaggtttttactaacaatcgacttggccagtcatggtcagataaagaacttcccaaaatttacaggataatttggaagaggaaggaagtaatttttttggaggtagccagcaggcagtttatcctgttacctactcctgcagctctggaatattcatgtagcttggaaaataggaagaaattagacgttttgaagttaagtccctaccttttgctcttcttttgtccttgttttttttttttttttttttttcttgagtggctgacatactttgtcagcctgaaagtcctattgtcaaaccaaaggtaacatttgaaaaattgagtttgcctcttcccaccacaacaaataggaatttctcatctatttccaattttcatcaactatacaccgtaacatactaaacataaattctcagacttatcctcttaatatcttttgtatttgtatctctcctttttcatctaagtttaatttatcagcagttctcccaaccaaataccctacttctttttcatttctaccaccttaatcagagctcgttttgtttccctcttctgcctggattggacaagaactttccatcttctcagcttctagattctcatcagttcagttcatcctatacatagctcttggaaagatcttcctcaaacaccatattttatcattctaccatttaggaatttcaagaattcaatttatcactcaagaacctctaccagattgcgtgttaatcatagccatgttttccagatcgaagctgggagccagtcagagttcaattcctttatcctcccttgcacaacatcggccccggtctggactggtgctttacagcatgccatttccttgttttctcttcttccaacattccacgttcttttaatctgcttcagctttcttcctccaagaatttgaaattaatctttatctttaacttctttaattgacttcatgacacttatttactgactatggactattttgacttgtaattatttgtgtgttctccaattgtgattttcagtttgtttctgtgggtgtggaaaataaaaatctttaaaggcataacttgcattttcatatatatggagaaagaaactcatataactatatatgtatgtattgataattttatatataactttgtcttatattctgtcattaaatttgtcttatgtgaagtatagaatatggaagatttaccaatgtgtgacacatagatagattactatggaccttaaaaattatttggtctaattttttttaggattaaaacaggatgaaaataagccttacattatatctgctcctttatacctagctttaccttccgccctcttcccatgccaaacccagtctctcattgggaaacacacacacatgcccctagagaaagcatctatgaatacaattctgtgaacgtggaggaggtaggtgattagtaacttttgactggccaaagggtgatgtaggttaaagcaagaaatgagggtgagaaaaatctctgttcccctagatagaggggaagggagcaaacactagaacatggcatgattgagtataatagaagtgagaatgtttagcaaccattcttttctcctttgtttctggcatttccacccctccccaccccccgacaaaattcctgtctttgatctatgcagtaatatgtctaaatatcctagaattggtaactctgtctgtatgtatgtgtgtatatgtgtctgtgcgtgtccttatcacccctacttcagcagcagcacagaaaactgagccaggtgttaatgaattcatctctggcaaagtttattgctctgtgtgtgtgtgtttccatgcatgtacatgtgcacacacacacacacaatacacatacatatacctacatacatgtggctgatgacttctcacagtgtatctcaaagcattattgcatgtcccacttggttgatagggcatctctagcctgacagatttatctgttgagaacaggattatgcatttgaaaccagtttaattcttagcaagacaatgcgcatgtcttatgtagattttgttgttggtttttttctccttcgtaagttactcggggaaagtcatgtcaatataaatcagtggtaatgaaatcaacattatagcatctttgataatgcatttgctaaagcctttctggacgtttacccagctctcaatgattgatattacaggcagtggataaacatttttgatggatctgtttgctcacagataaaaaaaaaaaaaaaaa

SEQ ID NO: 24547 - DNA, 5862 bp, Homo Sapiens
ggggggggggcggggccggctctttatttacctttgacgcggggagggaagagaggcgcctcctaatccatcttctccctccagcttctgcctggctaccgcccctgacccccacccaggcacccactccactctcgccgctcagcgaattcatccggccctctcccaccccctcccccattcttcccctttccaactcccaatttctcccgcctacacctcccggtgacctcaggctgagagaataattcgtattattattacaaacaaactcactctccagaagcctgatttccctgagacccggtttatttccatggataccccctcctcctctgctttcaccccttctccgcggctctctccctccccgctgccccccacagctctgactcagctctccgtctctcacaaaggccacctcccgctcccctctcccccgcaccccgccctcccctgtctcccttctcctcaggctcttctccacctgccccattcctgctgtgtccggagggccatctttcctcttttcccccagtcaccaccccgcggagccccaggggacagcaggccaactttggagggtcctccctcctcagtccggttcaccacaagccccttcctttcccccagccctgctgatgtgctgaatgcctcctcgtgcccagccccattcaatgctccccttcccaaaaatggagccgacccctaaactcacaattgtaaaacctcatgagtataaagggcctgtacggtcagatggttcaggcagccatctgctgcttgaatagtccctttatgaagacccaagcagttcttccgcaagatctccggggcaccatcctgccctcagtccaggagtctccctccaccaggagctctggcccggctgtaacaaggaccctccttcccctgagtcctgcagtttcccactcagccctcagaccctgtccacccctcccaccatcttctgtcttctctctgacttgaattcctattttcttaattcctattttaaaaagttctcttttctcctcctgctcaccagcttccctccactttaatccatcacttctctccccacagtcaggtgaaatgcctccagctcacccttggtttctctgctcactgtttttgggaggacacacccaactccttgctatccaactcctgcctcgattcccaggaagtcctcttccagtcagtcagactcatggactcttaggaagggcccaccgggggagacacatcccttccaccctaagcatagagaaaagttcctcatagagcagctctgcccttatctgtagacttgtaatagagaaaaagcccagctcccatacagaaaccctccaagagtcctcaggacggaataattggttttctgataaaacccaacctctgacccctccacataaacaacaacaaataaggccatacatcactttttctgagtgcactattctgggttgagctaaaactgaatatttgggctcagcattactacttgtctccctagaatttggagagtgcagggatataagaggaaatgggcagctggggtaaggaaggggtgtgaagggccggccccagggtgttgcctcggctgcacagggaggtgagggccggcggctaaccttctggccccctcagggaatgaggtgattgcagtggattggaagggcctgaaggatgtcgatcaaatcaacatggacagcaccagctcactgcacgggagcagcctccatcggccatcgactgagcaaactcgaactgatttctcctgggacggcatcaacctctccatggaggacaccacttccattcttccgaagcttaagcgaaactttaacgcctatggcatcggggccctggccaagtcatcattctcagggatctcacggagcatgaaggaccatgtgacaaagccaacagccatggggcaaggccgggtggcccacatgattgagtggcagggctgggggaagacaccagctgttcagccacaacacagccatgagtccgtgcgcagggatacggatgcctactccgacctcagcgatggcgagaaggaggcacgttttctagcaggcgtcatggagcagtttgctatctctgaggccacactcacggcctggtcttccatggatggtgaggacatgagtgtgaactccacccaggagccattgggctgcaactacagtgacaactaccaggaactgatggacagtcaggatgccctggctcaagcacccatggatggatggcctcactcttacgtgtcccagggtatgtactgtctggggtcgtcagatgcctgggaagccagcgatcagtccctcattgcctctccggccacaggatcctatcttgggcctgcatttgatgactcacaacccagcttgcatgaaatgggaccttcccaaccagcttcaggatactctgctctggagcctccacctttgctggggggagacactgactgggctccgggggtaggcgcagtggacctggcaaggggccctgctgaggaggagaagaggccattggcacctgaggaggaagaggatgcgggatgccgggacctggagtcactttccccacgagaagaccctgagatgtctaccgctctcagccggaaggtgtctgacgtcacatcctcaggtgtgcagtcctttgatgaggaggaaggcgaggccaacaactagtctcctcccccaatgccctgccttccactcccacctgagggccatggctgtgacccataccctccctccccccagcagtacagctgaaactgggcagacaacattggggaacccaggagcttccagtcctctcctggaaatggaggaccaggatgggattttatccaggcttacactcttagaaacccacaggcctgggaactgagacctgggcaactagatggccgtgagcttggtgtggctgtggagaaggacctgggctgtgggcttctgggtctgtgccgacaaagcctccagtgtgtgcaccctgaggacgggggcagcgcagctgtgctcaagactggatctcagttcttcacgccccgatttcgtcttccaggagccgtaactctgctgtctgaatgcctcctttctccatttcactcttgcttttcccaactctgttttctctggctgtggccccagctcatccctactgagagaacagacctcaggggctgttggacatggctggacaggcgcaggggaggctgcctgaagggcacgtccatggggagggtggagaggctgcctcagcaggtcatttgggttctgagatcaggagtcgaggaggaggtggatgtggcagctgagatctacagggggcacggatgtggttctttctatcaaggcctgcccggagacaagagagtcactgaggagactaagaacaaacacagccccttgctctgggatctttaatatcccatggctaaaaggaagatcctaaggatctgggaaaagacccagccagggctggctgctccagctcttgcttccctttcagctttcttccatccctgctccgggagcctgaggagggtgtggggacacccatcttggatacaccaacgcaggatgcaggtgtcgccaacagcagggggagcatgagggctgtctccccttattcacccctgtcctctgaagctgtttacacttttctctttgccttttctacatttttataacttcttgggcactcagggttgagtggagtggagggaggagtccggtgctgtcactccctcagccaggcagggttgcagctgagggccagggtgggcactcggcactttctgccccttcttcagctcctcccaggactcccaaacagcctcacagctgtcctccctgcctccccaggcctcctaccagaggaagagaggaaaatcagcggattcttccttccaggatggtgtatggtgaggcacaagcttgccctcccacacttggcatccatgctggtggggactgagcagcatatgcgccccagcactaccgtgagagcacaggcagaggatgggcggagcaaagcagcggtgctgtggggttggagagcacttggccctgccactgcccaggtagcccctccccagcccttggcacaggcagagttcgggtaggagagagaggcctaagaggctcactgccctatctccttctttcctcacgcccttccaaggctccggctcccaggcctgtgtcctacccacactctgtcaggagtcctaccacttgcatcctctgctggaagggagcactgttgtcctctcctggccctgggcacaaactttgccctcacccccaggccccagaacttattattttggagtgagaaggttgagagttggggtgtttctgtccatctatggtcctgtcccgccatcaagttcatactctcttactcacacttctgggatgcaagcagggcaggggttctgtgtcttccatggaagggggacaatggttatcctgaggttggtttttggaggaaacatgggcgtaggcaaggtgaaccaaggcaggtgcagtcacctaaccgaatgctgcctgtacaggggaagagtcctcttgtgcttgctaacgtgtgctgactccatgtcccaggacctcatttccaggagctctgagaggtggtctagcatgcccgccctggcagctattccccacccgtctcctgctgcaggctctggggttttgcatgttcatgtgaccttccttccatggggtccctggttcctcaccttctccaatgtgtgctattcccacatcacctcttcctgtcgtctcatcctctcagtgcccatatcatacccccagaccacggtggacagctcacctagtgagtgcgttcattcattacagttcgtttttgctcaggcccgggggagttaggaaaggtagaccacagcagctttcgttcctccttccctttcccaaggaagccaaatggtccctgacaaaagatgactaaagatctgaaggactctagcagggttcatacatgaacctgctttccccagggtgctggcatattgctgcagatggaagtcaggtgggggtctgtcttctgcaaggagctcctactcgctctgaagagggagactgaggagctggcctgggaccatcttaggactcttctggtgctgggggcagggtgcatgggggttgcttatcgtctatttcagggggtggggaggggcatgtgcaggaagaggctgtttcggggtgggaaagggttgcttttcctttggggttaaggctgtgcagcacgttttacagcagtcctggaacagggctgtttttatattcttgtgaatgaaactgctcttgctaaatgattttctttttttggagggggggtgcactttcattttcaattgactttattaaatgaaaatccaaatcttccactcctccccctccattgtcccctcccccaccacacaccttccttcttgtccttgtgttgaagagggtatcttggggaatgagtttattatcttctccacgacctcacctatacatcccacacaccatcctccaggtctgggaaatatccatttttctggccagtcttagcatgttttcttaatgtcacattcccacgccaggcccaagagagattctatgacatatattatagagagaattctatatcaatatatataaatattagagattatgtacacaagggcatgggctcaaatgcccactgccagtcccccacccaggcttcagcatctctcttggcctggggaagtgggagggatgtgatgctggagaaggctacaggctgtgttcaatgacactaaacagaatgtggtggaaaaaa

SEQ ID NO: 24548 - DNA, 5534 bp, Homo Sapiens
gatagtcagtgtgagtttgagaaagaaaaacacactgtagagctctactataaaagttaataggatagattgttaaactacattctgccatctttggctatttggttgctaaatactttagaatattacttacagctaggctgattataacagaagaaggattaagtatgacagcttgtctcaataatggaagtaaaaagcagagatcctggaaagaatctgccatccatcagaggaatttgtctgactttgtggtattgctagggggtgtatggttggagtattattttgatggtgctggatcaccctcatcacagtaaactcaagaacataggacagcttgtgaaataggttcttacttgtaaggaggaacatatgcagcagaaaaaagaggaggaagaagttcttaaagaagtaactgcacatttccaaattactttaactgaaactcaagcccagctggaacagcatgaaatacacaatgccaaactgcagcaggagaacatggaaatgggagaaaagctaaagaagctcactgaccagtatgcactgagggaagaggtaaacggcgtttggtttgtttatagacagctgctcaccagtagcaaaagctacaccctaccgtaaagtaaaaactctttcacaggacagtattttagaacttttgtgtatgcacagtggaaattacatgtttattaggaaaagagtagaaacctgtaaacagaatgactaaattggagcatcacttggcccaagtgtcagtggagtaggataagtaaagggatttctaggagatgtgtaccacttgtctcccatatgatgctacaagattgtcaatatagcatacagatatttttctcttatgcagtctaataatacagatttgttccctaaatactctgtatctcagatttctgtgacaatctgaacaatataaataggagaattgtgctatttgtgagaataaggaacctactaattacccatcaccaagtcacattgtttgtgtaatcaatgaagtaagaagtttgtggaggactcaatagttgtcgaacctagtcattggagttattttataaattgatgtggaagttgtatgatggctaaataaaaaacaaataggtgataacctgcttatttgtttttattttttctttacttttagaggtctatacatagggtaagatttcaattttcaaaggatgcatccccttcctttattatgctttaagctagtaaaatatatatttaaatccttacttagtagattaaaattggaaatagaaagtgacaatttaaaaattaataaaacagtaaatattactttatgcatatcaaaatgttattttgagttacaccttttcatgctacttttgaaaacatttttctttaagattttgagtatcttttaaaccattttcctctatgtttcaagaacatttcaaacttattatggaagctgcaaacttatagtagaatatatcacttggctttagcaattatttacttttgtttctagcaactcttgtttccatctaattttaagcaaatccaagatattatatcattttatttattactattcaaatatgcatcatgaaataagattctttttaagccataatcactgtactatttttactccaaaaggttaaacaattgctatgtaatcacataccttctcactgtactatttaaatatctgttacttcccttttccttcaggttgtttacatcaacatcaaaataaggtttatacattttattgttttaatatgtctcaagtctttttagtatataagcttcccccccctcttttttttccttggaatgtatttattaaagaaattttttaggcctatatagtgaacttttaaaattaaatttgttttatattataaagcatattatgaatatcatcagtttttttaaaagaatcctttaaattccattgttttaaataatggtattaaaaatgattaattttattttattttttattattttactctttaggatttatattattttaactgtattaaactctccaaatttgctatagaagtagcagattgggagaggacatgtgttcaagttgtactacttgtatgtcttgtttagatattacagtctttttcttttatcagaaaataattgaataatgataaaatcagttgcagattaagacagattatctgttgcagtcttctcaaaacttaatttaagtacattattttcagctagcatttcttccttcacatagaacctccatgtgtggagggatttcctaatgagtctattgtatgtacaatagcacttaatgacatagcttttaaataataacaggattttaccaaatgtttaatatgtgccaggcatcaagcaccttacacagtttaattattgcatagatttggacagcaactctgcaagttaggtatggtcatgaacctttgcagataaggaaactgtgtttcacaaggagaagaaattgtcctggatcatacaataagctaggatttgctccagaccatttttttcattttatcaggctacctacaattaaggaattcagaagattttgtgaacaaaaatgtccaggaattatgtgtgtaataaatgaatttgatattttgatctccttatccatctttttcttgataaaatatcagcttttttttttccaatgtagggcagaagcaagaagtacagatattttgatggggacagcccacgtctgatagggtgggacatggggcagcagttagagggttgtgctctttctagtgtgggatagtttgcaagatgatatgttgtagccacttctgcagtgacggggacagaaggagtcagtgttcttaactacagtggtagcagcagaaaagaagggtaagcagggttctagaaatttgtgttatgttttctccccactgtatttatttctttggttagtggtgcaagaaattctgttttcctgtagcaaattaataaagcgttcaaacataaggaattacgacaacagcttgtagatgccagacttcaacaaacagcacagctgataaaagaagctgatgaaagacatcagagagagagagagtttgtaagttctacttcttggaaaaaaaaaaaagatcgccaaaattgtaaccaaagccatttaaaacaaactcctcacttaacatagtgccagggcatgcaattttgtttcttactctctggatgtgggatatgcgagtgtgtgtgtgtgtgtgtgtgtgtgtgtattaagctttctgtttctgatgaaattttcatatgaaatttactggagataagattaaattagtggaaaaacaagataattttgctttctatgtagtggtcaccaagttaaagaattgtgccagttattaggcaagataggctttgagatttagggacagttaaattttacaccaacttagtgaacatgagacttctacctagtgttacatttcatttttaaataagcaatttaaaaattggtaaatgatttgtttactttgattatattctggtataattttctgacaaaattatctgtgtcttggtcagcattgttgctagaatatgtattcagattttgtctgtccataattgagaacacagaaaaaatctaatttgactatacccatttacccccatggaaatgaaactatattctatgaatgaaaaatgattttaataatgtggtgtattacattttcttcattcaagtaatgtaggccctgagtagagcatgttatgaatatttagttccttagtgttttctcattcaagcctctcatattgaatgagtctagggtttggagagatgtttcacacagcatgtctcttcagtgcaagctgacagatatcagtgcacaattaaagaaacttaattgcacctttcaacttggagtataaattttgtatgtatctatgtatatctatgtgtgtattttgtggtttaaggcttatttacataatatgtgacattttacctcagaaattcagtgactgaatttcacagctgcttcccatgcatctttattatctatgtttctgaaaaactcaaatactaactaatctcttttcttcccttagctgttcctttcctgtggttttaaaaaagtgaccagaaactaggtctctattttcattgctttgctgcatattcttttaacctgcttttatcctttacagagttgaggggctttctaaataacctagacaacgtcaagattcttagctgcgttttctgtctaaaagtgtagatgtctagttattcctcatgtaaaacacaacatttcaaccctgagtactataaactttattatgcttctaggttactttttctctttaagcaattattcctacattcctaagtgttcaccagtggaacagataagagatagaagtagttagaaattgagataattgggttgacctgtcattgttgccaggataattactggaagattaagcctatctgttagacattttgaccatgtttataattgttgttagtattctgtcagaatgtatctgttttctagttattaaaagaagcaacagaatcgaggcacaaatatgaagaaatgaaacaagaagaagcacaactgaaagagcagcttttcctttatatggataagtttgaagaattccagactaccatggcaaaaaccaatgaactttttacagccttcaagcaggaaacggaaaagctgacaaagaaaattaaaaaactggaaaaagagatggtaatatggtataccaaatgggaaaataataatacaacacttctgcaaatggctgaagagaaaactattcgtgataaaaattataaggtctttcaaataaaattggagcggttagagaagctgtacaaggctcttcaaatagaaaggaatgaactcagtgagaaactgggaattctgaaagggcaggtctctgtgaaagtagcagatgtagatttagcagtgcctgtgacgcattcctgtgctgacctggattcttccaatatgctgaacacttcctctaaaagagccccaggagtccatctggaggctgaccccaaaggaatgaatgaagtaaaatgctactcaaaagccctctccacaggatctcctctaggcattgattaagattaagtgtgatcattgtactgatggatatattttgtgtacatgtttctcttttagttgtaactattgattttataatgaaaatttcctctcctttttctaccatatctctgtttttttagaactactcaactgtgtggtaacagaaagcttcttaccaatttccccaactatgttgcacatcagcctcattttccccctttattggaatgcatgttttcattgccttctcctttcaaagtgtacgtttgtgtgttcatcaccttaaattatcttaatttgagacttttttataatggtttcgtaatgtgaaatcaaatactaatttaaactctggagcccataatatctacataaaagaaaatataaactgacaaaaaaaaaaaaaaa

SEQ ID NO: 24549 - DNA, 6025 bp, Homo Sapiens
gtcactcagcacatgcagtctgtgaaacagggcaccaaagactccccagaacgttccagccagtcctggtggggatcgttctgcccggcaccgttaccctcagatcttacccaaaccagcgaacaccagtgcactcaccattcgctctccaactactgtcctctttactagtagtcccatcaaaactgctgttgtacccgcttcacacatgagttctctaaatgtggtgaaaatgacaacaatatccctcacacccagcaacagtaacacccctcttaaacattctgcctcagtcagcagtgctacaggaacaacagaagaatcaaggagtgttccacagatcaagaatggttctgtcgtgtcgcttcagtctcctgggtccaggagcagcagtgcggggggaacatctgctgtggaagtcaaagtggaacccgaaacatcatcagatgagcatcctgtacagtgccaagagaactctgatgaggctaaagctccccagacacctagtgcccttttggggcagaaaagtaatacagacggagcactgcagaaaccttcaaatgaaggtgtcattgaaataaaagcaactaaggtctgtgaccagaggaccaaatgtaaaagtcgctgtaatgaaatgctgccaggcacgtcaacaggcaatagtcaaagcactatcactctatcagttgcttctcagaacttaactttcaccagcagcagctcaccacctaatggtgactcaatcaataaagaccctaaattatgcactaaaagcccaagaaaacgactgtcttctacattgcaagagacccaggtgcctcctgtaaagaaaccaattgtggaacagctttcagcagctaccatagaagggcagaaacaaggcagtgttaagaaggaccaaaaggttccacattcagggaaaacagaaggttcaacagcaggtgctcagattcctagcaaggtatcagtaaatgtcagttcacacataggagcaaatcaacccttgaattcctctgcccttgttatcagtgattcagctttggaacagcaaacaaccccatcatcatctccagatataaaagtaaaacttgaaggaagtgtctttctcttggacagtgattcaaagtcagttggcagctttaatccaaatggatggcaacaaatcactaaagattctgagtttatatctgccagttgtgaacaacagcaagatatcagtgttatgacaattcctgagcactctgatatcaatgacttagagaaatctgtttgggaattagaaggaatgccacaggacacatatagccagcagctacatagccagatacaggaatcttctttaaatcaaatacaagcacattcttcagatcagttacctctgcaatctgaactgaaggagtttgagccttctgtttcccagacaaatgaaagctactttccttttgatgatgaacttacacaagatagtattgtggaagagctggtgcttatggagcagcaaatgtcaatgaacaattctcattcttacggcaactgtttgggaatgacccttcagagtcagtcagtaactccaggagctccaatgtcatctcacacttccagcacccacttctatcatccaatccacagcaatggcactccaatccacacacccacacccacacccacacccactcctactccaaccccaaccccaaccccgacatctgaaatgattgctggatctcagagtctgtcacgggagagcccttgctccaggctagcccagactacacctgtggatagtgctttaggaagtagccgacatacacccattggtactccacattctaactgcagcagtagtgtcccccccagccctgttgaatgcaggaatccgtttgcattcactccaataagctccagtatggcatatcatgacgccagcattgtctcaagtagtcctgtgaaaccgatgcaaagacccatggccacacaccctgacaaaaccaagcttgaatggatgaataatgggtatagtggggttggtaattcatcagtttctggccatggtattctcccaagctatcaggaactagtggaagaccgtttcaggaaacctcatgcttttgctgtgcctggacagtcttatcagtctcaatccagacatcatgacactcattttggtcgtttgactcctgtctctcctgtgcagcatcaaggtgccactgtaaataacaccaacaaacaggagggttttgcagtccctgcccctcttgataataaaggaactaattcatctgccagcagcaacttcagatgccggagtgtgagccctgctgttcatcgccaacgtaatcttagtggaagcaccctctatccagtatctaatatcccacgatctaatgtgaccccctttggaagtccagttaccccagaagttcatgttttcacaaatgttcacacagacgcatgtgccaacaacatagctcaaagaagccaatcagttccattgacagtcatgatgcagacagccttcccaaacgctcttcagaagcaagcaaacagtaaaaaaataaccaatgttttgttgagtaaacttgattccgacaatgatgatgcagtgagaggtttgggaatgaacaacctgccctctaattatacagcccggatgaatctcactcagattttggaaccttccactgtttttcctagtgccaacccacaaaatatgatcgattccagcacttctgtttatgagttccaaacaccatcttacctcaccaaaagtaatagcaccggtcagatcaatttttctcctggagataatcaagcacaatcagaaattggagagcaacaattagatttcaatagcactgttaaagacctgttgagtggagacagcttgcaaaccaaccagcagctggtaggtcagggagcatctgatctcactaatactgcatctgatttctctagcgatatcaggttgtcttctgagctctcaggcagcatcaatgatttgaacactttagacccaaatctactgtttgatccaggtcgtcagcagggacaagatgatgaagctacactggaagaattaaagaatgacccattatttcaacaaatttgcagtgaatccatgaattctatgacttcatcaggttttgaatggatagaaagcaaggaccatcctactgttgaaatgttgggttaaattgtgttttataacatgtagcacactgtatctaaagacatatgtattgtatttgtcttaatggaagtgcctcccgcagcagaaatactattaattgtgacattttaaaagcgtttgctgcagaagtggtttcttcagtaggaaatggttagacttgcctcagttcttaacaagtgtctaaagacagtaggctgtagaagaacaagtattaggttttaaattttataatgtgccccatttattcacattgattgactatccagctgttacaagagcagtcgatctttattttgtgtaagttagtttcatttcatcagatgatctgcacagaactcagaataaaccatcaattttaggtataggctgttttgttgttggcattatcttttagatataaaatcatagctagggtgaactgtagacaagaaagtcttccttgaaacagggataatattcaggttattataaatatttaggcttgaagcatagagctactgtagggtgaaaaatctctgtaggactttctggggcttcagtaccatttacacccacgatgaagggcttaaatagaaaataatggaaaattaaatattactttaaggaaagcaaagctgcactaaaatttttaagggaaaaaaaacaagtagccatttatatttgtgaccttgcattaatatttaaatgttgattttaatatggagctagcacacatagatgcgcaggcacgcacacacaaaacaagcaaatgtaactccaggcatttgtaatttaatataataaatacaagcatgttagaaaaatgctttatgtcttattatttgttaagttaggggaatgagaaggaaaacaaaagcattctcttagtttcatcacaatggctgcatgtacatattgagattctaattgagatttactttgaaatttttcattaaaatattccacaataatcagtttttttcctcttcaattgagtgactgactccctcactcctcctgaatatagtaatgtagtttgatcataggatccctttgaaaaacaggaaggaggataacataaaaaacaacaaaaaacatttcaccacctaaggtctgaagccacaaatctttatatctctgatgaaacaaaggggatatcaatagtacttgaagaagaagagcattttattacttgcttaatttatttattgtgataaccacaattgcaaaagaagaactcaggatttgttttaaaatgtttctctctatggctcccattttgttttgtgaataattatttatgagttgcatgttgacacaaacctactcactggttgaaagctccatttaagtgagtttcaagatcactttcaaagagatttttaaattgccattgtttttaaagctaacataaaaccatttgctatgctaccttgaacctagctaagctttcctttaccttagtaagccaatcagaagactacaatcaatgaatattttgcaaatgtgctgaagggtttaataaggttttgttgttcaataaatttgcaaggtagggtattaacatattttgataaataaatggtgctagagttggcgcagaggtttatatattgatatgtcttagttattggcatttgtgtgtgtttgctgttatcttgatttcatgatttgttaggtatttttttcttgatgctagttatttcttcactgtacattgagacacagcactactgcacaccaaagtatgcaatacccaaaggaaactgtgtgatttctcctgacaaatgatgggagcctttctttatgagatactctgaaaaggagattttgaggccattctaatcccttgtttacattattagcttcctactaatataaaaataatggaaatcttttttgataaaaatattaagactggaggatttttaaccccttgtacagtattgcagcaaactctttaaatttggttgaattcgtccagcaaactttctggggttcatatattgcactaaatttgttgaacctgtggtaggcacatctcttaggataaatgcaaccaatacagtccacagattaaactttttaaatgtgtttcattatgaaaagacaaaatgtcatcaaagtgacagataaaattgtcttatgtagcaatgtgcattgatctcaatgagatatttctattattctcttacatgagaatattacagcaggaagaattaagtttagtttgcttcaccatgttaatacatgatcacaaaatgtgcatgagtgttattgacttatcttgtacagtactaggattcctgtaaccactcttttttttcttcgctgtattgaaactggttcagtgttaaccaggcaagcatagttattcacaggttatttactttatgtttactaattctgcttagttattgttgaatatgttctgttccagattatttttattgttttgatgtttaaaacattttgcatactgtttatcataaaacttcatgaagtaaataattttgcatataattgcaataagcactgacttttgaactgaaaagaaggaaagtgtttttttgtgcagtgcttctgaggttcatataatagtcttgtactataatgtgctttactacacgataaatgacaaaaacaagccctgtttcatgtttcatttagtgcaaaaagtcagatttccccagtgttttgttgtctgttgtacctgctgaaactacagtagttgaatattgcggtagcatttcagttctctttttttattaaagtgctcaaaaattgttttttaaatgttttcaaaaacaattaaaaacattttatattaaactgaaaaaaaaagaaaaaaaaaaa

SEQ ID NO: 24550 - DNA, 5304 bp, Homo Sapiens
gagaccgttggttcatttgcatgtccccgcctcgcgcggcggcggcggcggggcaaaataacatggcagccagacgaattacacaggagactttgatgctgtattacaagaaaaagccaaacgatatcacatggatgccagtggtgaggctgtaagcgaaactcttcagtttaaagctcaagatctcttaagggcagtcccaagatccagagcagagatgtatgatgacgtccacagcgatggcagatactccctcagtggatctgtagctcactctagagatgccggaagagaaggcctgagaagtgacgtatttccagggccttccttcagatcaagcaacccttccatcagtgatgacagctactttcgcaaagaatgtggccgggatctggaattttctcactctgattctcgggaccaggtcattggccaccggaaattggggcatttccgttctcaggactggaaatttgcgctccgtggttcttgggaacaagactttggccatccagtttctcaagagtcctcttggtcacaggagtatagttttggtccctctgcagttttgggggactttggatcttccaggctgattgagaaagagtgtttggagaaggagagtcgggattatgacgtggaccatcctggggaggctgactctgtgcttaggggcagcagtcaagtccaggccagaggtcgagctctaaacatcgttgaccaggaaggttccctcctaggaaagggggagactcagggcctgctcacagctaaggggggtgttgggaaacttgtcacattgagaaatgtgagcacaaaaaaaatacccaccgtgaatcgtattactcccaaaactcagggcactaaccaaatccagaaaaacactccaagtcctgatgtgaccctggggacaaacccagggacagaagatatccagttccccattcagaagatccctctggggctggatctgaagaatcttcggctccccagaagaaagatgagcttgacatcatagataagtctgatgtttttcaagatttgggatagaaataatcaaatgggcaggattccacaccataaaagatgatattaactttcccaacttttccagactctctttgaacttgaaacagaaacctgtgctaaaatgcttgcctcattcaaatgttccttaaaaccagagtacagagatttttgcttttttactatcaaatttttaaagcactctgctttgaaaacacccagagttgataatgagtttttaaacatgcttttagacaaaggtgctgtgaagaccaaaaattgcttttttgaaatcataaagccttttgacaagtacataatgagacttcaagaccggcttctgaagagtgtcacacctttgcttatggcctgcaatgcctacgagctaagtgtcaagatgaagaccctcagtaaccccctggacttggctcttgccctagaaaccaccaactctctctgccggaagtctttggcccttttgggacagacattttccttggcctcttctttccggcaggagaaaatcttagaagctgtcggcctgcaagatatagctccctcacctgctgcgtttccaaacttcgaagactccactttgtttgggcgagagtacatagaccacctgaaggcctggctagtcagcagcggatgtcccctccaggttaagaaagccgaaccagagccgatgcgagaggaggagaaaatgattcctcctacgaaacctgaaattcaggccaaggctccaagtagtctgagtgatgctgtcccccagcgagcagatcacagggtagtgggcaccatcgaccagcttgtgaaacgtgtcatcgaaggcagcctgtctcccaaagagagaactcttctcaaagaggaccctgcttactggtttttgtctgatgaaaatagtctggagtataaatattacaagctgaagttggcagaaatgcagcggatgagcgagaacttgcgaggagccgaccagaagccgacctcagcagactgtgcagtgagggccatgctgtactcccgggctgtccgcaacctcaagaagaaactccttccgtggcagcggcgggggctcctccgtgctcaagggctccgggactggaaggcgaggagagcgaccaccgggacccagaccctcctatcctcaggcaccaggctgaaacaccacggccggcaggctccaggcctctcacaggcaaaaccatccctgccagacagaaatgatgctgccaaggactgcccgccagacccagttggaccttctcctcaggaccccagcttagaagcctcaggcccatcccccaagccagcaggagtggacatctctgaagcacctcagacctcttctccctgcccatctgctgacattgacatgaagacaatggagactgcagagaaactggctagatttgttgctcaggtgggaccagagatcgaacaattcagcatagaaaacagcaccgataaccctgacctgtggtttctacatgaccaaaatagttctgctttcaaattctatcgaaagaaagtgtttgaactatgtccatcaatttgtttcacgtcatctccgcacaaccttcacactggtggtggtgacaccacgggttctcaggagagccccgtggacctcatggaaggggaagcagagtttgaagacgagccccctccgcgggaggctgagctggagagcccagaggtgatgcccgaggaggaggacgaggacgatgaggatgggggagaggaggcccccgctcctggaggggcgggcaagtctgagggcagcacccctgccgacggccttcccggcgaggctgccgaggacgacctggctggagcacctgccttgtcacaggcctcctcaggtacctgcttccctcggaagaggatcagcagcaagtcattgaaggttggcatgattccagctcccaagagagtgtgtctcatccaggagccaaaagtccatgaaccagttcgaattgcctatgacaggcctcggggtcgtcccatgtccaaaaagaagaaacccaaggacttggacttcgcccagcagaagctgaccgataagaacctgggcttccagatgctgcagaagatgggctggaaggagggccatggcctgggctccctcggaaagggcatcagggagccggtcagcgtgggaaccccctcggaaggggaagggttgggtgctgacgggcaggagcacaaagaagacacattcgatgtgttccgacagaggatgatgcagatgtacagacacaagcgggccaacaaataggtatgttcacaggccagtgtgtaaggccgtctgccctcgctggcgtgctggtatgcagagaaatttcccccaacaaagttgatgttccctgctcccccaaaaatgccacacacaaaaaaaatcacaaaattctgtgaggggaacaaaagggtctatggatgtggatatgccccattcttaccttccaggtttgctgaaggagcaaacctcacactggccaagggcagatgcgcatggcctgcctggtgccccggctgtgagcccctcaaggcctccaggccagcctccgtggatgtgcgtgtggaaataggccacgcctgtctcttctcttgctcaagttttctctcacagatgacagccacctaccacataacatgaccagcaaacggactgttcctagtccagagggccttgccatcatgcaagtggaagggcgactgtgacagccactgccacagaggatggcagttggctgtgtccctttgtgagggtcttcaaatccttttccttctgcagggccttgggcctgtaaatatcctcatctttctattctttttttttttttagttgccccctcacctaatttccacctcagttttgaacaaaatcgttctcttcctgaatagatcaaaaccactgatgtgaaagataagccttgaagcagcaattgcccttaaaacatcatccctgccctggatcggcctggagccagtgcccaagtacggtttggtgtgtacatgaaaacaaacgtctctgcagtctctggggcggaggtttcgctggcttttctttctctcaaagaaaaaaacatgcaccattttcaatgtgcttttgcctctcctctctgttcacatgcttttagcagcaagtcccctccaaatctgtcttggttccccttcagaaggtggcgctgcccccgaaaggcacctcagcctgtgagtgctgaggaaccagctcctctggctgattttccagttggactggccattgctctccagaagtgctctgttagcaaacgtgatgtggaaacgatcacagatggtgttttctcgttgttcgccagaatttatacgggggagacaaattcccggtaattaccaagtctgcactcgggtaccaaggctctgaagctctctgaacagttgccatacttgagttgatgaatgtgttattcatggtgtctcatctcatcaatgcatcttgagagacttaatgaaattttagcaacagtatagaatagctctatcgggtggggagtaatcattaaacagatgaaatcggccccagatttacatgtctctttagaatccacagtgtaagcaaactacagttacaaagggatgggggttgtaaaccctctgagactctgcacttttcgcacgtatggcatcgtcaagtgctgtcttattacagcctttgtaaggagaggcaggctcctcctgggattacaggcgtgagccaccacgcccagctgtggcttgcaattttaagaccaagagagcccctggcaaactggggcaagaaaggataaggagcccaaatgacagctagccagaactttcatgtctacaaaggagaaaagtgatgctcaaagttgtgatctgccaagagtcgccagtgatatagtttggatgtgtgttccctccgaatcacatgctgaaatgtgatccccaaggttagaggtggggcctggtaggaagtgtttgggtcatggaggtggattccttgtgaatggtttgatgctgttctcatgttaatgagtgagttctcgctctgagttcatgcaagacctggttattaaaaagagtcgggttcccctcccaattccacctctcttgctccctctcgccacatatgctggctccccttcaccttctgccatgattggaagcttcctgaagccctcaccagaagcaaatgccaacactatgcttcgtgtacagccttccgaactgtgagccaaataaacctcttttctttgtaaaaaaaaaaaaaaa

SEQ ID NO: 24551 - DNA, 4572 bp, Homo Sapiens
ttcctgtgctggatcctgggcggcctgagggcccgcgggccagcaccatggaggacgtgaagctggagttcccttcccttccacagtgcaaggaagacgccgaggagtggacctaccctatgagacgagagatgcaggaaattttacctggattgttcttaggcccatattcatctgctatgaaaagcaagctacctgtactacagaaacatggaataacccatataatatgcatacgacaaaatattgaagcaaactttattaaaccaaactttcagcagttatttagatatttagtcctggatattgcagataatccagttgaaaatataatacgttttttccctatgactaaggaatttattgatgggagcttacaaatgggaggaaaagttcttgtgcatggaaatgcagggatctccagaagtgcagcctttgttattgcatacattatggaaacatttggaatgaagtacagagatgcttttgcttatgttcaagaaagaagattttgtattaatcctaatgctggatttgtccatcaacttcaggaatatgaagccatctacctagcaaaattaacaatacagatgatgtcaccactccagatagaaaggtcattatctgttcattctggtaccacaggcagtttgaagagaacacatgaagaagaggatgattttggaaccatgcaagtggcgactgcacagaatggctgacttgaagagcaacatcatagagtgtgaatttctatttgggaaggagaaaatacaagagaaaattataatgtaaaatggtaaaaacataagtagttttttttttcaattacatgttgcttccagacatacttctctgcaacttgttgagcaacattttaagatgttggacttctgcaatagatgacactgatggttttactccttttttaaaaacacatgcgcgcgcacacacacatgctttacaagttttattataaaccaagaattttggacttgcaaagaggtattattgcaataatgcacttttcatacttgaaatttatttgtatgatataaagttattactttaaacaaaatgcaagtatggggggattgtttataaagtttgggtaatttataacaaaatttgctaaggttagctaaaaattcatttttctgttctatatattacatttttaacataattttacagttcaattttatgatggagcctcttacagaaacattaacaaaatgcaggaatctgccacatttcttttttagtataacttaatagcttaattaccattttattttttatacttcttccattattaatctttaaatcatgatcctaattagctgtccttactttaacttgatctaattattgcttcctttcttattactttcctaatttttctatattttaaaaactacagtttccatgataaaaggaaaacgttttgatttatagtaccaagtgcttaaacacaaggatagtgttagattttcgagtgactttcctttttgcattttttggcagtaaaagccaaacgttgtatttgttcttttcagagttgtccagcccttttttcctttgtccaaaatgattctaaatagaatctaataaaccaatgtagcattatttttttctaaatgaagccccaaaaaagaaaagtgccttgcatcatttaaaaaaaataattaaatcctcatggcctctaaattagtatgtagaacactgaaaagttcttaacatttttgtgtaatttcctttctttttaaaccataaattagtttaaactgaaagtacggggctggaagaaatattagtaaattatttggaatatagaatgtttactctttctttttatgttgtcttaatgattctgtgagattgttccggctcaaacagaagcttttctttggggaaggtgatttgtgggagactctagtgtattttaaattagcattttaatccattcttgacattcagttagtccagatctgccccataatttgctttagtaaagtcactttatggatttttggctatgttttagtttgtgtgtataaaagttctaagaaaacatttttgctattttaagtatgtaagggaagagaggagtgtttttaactttttatagttgatgactttagggtagcacaaacaaaactcctttgtatctaacttttctcaatcctctcttgaggtgctttactaatgggaatgatttctgtatgttcccttggtaccaagaggtactatgcaaagtaacctattacaccaagttacttgctttgctttcctctctatgatgtgataatacagtaaaagctttcttacccagcatagtgggagagtggagattaattaaaattgttaattaagagttaattcctattgacccaggtgatatttcccttctgatttccctccccttcccttctcttatcttaccactgtgaaaacagcatattgttaatctcgttgtcgtccagtattctgctttgtgattaggtcttttgatgtacagtggtctagtggagtcaagattcgcattgggttttctaaaattccagttgataaaagttccagataacacagctttcctgtatatagatcactattgggcaggtcagcaaagatctcttacagtgtaataataatctatgatgcttcatttagcagaaactctgcttaaaagaatcttcataatagtaagtttaggttttaaaaacttgtttcataaatatacatatatcctctctagtagtctggccaaaagaacagattttgttattgataatttgtagctggtaattttccacattttctatccactgtaatttttatgttgtcactgaagtgcctgcccagtactgtatattacagtctctcacaaacactgggaaaagggactgtcatcatcttgagtactctgtgtgtatatatatatatatatatagatagatagatttttttttttttttgagacagagtctctaatgtcacccaggctggagtacagtggcacaatcttggctcactgcaacctccacctcctgggttcaagtgattttcctgcctcagcctcccaagtagctggggttagaggcacatgccaccatgcctggctaatttttgtagttttagtagagatggggtttcaccatgttggccaggctggtctcaaactcctgacctcaagtgatccacccacctcggcctcccaaagtgctgggattacaggcgtgagccactgcgcctggctgagtacaatattaatgtagacaaaccatgaagtttattatttcatataagaacattacaggtttgttttttcttgcatgtctgtccacctaatgtttaagtagttctggtagctcttcctattctttattctatttgattccatttctgtgattcttttattaccactgatgttttgtgatagttaactatgataaatttaactgatcatgatttatcttctagagtatttaaataatgtatgagtgaccacccaattccaacattaaaagtgtaatctgggcccataatttatagtgaaattgtatcaaaacatagggaaactgtattactgtccattttgaaaatatgaaacttgagtattgaaaatattcaaacatggaatggcagtattctaatttcagttagttggttcatgttaatttcttacctgttagatgtttaaactgcagtgacctttacttgtatctactctgtggtggaaatgttaaaccatgatagcttttgctaccaactcaaccacttaacttttagagcagttttggggagagtttatgcttcatctgagtttagaagtaatgtcagaaaatgttaagcatgtctgtattaagaaaatataaggtttctaattgtcttattaatatggtaattcaagtgaattagaaatatttaactgcaatcttgaattataaagttgagatatatatatatatgtatcaagatctcaacttgatgtaaagtaaatgagcagttacctggcggatttttttttaaataactgatttaatccataatcccataacaaacatagcttcacctcagtattttctttctttctttgttcaacagtgctccgataagggaatgctagaaaatagatgagaagtactgaaagaccttttttttttaattgattagaaaagtaagtctctagggtctttgaatgctggaatttttttttttttttttgtctttcccatctgtggcagctaaaacaaaaatcactcaaaatattcaggtttacatgttagctctctctcatagggagctgccatacctcacagttcaaagtgtattctatagatcagtaacattatactgacatgtaattgcaatttactatgcagcaaaaatgattcaagaagaaaaataacctacagtgtctgtatacctttgtatacacaattgcttaagttactctgcttttaacatttgtacttggataaaatgcttatgtctgtataggaatgtcacagtgcaagatgctgctagcccaggcacaaagtattaaaattattttgtaaaaaaaaaaaaaaa

SEQ ID NO: 24552 - DNA, 4162 bp, Homo Sapiens
ggaatataatttccccaagagaatttgttgatttctcctatactgtgggctataaagaagggcttttatcttgtggaataagtcttgactgggatgaaaagagaccagaatttgttcgaggatataaccatccctgtggttggttttgtgttccacttaaagacaacccaaaccagagtcttttgacaggatatattcagacagatctgcgtgggatgattcctcagtctgcggtagatacagccatggcaagcactttaaccaacttctatggtgatttacgaaaagctttatgagaggcaaaatacattcaaacttgtagtactacagatcaactctctcagctacatggcctgtaaaaatcattgattccacttttctgcatagccggtagaaaaatttgaaatgtttttggttcactagtacaatgtttggttttattcctaaagtaaatagctatctaagagagggcattttcacttttttttttttaaattttgagacaggctctcactctgttgcccatgctggagggcagtggtatgatcacagctcactgcagctttgatctgaccgctcaaggggttattctacctcagcctcctgaatagctgggaatacaggtgcacgccactatgcatggctaatttttgtttaattttttgtagagatgtggtcacactgtgttgcccaggctggtcttgaactcctggcctcaagtcattccccaccttagcctcccaaagtgttgggattataagcgtgagccaccatgcctggccccaatttaaaatgtggaattcagttggtgtccaagacttatcttgagactcttaaaagcatcagtctgtaactagaacaaatacggtcttagatttacccaagtgcctagatatcattttataatgattagaattgagtattgtgggtcccctaattctgtgggtgccttaagtgagaatttctaaatgattttcacattctaaatgactttgggttttgaactctccatctagtttacttctaaaatgggaacttgaggcaattcaggtatccaggcaaatctttgtatatatttttttgtgtacatgcacacatctcgaaatccatttccgtgtttaatgttagttgtttatgtgttagtattcctgtgtctactgttttgttgttgttaatatgggtaaagtgagccctgaaatacatgctaaacaagacatgaaatgcagaaaggtacatagtgtttcaagtgcatggtagtttgatctgtgttttactttattgtgttttcttgagtgtaaagaaagaataaatcaaagttcttcatacccattttgacaaagtggaacagtggagctgttttttgcttttgtttttatttattttttgccactggtgatgatagatttcaaaaaacaaaaggtggcagcagcacaatgttcatggtgaattatctcatagtatctagattgatcaagatctgacagaaggaatgcacaaaggattctatattcttaatgatttattaattaccaggatccttttctaaattgaatgtacttttgaattactaggtttcttctttttttttgttctgcaatagtgaaagaaaactcagtagtttagtttcagtttctcatggaaattggtaaatgttagttttgacttcatctattttttatttgtttttattagcgtagagtaggaagtctcatattctactgttctatctaggatggtgaaattccaaaggtgcctaacttgagtaagggatttgtgacaagatagtacacattactataagggctattatttcctgaactggatgtccctaaaagcaaataaactgcccactatctctactctagtgctctctttgtccttatcaacatatacctccaataagtaattacataattcaccgttaaacatggacccactctaggtaattaccctcatggaaacattttcactgtgagaatgatgaattttaaaattatgtttgaatcacctaaaatgtatgtgcagcttctagatggccccttagatctgctgggctctagctgtgtactttaaaaaaacaaaaacagctttattgatatataatttacatattatgtaatttacccacttttaagtatctaattcagtgatgttttaatacatatgtagaactatgcagctatcagcacaatctggatttagaacgtttccatcatttcaaaagattccttttgtcttttttgcagactcatacctaacacaaatctaaagtttatcactgttgccaggataattacagcaggttatgtttggtttcatttttaagagtggaggtgttcatgattctaagctcaggaatcttgtgatcatgtattaaatatgttatctcatactataatgataaaaaagcttaatgatgtgggttgggatggatattaacataaataattgagtccgctgcttctatagcaatgctgtaggatagaacaataatgtaagtgatatatgtaattaaaaaattctagaagccacattaaaaaataaaaataaacagctgaagttaattttaatattttatttaactcaatacatccaaaatgttatcattttaacatgtaattgatgtaaagatttattctgatagtttgtactatttcttgtactaattttttgaaatctggtatgcattttacaaatttgggcaaaccacattttaagtgctcattagccacatgaggccagtggatactgtgttgaatagcacagtcctatagcatatttattaatttgtcttgtagtaagatgaaatagacaataatacggaataatatcttaaatggaaatctttgttagtctctagagccttcattgcttgataaataggacatctaaactttagatataaatcagttgtcaatgagataaaattattgccagcaaatattttccttcaaagataagtaacttttgatatggcagttggtgaaatgaaagaatataatctgccttcttgttaaatggttgactattctgtagcttgtaggtagtacgtattagaaacttgtgtatgtgggaaatatttggcataatactgttttcagtatatagtagcttttttttaaggaaattagtttcatacaagaaaaagattattataaaagtgatacttttgcatgaaatattagtttgtgttgataactcttagttaacccttaaagcttaaaacagtactcaaaaaaaaataatgagaatctagtattctgtagttaactaatctataagataaattgctaaagtactagggagcttgtaaatcttaaaaatctttttatttcagtgttcattcaggttggatatatttgaaattgtagatttctatctgtacaacatctcctagttaatagaatttttttccttcccctcccttctctctcctcctccttttctaaccaaagggcattttatcaacaatcatgctgaattcaattaatatctcaagctaaaaaactatgtaattgaggttgtatctggagaagatgggaaaacattgtataatttaagcccttaattgtctgttgagcttttagggctgagtaattgcctttcatacaaataaaagctttaactcttttctcaagagtgtaccaccgtccttagaatcaggtgttttaaatccagtttcttttaattaaatgggactgtagtgatccctaccctgtagagaaatcaacagaactagagaagctaagggcttgatcaggtttcccctagaacctgtgttgcctgcctgctgtatcttccatgtctttcttattcaacttctagaagtagagaaggttgggacttgagtgtagaagaaacatcagaataatttcaaaaaacaggaagttggaactataatttttaaattattgtattgtttttacggattttacatgtatagttaaatattaaaattcatctcttgcagttcaataaaagctatagtatagattttatttttaagaagtttatataattcttttgtgagccaatatgtaaaactagaatatttattaaactaataatatgtattagtatcaataaaatatgtatttatttttaaattggtatgaaacaaaataaaaatttgtagacactcttaaaaaaaaaaaaaaaaaaa

SEQ ID NO: 24553 - DNA, 4952 bp, Homo Sapiens
catgctgatagataggaatttgtgcttacaaagcaggagaattaaaaagacgctttcctctcctcttccctcctgtcttctccgttctttttacaatcatcttacacgcacagcctgagacagctggcatagtttttggaattatagtattgatatttccaaacgtgctctcagacagtggataataaacacctcattaggaaaccgatctcagaatgaactctggagtatgaaaaagatcatttctttttgttcctgtaacctagcattccttctaggcttcttctcctttaattggaccacagcttagctcatgtattcttttattaacaccctgctctcatgtccataagattcaggaatttaggacccagggacagaaaagtgaataagccagtgaccagatttcccccagatgtcttgaggattagaagtacaaattgttgacagccattaaagagggtgaggaagggaaaaggaatattagaagatctggtatttcttacttttttcttgcctcagaaagtacaaagtttaaaaaatagaataaagaatctgctggggaaagatagagtaccaggtcctaggtcagtagtccctggaagttttggtgatgaggacatggaagggcaggcagaggcactttgtacttgctccaaagccataggaattttcatcttccagagcctttatgagtcacttctctatccacagtcttgagcctgtggctatcccgctgagcttctcactgtcctccaaaaacaccccgctgagcacccggaccactttgtacacattaacactacaggacataaaatgcagaggccctgagattgctgccctcccatattggaaggagggtctgcgatggcaagggtcttctatatcaccagaaagagtcgcgcagtgagtcactgccgttgccatctggctgtaattttctatgttatcaaggtaggagggagtgtttctcttctagctgttagatagaactgataaaagcaagtgtcctacagcatttcccaaatgaaggcattaggaaatagaaaagcacggtctttttggctccctggtctagtcacattggtactagggtgacctttcacccaagggacagctgctaaagggagtaattcagagacatggagcttctggttatgggtttgttttgggtttgtttttaactcctgcctccacacatgttcttgactgataactgactcatgtccctgaattaaaatgactgacctatgacagcatcaagcattctttgtaagcagagtgatatatctgagagggcgttgacctgttgtgtagaatacatatcctttcccccttcagaatcctgtctcgcctcgtaactgggagagaggctgtgcctgaaactaggggcgatgtcaaggaagctagaggcctcgatgcaattattactgactctggggaggaagacagagaataaggggacaccaactgcccagtccactggccatttttaagggtccccccaccccaagccaaagtttggtttgttgctgttaagacaatttttgttgtatgtatataaatattttagttagaggagcggggaatgggatgcgggctttcacagttctagggaatgggggcagggaggattttgcttttgcttttgctttgagggagaactttagctgactaaaaaaacagaagtttggggtcatgatcacaaaggggccattcccaaaagatggcaagccacgtattcagtggagactaggccaaattctaaatggttttatccatagcaggggagaataggagaatgagtttaagagtttttctcttcttttttcctagaaagaggtaaggataatgggaaaggtagagaaggcggctcccacagaccttttaagaggggcagaatcttgagcttgaggcaccttgagtgcatctcagttcagctggtttctggctgaggcctccaaaggcaagctctgtgctttccagtggtttctgctgcatttccagggatggtgtttaacaccgcttcctccagctcccttttctaagaaagaataaatggagttctgctttttatgaaagggtctttggttttcagtgtcaacactgagaattggggctcttgcaagcatctggatttcacagtatcaacctccccgtcaccttttgaactttgagactccgtacggtcaacttcaccagaggcaggttgctcgaagccgcactgcttgtctgttcctgactctggttctcactgtattaaaaaagagagtcagaggagtctggcatttcgtgagtttgttagaggatgctggctgataattccagaaaacttactgatgctaaatcacagtacatgcatgattctttttcagctttactatagtgcatgacctggactttctgtactcttggaagctgggctccttaaaggaggcctctagtgaacacctttatctccatgtccctcttagagcccagagagctgcccataggcattttccagaattcctcatgtcacctagttcaatttccattaactcagatcagccattgtgattcaccatttgtcaggctctcaggtttaacaaaacctactatcaccatcatccttcaacagccacagtctgaattgagccaacatttttttttctttgagaaagaagtggactggggcacaacttttagtctgaggggagctagtggaaatctagacaatagaagtcatcgatagcagcttttcctcaaatgtgtgactcctcaggggctaaactgctcttagcttagaattatgctttactagagatctagcagataagtgggttaatcactaccatcctgtaactagttatatagcttccagacatgagggagacatcaaacagggatggaagcaaccccaaggatatgcaggaagggcatgatgaacccccttccctctggcaggggaacaaggccaaccaagggacagactggaaagcacttagatgtttaaggaggagaaaggggaagctttgaccagtccttgccttttgccaagttcagccagttctccgctgcttgcaacctctagcgcagtaacatttgcagaattgcagattttcccccagatactaggaggaaagggactttggggggtggggaaggggtcgtggtgttttaaaagcataagttacctgtttgcactgttttaagataggaagaaaaaatagtgggcaaggtgaacatcagacgtaaatttgtgtgtttttattttgtcatgctcttgaaaatgtttgaccatttgtagtatacacagtgaaacttgattctctgttgcataaaacactatatttttttggaaatgttactgtccaaaagcctcttccctccctttccttttcctatgtacttccttcatacttgctttactgatcagccaggcaatagccatccaagagctagagcatgaaacagggccctttccaagtaggctctgggtgtcctaagccagcgtgtgccctctggtttagtgagtgtaatagagtccctggcacctttctttgcaaatgaggctaacagaccagactgcagcaagttatcagattcctcaatcagatgcactaggagtgaggagcccagggatggagggggttcctgaagtattgcagttggctgtagtagctgagttcttttccatgttaccgaaactgtagccagttacagtttactcaggaaaacggtagatcaattcagccatggtagtgctggttggcagggattggtaacggagagaactgctcatcagccaaaactcaagccttgccttttaggaggccaccagcagagggacttggtcctccttgtctggtacttgtgtacatgccggtgacctgaggactccactcacactggcgagcaaaaagggagcagtgattctcttttctctccccaccccctgccctttgttaccaacaccagtttcccagggggtacatgagtttctgaatttttaaaaaatgtttttggtttggtttttctggggactgataagtgctttaagcaatgtccataccccgtcaagactcccagcttagtcattttcttgtatttttctgttcacagtatttgtgtgtgtgcttgttttggcagctcattttggctgtattatatactgagtgatgaattgatcctcttttttccctaagggatatgaattgtttttcttgtgttatattctgcttgtgaatagctggagcaaacctggggctgacacgcgtaagctagggctgcaaagcgagaagagagccggtggagtgtacttgtccctgacaggctgacctacctgagtctctgagcttttcagtccaaatctttgcaaggctcaaaatgccacagaacctctcctcttctccccactccccatggcagggaccggaccatccctacatgcaacatgctgttcctccagcccctcccattgccatggcaaaacaggtacctttggggcatgggggcattacatgggatgcttgtgtaatcgaccacctagccttctctctcccctcccgtcctcccccagaatcacttcctaggacacccgagctgcttgcccagggtcctgtttccctgctaactccagagaagcatcccagggctttgtgacagtctctaattcccttcccttctcgttaagaatcatattgtatagtagctttcagaccatacagtattcattgggttactcctattattatcaagtagctggaattgtgaaggtcggagtagttagatctttagcttttattccttatttttttgtgttactctccatgtgtataaattattgatcatgttgctggcttttataaactctaagcgaaggaggagcactgcctcagcctttgcacatggtaatgaagcactgtttttaaataaaagagagaaacaccaaaaaaaaaaaaaaaaaaaaa

SEQ ID NO: 24554 - DNA, 5803 bp, Homo Sapiens
gggggccactggctccgggcccagggttatgccaaccccttctggctggccttggccttgctgatagccatgactctctatgcagctttctgctttggtgagaccttaaaggagccaaagtccacccggctcttcacgttccgtcaccaccgatccattgtccagctctatgtggctcccgccccagagaagtccaggaaacatttagccctctactcactggccatcttcgtggtgatcactgtgcactttggggcccaggacatcttaaccctttatgaactaagcacacccctctgctgggactccaaactaatcggctatggttctgcagctcagcatctcccctacctcaccagcctgctggccctgaagctcctgcagtactgcctggccgatgcctgggtagctgagatcggcctggccttcaacatcctggggatggtggtctttgcctttgccactatcacgcctctcatgttcacaggatatgggttgcttttcctgtcattagtcatcacacctgtcatccgggctaaactctccaagctggtgagagagacagagcagggtgctctcttttctgctgtggcctgtgtgaatagcctggccatgctgacggcctccggcatcttcaactcactctacccagccactctgaactttatgaaggggttccccttcctcctgggagctggcctcctgctcatcccggctgttctgattgggatgctggaaaaggctgatcctcacctcgagttccagcagtttccccagagcccctgatctgcctggaccagaagacagagggcaagaggagcaaagtgaacaccaagcaactggaggtctgcagctggaagcccagcccacagcaggacaagcaactcttgtctaagggcagtgctctctttggacgaggtagtcaagagagaccaaggcaccaccccatccacagctgacccagcctctgtctaggatctagaatcataacccacacaggcccactgcaggacaggtggcagaggagctatttgggacaggagtcagttctccctttctgctatccatcacttataaccccacaggccagaggagaggtcctgagagaggtgacacttcagggaccagaggcagcacgagggctggcatctctccttccagcccaaactgcacagccccaaccaggctcccaacacgtgtagcagtcatcagccattccttaacaatgaatgtggtacctggttagtgccagccttgggaaggagggagggaggtaagaggggcttggtgatctctggaggaagagtgttgcctttgctgtggttggggaatcgatccttggctatggcctacccactcccctggctgaagagtgccaatcattacaaatcagcttcagcaaactgaaacaaaccttctggtgccttgggctttggggccctctgttttcctgctcccagtctgcctgccatacgttagacaacagaagctgctgggctgggcaggagccctgagctgcctggtggattggtaccaagtggggccagccagggcttctactgactcgctgtgcaaccttgagcaagccccactaggaacggctagatcagcaatgccccaaattgttgaatcgtggtgatcacatttggatggacaagttaggaaacttagctgattctctgggatacttcccacttcctcatacattctacaatgagatgcctctcttcatgggcctggggaaaggatgaatgagtgtggctggacttttgacctttaatgtccctgagcagttcttggcccttggggagaagtagggggaggatctggctgactcagccccaaccgaggggtagcatctgcagcccagccaagcagaacaccctggccctacagacctgtgtctgagcaggctttggaggaaaggccacttctgagtcctctgtctcaggagaagccaggcctaggtgcttgacctggtgatctgagctgtgtttgtcctagtatgggtggcagtcacctctgaacacactggccttggcttagaggaggcttgtgacttcagctgttccagctggggctgggtgctggactctgattcccccagagagacagaagatcgggcagaggtcaaccagaaggccacacagggcagtggacaacagtggagggtataccaaatagaaataaaacgcaggaaacctctctgaatactgcccttggggacctcaggagggagtgggactgattggagacaaagagccagaaatcatcccctggagatactcagacactgtattgttattggcgctgtcctgtgagggcagtgtccaggctgccctgcttgtcatatccatgccctggctctggccccggtgagcacttgtgctgcatgaggaaaggaggatcaggtggggtcaaaaccaaagcatcgaggctggcactggccaagacagactctggcagggaggggagtggaaggaaggagccccaaacctggagtgagacctttgactttctgatgatgtggccaagaactaggagtcacctggccagcacagccaagagtggggctgggggcgcagccagcttaaggtgtcaacacctggcccttgcggggaaagagccttcagcagcccccacggcctggagcctgggtttattggagggtgctttcttaccctctgaacccagtggaggagggggcaatgggatattcctgctctgtatggcctctgggtcagctttttgttgcaaaatcctatcccccgctgctagattctttgaagcaagggagaagcaatagcccagcctcagaatgattctcaggaaagcaattccaccgccagtggactgggtgccaggaggcctaggtctggatctggggctgccactaatgacaggaaagtgggcttatcctcaacctttctgagcctcagtgtcattatctgtaaaatggggatgataataccaggtagagttgctctgatgactggagaccatggagcggagtgtttaggaaatggcaaggatttgtgagggcttcgtgctttagagatttgctacccttaaccaccagcatcagctcacctgggaatctgtaagaaatgcagagtcctaggccccaccccagatctcctgattttaacaacattcccaggtgacttggatgcatgttaaagttggagaagctgccctaaagtgacaaccctttgccttttcaggactttgcctctttccacagagctgcaggttctgtctaggctgcttttactgccatgggggctgcctggtcccgagtaagcagtgggtagccctggatggctgaggggctggggaagccagctgggccaagaaccaggaaggagcctgaggcacagcaccaaggcatggggtagggtgggctttgaggcacggcctccccatgcccagacccaggcccaaacaggaggctcctgtgcaccagcaagtgcagcaaagctggctgcagtgacaaggaagtcagagggagggctggtttgcctcaaccctagccctggatgtggcaaaagataccacaccgaaggaagctgtaggggatctgggacttagtcaggctagctaagggcactgagtgattacagggcaaggccacagagcggcaggaagttgtaagtgcaggggccaggcacagtctgagtggagagccatgatggcactcatccctggctggctcctgggcccaggcccttgctcagaatacagtgcccaggcccgcctgggcattgccttaattcctgtctgaggctgccttccttcatcctcctcaagctgactgctatcagcaggagaagggaatgcgaaccacccccaccccaactccagtgtctccagaactgagcagggaccctccccatgacggagacagacaacccaatggcagggcctgggggagttctaacctcccgtgcccaagcctgacttcccttccctctccagatactgaggaaagtgggttggaggtgggccatgagggtgggggacagggggagggagagccatttcctaagaagagcccaggttgtctcagcccagggagactggtttcaggagctgttccttcagaaaggacgatggaaatggaagtcacagcagggctggggaactggggactggttaggttggacccatgggtgcagcaccctccaaactggtgtcagagcctgcagatgagtcccgggaggagcggccctgcaggaagcggaatgatcttctcaatggtggcctcctggtattcgtgggaccacctgtgggcacaggagccaatgtggttcagacagctgggcagaggagctgctagtcagctgtttgcccacactctgcctgtcatggtgatttgtaccctacccccctggtcccagggccctggggctcacttgataccgttgaaagtaagcacagcctgcatgtcctcaggcaggacctggggctcaggccactcgaagccatcaatgatgggcacaatgttcttgccgcagcttaaagcagtcacaatctcctggagaaagaaaggaaaggaggaagatacccctgtacccatctagggacccttgtagccaggcaggtgctgggaggcccactggcccgaggccgggcccagggcaggacaccagtcctgatgtccaccttgatgtctaccttaacccttgtagtgtaataaaaaataaatatttttcctttgcccagagttcctggcacagagctgctaaaacccttggaatctcttgagtgatgagtgtctttgtatgctaaagagatgattccccactgggggccccgggggtgctatgggggtagcctagatagtttcaggaagagggctggtcaccagggagaccagggcatgactagaggattggaactttcagccccacctcccagcctccagagaggtgctggagattgagttcaatcaccaatggctaatgatttaatcaatcatgcctacataatggaacctccataaaaacccccaaacaaggggttttgaagagcctccaggttgataaacaggtgtaggtgctgggaaggtggtagaaggcatggcatccacacctccaccctccatacgtagagatcctatgtatctcttccatttggctattcttgagctgtgtcctttataactgtgaaattaaataattcagctgggcatggtgggtcacgcctgtaatcccaacactttgggaggctgaggcaggaggatcacttgagcccaggattttgagattaataatattatttattactattattcaagctttgttaaatcaaacctaaagctcttggaactttaagttattctgagccttgacaggaattggtctctgcagcctgagtcatggggcatgcagctgcaacttccacctattttttttttttctgtaattacttaggaagaccaaatggcaccagagataagactcccttagatccccacttagatcaccaccctttctcagggggtaataaagtcatcttccttggaatgtagcaatctatagccaatcaaagcactgtaacatacgcactggttttgtatggaaaatgttgtaatcctgctaaaattcctctctctttgcctgtggaagtgaaaccttaacttctccagtttggaatgctcaccccatgcctttggagtcaatgcttactgggtggctattctcaaactttgcactcaaagaaactctatacttagtcttattttctgaatctcattatttaaggttgacataataaacaactaatagtaagtaaaaaaaaa

SEQ ID NO: 24555 - DNA, 6213 bp, Homo Sapiens
ggtagttctgcgcgttcacgtccccgatcgggccgtgtccgccgcggccctgcgaggtccgagggacacattctgatgaaggaaagagcgtccctgtgcagctgcgtgtccttcagttctttggctctgattccgtgtctggcttcatctaagtggcctggtccatgggcagtgaagaaatgtaaagtgcaatagccctctggaacaagacaattcatgtgagataagaaagaagagcccacaagaccaaggatgtattctcagtttaccgaccactgaccagaggccactccagggtgtcaggactaagagaagtcacaaaacagcagatttcccaagagcagcggaaaatgatccagtcacagatatcatttgaggatgtggctgtggatttcacgctggaggaatggcagctacttaatcctactcagaagaacttgtacagagatgtgatgttggagaactatagcaatctggttttcttggaagtctggctagataatcccaaaatgtggctccgagataatcaagacaaccttaaaagtatggagagaggccataaatatgatgtttttggaaaaatatttaattcaagcataaacattgttcatgtaggactgcgatcccataaatgtggcacaggagaaaaaagtttgaaatgtccttttgatttgcttattccaaaaaataattgtgaaagaaagaaaattgatgaactcaataagaaattattgttctgtatcaaacctggcagaacccatggtgggataaaatactgtgattgcagtacatgtagaaaatccagcaacgaagagccatggctcactgctaatcacataacacacacaggagtctatttatgcatggaatgtggcagattttttaacaagaagtcacaacttgttatacaccagagaactcatacaggagagaagccctatcaatgcagtgagtgtggaaaagccttttcacagaagtcactgctcacggttcatcaaagaactcactcaggagaaaaaccgcatgggtgcagcgaatgtcagaaagcttttagtaggaagtcactcctcattttacatcagagaattcatactggagagaagccgtatggatgcagtgaatgtggaaaagccttcagtaggaagtcgcagcttaaaagacatcagataacgcacacaatagagaaaccctacagttgcagtgagtgtgggaaagcattctcccagaaattaaaactcatcacacatcagagagcgcacacaggagagaaaccctatccatgtagtcactgtggaaaagccttcttttggaagtcgcagctgattactcatcagaggacccacacagggaagaaaccttacggatgtggtgagtgtcaaaaagccttcagcaggaactcacttctcattaggcatcagaggattcatacaggagagaagccctacgaatgcaacgaatgtggtgaagccttcatcagaaaaccacagctgattaaacatcagataactcacacaggagagaagaactatcgatgcagtgattgtgaggaggccttctttaagaagtcagagttaataagacatcaaaaaattcacttaggagagaaaccatatggatgcattcaatgtgggaaaaccttctttgggaagtcccagctcctaacgcatcacagaacacacactggggagaagccttatgaatgcagtgagtgtgggaaggccttcacccagaagtcaagcctgatatcacatcagagaacacatacaggtgagaaaccctatgaatgcagtgaatgcaggaaaaccttcagtgagaagtcaagtctcattcatcatcagagaacccatactggagaaaagccctttgaatgtagtgaatgtaggaaagcttttgcctggaagccacagcttcttaggcatcagagaattcatacaggggagaaaccctatgaatgcagtgagtgtgggaaagcatttgttcagaaagtgcagctcattaagcatcaaagaaatcacacaggagagaaaacctatggatgcagcgattgtgcaaaagctttctttgagaaggcacagctgattatacatcggagaattcatacaggagagagaccatataaatgtggtgaatgtgggaaatctttcacaagaaagtcacaccttatgaggcatcagaggattcatacaggagataaatactatggatgcaatgagtgtgggaccaccttcaacaggaagtcgcagcttatgatacatcagagaaatcacataatataaaaatcatgactttggcgaatgcagaaaggttgctatcaagtgtcatactttctgacacttttgaggatgcatgtgggagagaaaccctattgaggcagtgactgttgaaaaagcttgaattgaggagtcaagagtcactaagcagaatttagaaagagaagtttttaaaaagcaaacagtgtaaaaaaagtcatctcccagaagacactactcgttacatattggatgactcattgaggtgaaaaccttattagtgttgtgatagtagagaagcttttagtcaaaagtcagtttattaaatgtttagaatacctaaacaggaagaaaattctattgttttttataacaaagtggaagatttcaagaaaggacaactcactgtacacttgagaataatacctacagaggttcatactgaagagtagtctcaataatgtaaagaatttgacaagcatgatgctattgaaatagttctgtaaggaagtggtgttctttatacatcaattattacaaaaagcagtgaattgtaagtgtgaggtgtgtttacttagatgtgaagagttctccttactgctgtgatggaataacaagggtcagatttcctctcctgccttaaacaactggaagctatacaatacgtataataggtaatggtttttagacataggacaagcacaggtttgtgatcctcaggagactgcagacagagtgaggtgagcaccatggtttctcagcctgcccccgcacggcagttcctaggttgcagttcagggaagggaaacaataaatctcgctgaattgaagagacaggactggcagttggggaggccacagcagctagaatttccaggggaaagtactggagagatgggatccttctagatacagggctcaagaagtctgctgggagtcccctgagtcctttgacttagtactgacttgcactgaggccaggaaaagaagcactggaaagcagcaggctgaacaattcctggaactcatgcagggctgggaatagtttatgttctcagcagccagagtggaaacagagtggaaacacatggagcatcaggtagaattctcagaaaggttttgttttagtagtgcagctaattaactctagattaaaagctactctggacctacagtgtccggcatccaaaaaaactaatgtgttatgcaaagaagcaataaaatatgacttataaccaggagaaaaatcagtagaaacccagaaaagacagaggtgatggaattagtagacaaggatattaaaagagctattgtaaatataaagtagaggaaaacataagattgatgaaacctgaggtataagagatatttttactggccaaaatggaacttctagggatgaaatcaacttctgattttgttaaaatcccgagtggagagattagatacgaaaaaagaagaaaaaatcaatgaacttgaagagtaagaataaaaactaccaaagtgatatacagagagaaaaaaagacttagagaagaggaagagaataggaaaaccattacagtagtgtaatatatgtttaactggagtcccagaaggagaggagaaaatgaagaggcatgaagaagtatttgaataaataatggctaaagattttccaaatctggtgaaaacaatacccccacatattcaagaagctcaaatgacctgaagtagaataaacataatttacatcacagcagtgcacctcagagtcacattcatgaaaagcactgataaacagaatacttttaaaacaccttgagaaaaaaagataatacatacacatgaacaaagaatggcagcatatttctggtgagaactatgcaagctataagacaatggagtatcatctctaaattccttaatgaaataaacaacaaaccctgcaacctagaattctgttactgtcaaaaacgttttcaaaaatgaaggcaaaataaagactgtttctgagaaactaaatcaaaggtaattttattacctgtagacctgtctttgggaaacattaaaggatgtttgagggcagcaggaaaataatacaaaacttaagtttgggtctgtacaaaggaatgaagttctgaaaatggtgaatatgtgggtaaatataaaagatatttctctctttttaaaatctttttaaaagggaattggctgcttaaagccaaagtaatgataacgtatttggagtttatttagaagtaaagtgtgatgacgataacgcttaagtgtgaatttttaaatatagttgagtagactgcatcatctgagttagaagcctattccttcagggctcagggtagcttgaatttgtagcaggcacatgacagaaattgtatgtattgtggatctgcatgtgtgctgagtattccctatttctttgatcccttttcccccattttctgctctgctcccccctgaggctgtcttctagagactggggtttcttcataggtttgaacagtaggagataccagaggtgggaggagaaaaagttatttattaccgttcccttcctcctgcctggaccatggtagcttctgtgttcccgtaaggatacagcttcctttgggaagccccatctatggctgtagatctctcggtttcagttgacaccattccctctccatgatcttcagacttaactactactgggtgcttccccaacccactggttgggtgtctttaattgtgaacacatatttgtaaatagtgcctttattaattgttcttgagttaatattctgagtgtgccatttattttctgtgccatctgttaaatgatgagcatttaataaaattgtgataatcagttatcagtacaagtgccgcatagtgcataggctgaaatgtctcaagattccccacactacatatcagtattttctatctgtatctggacaatgcagtagaaattataacaaatacaaagttctttgtgcttttctgctgcatatgtcagtggctctggagatcgttaccatctgctacatatataaatagacttgtagttattactaagctcctcttcagtaatagaaagacttatgaagtcttttactacctctgggttagccaaacaaccttcaaaaagcattgttatttaggttaaatatctgtggacaagaaacaagataatcagttactgagtgaagaaagacgggaatgatgtcccatacttcccagctctctaaagtgttatgctgtacaattaaaatacccctgacccatcatctgctaccattcgttgtggataattcatgtaatctctaacctgtgggcaagtatttacccttcagtagtcaagattacgttagagacttcgtccacgaatccacaccacctttcccatcagttctcaccggaaatatgctgccaaaaagaaaatcagcttttctaagatcaagccagagttgcttctcttacaaccttacggcgctaatgcattaagttgaagtcgactgccaaagaggcccagcagagggcagcacccccatcatttttttgaatttctcccttaggaattttgccttcctttgtcttctgtccaccaggccttctctccagctggacacaaacctcctttgacgggaaataattgccgttaggcttcacagtagtgctttttcctttcacttggatttgcattttaacctgcatttcgaagatttttatacatgttttctatttccgacaatgccaggaggcttcattgacgttgtagtctgtgttaataaacttgtgtatcactctgctctgatcttttaggaattaacttgcaaatgaaatgaatatgttgggactttggcataatttgaatatagcattgtgtgagttgtgattgtctcttcctaattgtgctgtaataacctgtgtatgagaataaaatgatttccaccatcaggaaaaaaaaaaaaaaaaaaaa

SEQ ID NO: 24556 - DNA, 4844 bp, Homo Sapiens
gagaacagctggaatccttcgcccccggcgcgcagccttcgcccgccggaatcgctgccttatccaccagcgggatgcttacctcgcccgccctctcgggtcaggcgggcccgggaggatgggagggtggctgctgagcgggagccgccacgtcttccacccgacatattgcctagagcttgctgtgacttagatctcgattcagagatggagaaatcaggcccatcttctaccatctctgagcagcagctgcagaggcaagagggatggattaacaccaaaacagacttggctgagcagagtctcatttcatctgagaaatggcttcaactgcatgggcttaagagcaacaaattgaccttgaaacagattttgtcacagatcggattcccacattgtgaagattatgtggcgtctctggggaggcctgtggcttctcggtatgctgatggtctgtttccacagctctacagagcagaagatggcagagtatacaatctgacagctaaatcagaactgatttatcagtttgtggaacatttaacacaagctgtggagagctacaagcagcgaatggactggctcaccagcaagagccggcagatttttggtgtcatcttggaacagtgcgtcaccatagtgctggattttggcggcattctggagggggagcttgatctgtgccgagaggctctaacaatggttctccaggagcaggtggctcacataaccgagttcaatatcatacgggtttctcaagagcctgtgaagtggcaggaaaatgctactcctgtgaccgaacagtccatagctactgccatcagttgggttgagaaactgacggttgagctgactgtgagcgaggctggccgcctggatgctctgctggaagccgggagagacaagactattgaatccatttactactttgtggtgggggatgttcctgaagaatccaaggagcttctcctccagagggccttggagatcccgtgtccagtctacacagtgtccttcaacgccagaggagaaggcactatagcttttctaaaggatctgagtgccaagacccacagcagattccacgcatttgccgagagaacagagtgtgtagaatttcctgcattctccacaaaggatggtgacaatgtgatgacttggaattcaaggaaactgaaaggaaaactccctccaggagctggagtcagagaggacgtgtttctcgtttggcaagagatggaggaagcccgcagcacgctggcccagatccagaggctggtggccgagcctcccaagcccgacgtggccactgtggactgcgagtcagaaacaacctctgttgagattgcatcgaatccagaagacacctgggactctaagacatggctgcagaaatatggcttgaaggcccagaagctatccttgtatgatgtgcttgccgactgctctttctgccacgctgatggggttgtggatataaaagccaaaccggagaatgagtccgtgcagaccagtgcggagacgaacaagaagacagtccatgcaaaatattgcagcaggtttgtccatgctccctggaaggatgggagcttggtccacgtcaacattaccaaagagaagtgcaagtggtacagtgagagaatccacacagccctggcccggatccgaaggaggattaaatggctacaggatgggagtcaaagcctctttggaagattgcataatgattgcatctacattctcattgacacgtctcactcaatgaagagcaaactggacttggtgaaggacaagatcattcagttcatacaggaacagctgaaatataaaagtaagtttaactttgtgaagtttgatggtcaagcagttgcttggcgggaacaacttgctgaagtcaatgaagataatttggaacaggctcagtcctggattagagacataaagattggaagctccacaaacaccctgagtgccctgaaaactgcttttgctgataaagaaacacaggcaatctaccttctgaccgatgggagacctgatcagccacctgaaacagttatagaccaggtcaaacgttttcaggaaattcctatttataccatctccttcaattacaatgatgagattgcaaacaggtttttgaaagaggttgctgctttgactggaggagagttccatttttataattttggttgcaaggatcccacccccccagaggctgttcagaatgaagatgtgactcttttagttaaggaaatggaacagggtcacagtgatctggagaagatgcaagacctttattctgagtccttgatcatggactggtggtacaatgcagaaaaggatggagacagcaagcatcaaaaggaaatctgttctatgatttcaaccccagaaaggtgtgcaaagcctcaatctgatgtcgattcaacacaaacttcatctctgaatatgttgaagggaccatggggcctttcagatcaaaaggttcagaaaaagaaagtccttcacgcagaatcaaccaaaaccagcctgctcagaagccagatgtcctccctcaggagctcagcttgcagtgaaaggaaggatggcctctccaatgccagcagccggaggactgctctaagtgacaaagaaatgagcatcttgctggctgaggagtggctggatgacaaatcgtcagaaaaggtgacgcgagaaggaagccaggtttatgaccacgattcttcagatgtgtcttcagaaaactggctgaagacctatggcttggtcgccaagaaactcaccctcatggatgccttgtcagtggcagcagtcccgcacagctccacctatgttcccgtcctggacaagcatgtcatgtctaaggttcttgatgaggtgttccctctggcacatgtgtgcaacgacacaaataagatgacattaattaacccccaaggagccaaactcaatatctacaagcgaaaagtggaacaggcaattcaatcctatgaaaagcgcttgaataaaattgtttggcgagcattatctcaagaggaaaaagaaaagttagatgcaaacaaaccaatacagtacttggaaaacaaaacagttttaaaccaggctttagaacggttgaattggcccatttcactgaaagagctgtcgatgctggaaagtgaaatcctagctgggaaaatgtacatccagcaggccatggaactccaggaggctgccaagaagaattatgcaaacaaggccccgggagagcaacagaaattgcaaggaaatccaacaaagaaaaccaaatcaaaaagaccagatcccctcaaaggacagaaggttattgcaagatgtgatgaaaatggcttttattttccaggtagttttttttttttaatttcgtgaggcttttgttaaataatttgatactagggacaagaagtttcaacctgtgcttttgctagaacactgacatttcatgagctggcctgagctagtccacttttcacagagaagaagtggaatatctctggccagctcatgaaatgagcgtatttgggccccccaaaaaagtagccagaaaaatgcacttattttaatttctcattttttagtagacaaatttttattacccatttactgcgttgcatgtatgtaatattttgaaagtactggtctaatggtatgagcaaaaaggtgaacattcttgctttttggagattacatcttaaaggagacagacaagcaatgaaataaacagataaaatatgtggtgtgtcagatacagtgccatagagaaaaatcaagccacaaatggggttgagaatgttggggtgagggttttgattctatatttggtggttaatgaagagctcctggggaaggtgacatatgaataaggacttaaaggaggtggggcaagccatgagattggggaagggagttctaagcagaaacaacagcggtgcccaggcctcagggtggagtgcacacgtgtgttggaggaagggccatgagactgggatagctgggcctcagaggtttgccccagacttcctgggggatgtgatccctgaaggaatcagccagctgcaattcagcaaggggtggaggtatgaagggagtttcatggatggtgacaataatacgtgtgaagacttagaaatgaagaaagacatctatgtctggagaaataaaattgattctggctggaacataaaatgagaaggaagggtggaaataataaagctcttcagagaggtgagcatggggctatgcataaagggtcatattaaggatttgcactttaccctgagggcaatgagagccacatttaaagcagtgagaaacacaatcacatttgaagttttcaaaagctctctcccactgctgtgtgaagattggataccaaggggttaggatgtctctggtccctggcttcgggtggtagatagatagtggtacctacaggagatggtggtgtggatggaaagacaatgagatgtgtctgcaacatgatgaattgcaggtgcctgcaagatgcccagatgaagatatcagagaagcaattggagatgtgggtctagagtctggagacagagatttgggagacataactacagaagtcatcactgaaatcatgggaagggtctgtagggaaaagggaactgggagaaaaccctgaggaagctctgtcaggcaaaaagattacattgcagggcgggtgtggtgggtcacacctgtaatcccagcactttgagaggccgaggctggtggatcacttaaggtcaggagttcaagaccagcctggccaacatggtgaaacctcatctctactaaaaaaaaaaaaaaaaaaaaaa

SEQ ID NO: 24557 - DNA, 5029 bp, Homo Sapiens
tgcgtgcgtgtttgcgtgtggtcacagttcccgccatcagccgctctccctgactaggggtagctagcggcctccctcctttgggttctgtatccctacttccattaccctcggctcctcccactcctcgggggctccgtgctttccgcgggtctgtccgggggctccggaccctcggcgcagctgagttgatggcttccggagaactggcatagctgcagaatatgagtagtgtcccaagaagagtgctttgcctttggcacaaggatcagaataaaggcgaattgctattacatagggtttttcggtaaaagtcactgaaaattatttgccatacagtaaccagagacctccaactaggggcccccaaactgtatcctgcctgtagccagaagcaatttttaaagaaaatatgtctcctctgaagatacatggtcctatcagaattcgaagtatgcagactgggattacaaagtggaaagaaggatcctttgaaattgtagaaaaagagaataaagtcagcctagtagttcactacaatactggaggaattccaaggatatttcagctaagtcataacattaaaaatgtggtgcttcgacccagtggagcgaaacaaagccgcctaatgttaactctgcaagataacagcttcttgtctattgacaaagtaccaagtaaggatgcagaggaaatgaggttgtttctagatgcagtccatcaaaacagacttcctgcagccatgaaaccgtctcaggggtctggtagttttggagccattctgggcagcaggacctcacagaaggaaaccagcaggcagctttcttactcagacaatcaggcttctgcaaaaagaggaagtttggaaactaaagatgatattccatttcgaaaagttcttggtaatccgggtagaggatcgattaagactgtagcaggaagtggaatagctcggacgattccttctttgacatctacttcaacacctcttagatcagggttgctagaaaatcgtactgaaaagaggaaaagaatgatatcaactggctcagaattgaatgaagattaccctaaggaagatggttcatcatcgaacaacaaggccatgacagatccctccagaaagtatttgaccagcagtagagaaaagcagctgagtttgaaacagtcagaagagaataggacatcagggcttttacctttacagtcatcatccttttatggtagcagagctggatccaaggaacactcttctggtggcactaacttagacaggactaatgtttcaagccagactccctctgccaaaagaagtttgggatttcttcctcagccagttcctctttctgttaaaaaactgaggtgtaaccaggattacactggctggaataaaccaagagtgcccctttcctctcaccaacagcagcaactgcagggcttctccaatttgggaaatacctgctatatgaatgctattctacaatctctattttcactccagtcatttgcaaatgacttgcttaaacaaggtatcccatggaagaaaattccactcaatgcacttatcagacgctttgcacacttgcttgttaaaaaagatatctgtaattcagagaccaaaaaggatttactcaagaaggttaaaaatgccatttcagctacagcagagagattctctggttatatgcagaatgatgctcatgaatttttaagtcagtgtttggaccagctgaaagaagatatggaaaaattaaataaaacttggaagactgaacctatttctggagaagaaaattcaccagatatttcagctaccagagcatacacttgccctgttattactaatttggagtttgaggttcagcactccatcatttgtaaagcatgtggagagattatccccaaaagagaacagtttaatgacctctctattgaccttcctcgtaggaaaaaaccactccctcctcgttcaattcaagattctcttgatcttttctttagggccgaagaactggagtattcttgtgagaagtgtggtgggaagtgtgctcttgtcaggcacaaatttaacaggcttcctagggtcctcattctccatttgaaacgatatagcttcaatgtggctctctcgcttaacaataagattgggcagcaagtcatcattccaagatacctgaccctgtcatctcattgcactgaaaatacaaaaccaccttttacccttggttggagtgcacatatggcaatttctagaccattgaaagcctctcaaatggtgaattcctgcatcaccagcccttctacaccttcaaagaaattcaccttcaaatccaagagctccttggctttatgccttgattcagacagtgaggatgagctaaaacgttctgtggccctcagccagagactttgtgaaatgttaggcaacgaacagcagcaggaagacctggaaaaagattcaaaattatgcccaatagagcctgacaagtctgaattggaaaactcaggatttgacagaatgagcgaagaagagcttctagcagctgtcttggagataagtaagagagatgcttcaccatctctgagtcatgaagatgatgataagccaactagcagcccagataccggatttgcagaagatgatattcaagaaatgccagaaaatccagacactatggaaactgagaagcccaaaacaatcacagagctggatcctgccagttttactgagataactaaagactgtgatgagaataaagaaaacaaaactccagaaggatctcagggagaagttgattggctccagcagtatgatatggagcgtgaaagggaagagcaagagcttcagcaggcactggctcagagccttcaagagcaagaggcttgggaacagaaagaagatgatgacctcaaaagagctaccgagttaagtcttcaagagtttaacaactcctttgtggatgcattgggttctgatgaggactctggaaatgaggatgtttttgatatggagtacacagaagctgaagctgaggaactgaaaagaaatgctgagacaggaaatctgcctcattcgtaccggctcatcagtgttgtcagtcacattggtagcacttcttcttcaggtcattacattagtgatgtatatgacattaagaagcaagcgtggtttacttacaatgacctggaggtatcaaaaatccaagaggctgccgtgcagagtgatcgagatcggagtggctacatcttcttttatatgcacaaggagatctttgatgagctgctggaaacagaaaagaactctcagtcacttagcacggaagtggggaagactacccgtcaggcctcgtgaggaacaaactcctgggttggcagcatgcactgcatatttgttactgctgcccacctcacctttcctctgctgaaggagaatttggaattctacttgatgcgggagcaacaaacagctcagggccaaaccaaaagacaaaaattggagtaacgtagaatgctccatgctattttatggaaactttggtctcacatccgtagctgattatcctctttttctcctatgagtggcacttcttttgtcttaggaatacatgttgtaaatatatatctgtgtatgtgtgtatacgcacacacagacacacacacacacacacgggatgaatggagccttaaagagttaggatgagccaccagaatatgcctgctcaaaattaatagcacagcagtttggagaagaaatgaaggtgtcaaagagtccattcacctgagaaatgtgtgaagacatacttatcagttggcttttagcttttatgttccttgagtagtttcactcaagtctgtaaccttttgtgtttccttattagtaaaattcactggaaagccagctcttcatgttacactaatgacagtttgttctctttgcaagagaggggcattactgtcacctgacttgaggagctgttttgttgttgttgttgtctgcaaatttcatgaatttgtgatgtctttgctgtttacatgcagtcccaagaaatggattgttggtgctttggaatatgttacagtcccacatttgatatttcttatatactttgttttctctaaggagatttcttcacacagtatgttcatcatatatcatcatcattattatggtggtaaagatagaatctttttcttttttgtcattctgccatggagcagcattaccctaatggattgcaaccaaaactttaaacaagtagaaagataatatttctccaattgggactccccagcaggaatacttagggataaggaagaatgctagcatctctgtctctcaaacatagggaggataagaagagtgttcttctggtaaagctaaaattctggaccactgaagctaaaagccctattgcaagtatgaaattaagtacttgagctataggacaaaccttgggcatttaaccatttactgtctggctttgcccttaaaatagggttgcaattaaaatgtgattggcttaggtaatcccaagaactaacaaataacaaaggtgcataatttatttatctactttttaggtgctctgagttgaggcaaagtagagcggcaacattaagtgctatgctagtcacttagctgacgtaaccagcttggttaagcagcttatgaaaccatataaagaattcttttgaggatggaattctgtccacaaaataattttgtgagcccagatatcattaggatcacacagagttaaatatagaaaaatgaaaccatcattatattctttcgtgttttttcttttattataaacaaggggattattctttagttctcagaggtagggacaaaaccacatcaggttttcagaaggaaaaaacattaaaaaacccaccatcacatgagagaatcacttgaacccaggaggcagaggttgcagtgagctgagatcgcatcattgcactgcagtctgagtgacagagtgagactccatctcattaaaaaaaacgaaaacaaaaaaaaaaa

SEQ ID NO: 24558 - DNA, 4861 bp, Homo Sapiens
gggagtctggttaaataaagatgactatatcagagacttgaaaaggatcattctctgttttctgatagtgtatatggccattttggtgggcacagatcaggatttttacagtttacttggagtgtccaaaactgcaagcagtagagaaataagacaagctttcaagaaattggcattgaagttacatcctgataaaaacccgaataacccaaatgcacatggcaattttttaaaaataaatagagcatatgaagtactcaaagatgaagatctacggaaaaagtatgacaaatatggagaaaagggacttgaggataatcaaggtggccagtatgaaagctggaactattatcgttatgattttggtatttatgatgatgatcctgaaatcataacattggaaagaagagaatttgatgctgctgttaattctggagaactgtggtttgtaaatttttactccccaggctgttcacactgccatgatttagctcccacatggagagactttgctaaagaagtggatgggttacttcgaattggagctgttaactgtggtgatgatagaatgctttgccgaatgaaaggagtcaacagctatcccagtctcttcatttttcggtctggaatggccccagtgaaatatcatggagacagatcaaaggagagtttagtgagttttgcaatgcagcatgttagaagtacagtgacagaactttggacaggaaattttgtcaactccatacaaactgcttttgctgctggtattggctggctgatcactttttgttcaaaaggaggagattgtttgacttcacagacacgactcaggcttagtggcatgttggatggtcttgttaatgtaggatggatggactgtgccacccaggataacctttgtaaaagcttagatattacaacaagtactactgcttattttcctcctggagccactttaaataacaaagagaaaaacagtattttgtttctcaactcattggatgctaaagaaatatatttggaagtaatacataatcttccagattttgaactactttcggcaaacacactagaggatcgtttggctcatcatcggtggctgttattttttcattttggaaaaatgaaaattcaaatgatcctgagctgaaaaaactaaaaactctacttaaaaatgatcatattcaagttggcaggtttgactgttcctctgcaccagacatctgtagtaatctgtatgtttttcagccgtctctagcagtatttaaaggacaaggaaccaaagaatatgaaattcatcatggaaagaagattctatatgatatacttgcctttgccaaagaaagtgtgaattctcatgttaccacgcttggacctcaaaattttcctgccaatgacaaagaaccatggcttgttgatttctttgccccctggtgtccaccatgtcgagctttactaccagagttacgaagagcatcaaatcttctttatggtcagcttaagtttggtacactagattgtacagttcatgagggactctgtaacatgtataacattcaggcttatccaacaacagtggtattcaaccagtccaacattcatgagtatgaaggacatcactctgctgaacaaatcttggagttcatagaggatcttatgaatccttcagtggtctcccttacacccaccgccttcaacgaactagttacacaaagaaaacacaacgaagtctggatggttgatttctattctccgtggtgtcatccttgccaagtcttaatgccagaatggaaaagaatggcccggacattaactggactgatcaacgtgggcagtatagattgccaacagtatcattctttttgtgcccaggaaaacgttcaaagataccctgagataagattttttcccccaaaatcaaataaagcttatcagtatcacagttacaatggttggaatagggatgcttattccctgagaatctggggtctaggatttttacctcaagtatccacagatctaacacctcagactttcagtgaaaaagttctacaagggaaaaatcattgggtgattgatttctatgctccttggtgtggaccttgccagaattttgctccagaatttgagctcttggctaggatgattaaaggaaaagtgaaagctggaaaagtagactgtcaggcttatgctcagacatgccagaaagctgggatcagggcctatccaactgttaagttttatttctacgaaagagcaaagagaaattttcaagaagagcagataaataccagagatgcaaaagcaaccgctgccttaataagtgaaaaattggaaactctccgaaatcaaggcaagaggaataaggatgaactttgataatgttgaagatgaagaaaaagtttaaaagaaattctgacagatgacatcagaagacacctatttagaatgttacatttatgatgggaatgaatgaacattatcttagacttgcagttgtactgccagaattatctacagcactggtgtaaaagaagggtctgcaaactttttctgtaaagggccggtttataaatattttagactttgcaggctataatatatggttcacacatgagaacaagaatagagtcatcatgtattctttgttatttgcttttaacaacctttaaaaaatattaaaacgattcttagctcagagccatacaaaagtaggctggattcagtccatggaccatagattgctgtccccctcgacggacttataatgtttcaggtggctggcttgaacatgagtctgctgtgctatctacataaatgtctaagttgtataaagtccactttcccttcacgttttttggctgacctgaaaagaggtaacttagtttttggtcacttgttctcctaaaaatgctatccctaaccatatatttatatttcgttttaaaaacacccatgatgtggcacagtaaacaaaccctgttatgctgtattattatgaggagattcttcattgttttctttccttctcaaaggttgaaaaaatgcttttaatttttcacagccgagaaacagtgcagcagtatatgtgcacacagtaagtacacaaatttgagcaacagtaagtgcacaaattctgtagtttgctgtatcatccaggaaaacctgagggaaaaaaattatagcaattaactgggcattgtagagtatcctaaatatgttatcaagtatttagagttctatattttaaagatatatgtgttcatgtattttctgaaattgctttcatagaaattttcccactgatagttgatttttgaggcatctaatatttacatatttgccttctgaactttgttttgacctgtatcctttatttacattgggtttttctttcatagttttggtttttcactcctgtccagtctatttattattcaaataggaaaaattactttacaggttgttttactgtagcttataatgatactgtagttattccagttactagttcactgtcagagggctgcctttttcagataaatattgacataataactgaagttatttttataagaaaatcaagtatataaatctaggaaagggatcttctagtttctgtgttgtttagactcaaagaatcacaaatttgtcagtaacatgtagttgtttagttataattcagagtgtacagaatggtaaaaattccaatcagtcaaaagaggtcaatgaattaaaaggcttgcaactttttcaaaaacctgttagaatatgctttattgtgttttgaggagttttcctttttttcttttcaatatcactttatcctccagtatttcctcataagggttattatagccataattaatgttaaaatagactttgttcttcatattctcccatctttttcgctactatatactctgtctggattctgctgtatgcctgttggcatatatggaacagtcaccacttgtcacacttaacaccagctttttgaattatgatcagtaatggcaagagcctttcattctcgaatgtttaaagcctaggagttctacaaaattggcttctttctacaagaatcccaaaatggaatgcctaaagaagtcttacttgggtaaatacttactaaaatatactggttatgtgcatatcaccacactggacactgaggagtgttcaaaaggaatctaagacatggtccccatcttccaactgtctgtaattcactgttttgtcattgagctcataaggtacttacattactacctataaatgtttcctgtacttgttagttgttgagaaacattttaggcagtaaataaaatagtaaatattatgtgtcctataatttgacctaagctgtgtgcctttggaatcagctctaagccagggccccccgggagccatgttaagtaacacgtatcataaagtgacatacatcaaggttatcttatatagtcataacagtattattgggtctttcaaaaacagctggcagattgagcttttaatggctatattgatacagtagatagagcacctctaaggagtaccaggtataatgtgccattcctctcagcaacaccatttttgtgtgcagctgaccctctaacatggtatcaattctagctgaccaaagcacattctatcaggcagccaggcttggaaattaggtccatttaaagtatgtggcttacagccaggtatggtggtgtgcgcctattgtcccatctacttgagaggctgaggcaggagggattgcttgggctcaggattttgaatccagcctgggcaacatagcaagaccccatctctaataaataaattatgttttgggcatcaaaaaaaaaaaaaa

SEQ ID NO: 24559 - DNA, 5575 bp, Homo Sapiens
acggctgcgagaaagcgacagaagggggtaggggagctgagccgagcggctgggcgggcctggccgggccagcggaggggagacgtcggttgagcggcggcgaacatgcgcttttgacacattggaggctttcttgatcatggatggtgaagatataccagatttttcaagtttaaaggaaggaaactgcttattggaaggaactttccttgaagtataagcaaagcttccaggaagctcgggatgagctagttgaattccaggaaggaagcagagaattagaagcagagttggaggcacaattagtacaggctgaacaaagaaatagagacttgcaggctgataaccaaagactgaaatatgaagtggaggcattaaaggagaagctagagcatcaatatgcacagagctataagcaggtctcagtgttagaagatgatttaagtcagactcgggccattaaggagcagttgcataagtatgtgagagagctggagcaggccaacgacgacctggagcgagccaaaagggcaacaatagtttcactggaagactttgaacaaaggctaaaccaggccattgaacgaaatgcatttttagaaagtgaacttgatgaaaaggaatctttgttggtctctgtacagaggttaaaggatgaagcaagagatttaaggcaagaactagcagttcgggaaagacaacaggaagtaactagaaagtcggctcctagctctccaactctagactgtgaaaagatggactccgccgtccaagcatcactttctttgccagctacccctgttggcaaaggaacggagaacacttttccttcaccgaaagctataccaaatggttttggtaccagtccactaactccctctgctaggatatcagcactaaacatcgtgggggatctcttacggaaagtaggggctttagaatccaaattagcagcttgcaggaattttgcaaaggaccaagcatcacgaaaatcctatatttcagggaatgttaactgtggggtgctgaatggcaatggcacaaagttctctcgatcagggcatacatctttcttcgacaaaggctcctcctccagctgtgcgatccgagcttccagacgccgcttctcatccagcagcgcggacctggcggggagaggaggaggggacggttcaatcccagctcagcacagcacgggagcctcagggaaggctcctccacccaccctgttgctggaaacctgagcagccatcctgaattttctctttcccctgcactcatccccaaatccatcagtaggtcccactgatgacacttccaaacaccctcccccgctgccaccacccagatgcaggcctgtcatctctcacctggactgttgggcggcctcccgctgccctgcctgcctctctccagctgttctccacagacaacagccagagtcgctttcaaaacgcaagcacgaccccagcctccccaccgctgaaactcttcagtggtttccaatgcactgagaatcaaattctaactactcatgatggcatgctcaaaaaggcgcatgatggacgttcagttcagtaattaagtggagaaatcaactgaattggaaaaaaagataatgacttttaacgaaaaaatgaattcagagaaaggtcctatctgaggaacctgcttgccaaagctagctggaaagtgaaggcctgcagtgcccgttggcgcaccccacggctcccccctgcggtgtgcagggctcggcaggactggcacggggtaccatggctgaggcagcccaggcccagcgagggaggagcaaaccacccgctgatgccaggtgtgtggacacctccagccttctcagcagtgcgcgtgcctgagggcgaagaacccacccccggccgtgggagactcacttgccagaggcgctgttggtgatctcgtccgccagctcatctctctcctgctcggcgtgtcggcgggctcgctcagatgaggcaagttcctaagcagtggagactgcgttaagctctggctgtgaatagtttcctcacctgtggaatctgacagtgcctggagctacagcgaccttgctcctgtcactgtttacctgcacctcaagctgtcatttagatttgagaaattaaactggcaagaaaatctgctcggtgcaggccagccaggtagtgtgtggtgtcagcatctgacacagatgtccagaggaaagtcttcattgccataagggctttgctgtcacctccaacgtaagaggtggctatgttcctgcccttcttggaaagctggtgcttcttaatataaactgagcatgaactttatataaaccctgaaccctaagaaacatgagctataccaactgatggccctgaagtatctttcacataaacagtttgagatcaaggacgctggctgcacagaccagtgcggatccaggcagctgtgccgcaacaaggatcaatgctcccatggagaggaggcaggtgggggcctccgcaggggctcaagtgtttgcagagctgggcctctaaggtgggcaaggcctctttcttgaaggggactgtggctccacagggggctctcagaggactggacaatggggacagccctgtgcctgccagcccacgggagaaactgcctgatggctgcttttccacaaacttctttggaaggatgatttgccatggaaaggagtcaagggtgcatttatcttataaatgaggaaactgaggcccacctggatgaagatactggcccaaagttccaaggtttgaagaaatgttgattatccatcatttatacggtaatgtgtatatttaagtgtgccttgcactgttacagttcctatatgcaacactttatcagtctctgcttcatgagaacttacaagaaagataaatgaaggaataacaggaattcaatgaaacaaacttctctccttttaagttatcacatgagtagtgcttctgtgtaaaaacaaggcaattttgcatcaccaaggttggagttacacagttcttgtgcttatcaacacttccctttcctgcacaggggaacaggccaagaaggtggcctgaaaagctactcatcagctcctttgccttttgccaggtagaggaatatatgtgagcagtgtcgaagtgataactttctgtttccaaactgaagcaacaagaaggttgaggaccatattaaaaatggatacttaaaaaaataaaaaacaaaaatgtatactgacattacagtgggctacaaatatattaacttttttttgatcttggagaaatttcaagggcaaatatatttgttgaacaaatggatgaataagtaacaaaccaacctcctgcaattgaaggatttctgcttccagactcttcaatttcttttcactctctttggattgagcaaaaatctcatctctggatgcacgagcttcttctaattcacgttggtaatccttcatctgagccttagattaaataagaaggttttggggtggtttacattcttagttttagttaaaataaaatttttttagagatgagccctggctgtgttgcccaggctgatctcaaactcaaggcctcaagcattgctcctgattacaagtgtgagctgcggtgcctggccccattcttagcttgtaaacatggtattttttttctagattataaaagtaatatacattcattgtaaatataaaagtatatgggaatgacaaggatatcgtaagaaaactacagatcaaaatgaaatcccttatgaatacaaatgcaaaaatcttcaacagaatagtagcaaactgaatctggcaacatgtaaaaaggattatacaccatgaccaagcaggatctatctgaggaatgcaaggttggtttgacaaccaaaaatgaattaatgtaaccatatgatcatcacaataaatgctgaagaagcacttgacaaaatctaataccctttcaatataaaaatgctcaacaagctatgaacagaaggaaatttcttcaactctgattaagggcatcaatgaaaaactgacagccaatatcatacttaaggatcagtgaccaaatgctttccctctaaaagatgagcaacaagacaaggatgtctgatcttgccacttctacttaacaatgcaatagagattctagccagggtaattaattaggcaagataaagaaataaaagatatccagattggaaaggaagaagtaaaactagttcaatttgcagatgatctgatattgtatatagaaaatcttaaggaagacactgagagaattagaactgctggtaatatggacagtaaaagaaaagaaagcccacaagaactaattgatgagtttagcaagattgcgggatacaagatcaacatacaaacatcaattatatttctatacaccaactatgaacattcaaaataaagcaattacatttataataccatcaaaagaatataaacttaggtataaagaaaaaaagtgaaagacttgtataccaagaactacaaaacgtcactgaaaaaaataaaaaagatctaaataaatggaaagattatccatgtttgtagaccagaagacttaatattgttaaaatagcaatactctccaaattgatttacgcatcaacacaataaactatcaaaacccaagctggctttttttttttttttttttggtggcagaaattaagctaaggcaggtgtggaaatcatttactcaaagaatttatatccagaatacagaattgtttcaactcaataattaaaagagagctcagctgtttaacctcattagtcattagagaaataaaaataaaagccacaatgaaatgtcacttcacacccactaagatggttacaatcaaaagatggacaataacaaatgttgacaagatgtggagaaattggaaccctcatacatagctggtaggaacgtaaaactgcagtgactgtgggaaacagtttggcagttcctcaaagttaaacacagaggtaccatataacccagctcaattccactcctaggtatatttctgagaaaactgaaagcacatgtccacacaaatgcatatgaatgttcatagaggcattattcagaagtcaaaaaaatggaagcaacccaaatgtccaactgggggatagacgagtaaaatgtggtagatgtatccacacagtagagtgttactcagtaataaaaaggagtgcggtacttgttcatgtggctacatggatgaattttgaaaacatcatgctaagtggaaaaccagtcacaaaaggccacatattgtatgattccactgatatgaaatatggaacaaaggcaaatttatagagactgaaagattagtagttgattaacgcaggatgcagcagggacagggaatggggagtgacagctaatgggtggaggattcttttgggagggaccaaaatgccccaaatttgatagtggtgatggctgaataagcctatgaataactaaaaacactgaaaacactaaactggcgaattgtgtggtatgtgaactatatttcaataaagctgttaaagaaaaaaaaaaaa

SEQ ID NO: 24560 - DNA, 4870 bp, Homo Sapiens
cgcacattctctatatggcagattcggtgctgtctctggaaatacataaacatagagcgattcctttttctgttgaggcaaaatatggatttggataatttctattcacgtcatgaatgtggtatgtggaaggtcttctgagagcagaaagggatgtttcacagcacagcccggctgtgtggtgctcagggcaggccctctggaggaggtgagcctgggctcttggcctaatgtttcagctctcactttccagtcctgagctgttgttgccagtccatctttcatgagaccattggagtgatctttctggtcttgtcacttcatggtttaaagtttccctgggcctacacagtgaagtccaaattcagcatggtattacaagacccttatgatccagtcttaaccattggttaggtatcctacccatactgtttatctcttgaatacctctatgctctttgacaagtccagcccctacgtgttcatacctcacttctgtgacacagccttgcttcagggctcccaatctctgtagcctccctgaactgtgcatttgctctgctgcttgatttgtttctgtgactgttccattctcctcgggacacatagcagggaccttgtcttggtcctttttttttggctttaacagaacatagcaaagaacctgacataggtgtagtctgagtttaccactggggttatcacagaggtctgctaagtgaatacaacacagtggggacccagaacctctagaaagggttgaggattacaatccccagatagctacaatcagggaataatgtaacctgtttgcctagggtgctacatggtaatcttgaattagaacaactgagacttccatgggaccttagggtgataaccattaaacctactctttcagtgtttactttgtaaaagcatcacactaaggaggttgtcatttaatcctcacacctaccctgggttattaacactgttgatgaagaaagccttacttggctaagatatggagcaggttagtaagtggtagaatagatactccagtcctgtctccaaaatgcaaatttttttttaattaaaaaaatttctaattttcaatatatttatttttgattttttattttctgtagagttggagtttcggcatgttgtccaggctggtctcgaactcatgggtgcaagccataccccaacctcgaccttccgaagtgttgggaatactggcatgagccatgatgcctggcctcaaaatgcatacccttaaccactatgctctcacatttttagatgtgggattactgtctacgacgtcgcccccactaagacctagggcttaggtgtcgaggtgggaaagatcttgaggcttttcttctcaaaattaatcagaaacgatgtgaattttatatctctttctgaggttttccccataagctaatcgggattagtagacttaaaggtgaatgaccaactgtatccctggttcactggttaggaagagtacatagtctttgtgtataggctattttcctcggtaaccttgggcaacatgcttgacttctccaagccagtctcctttgtgaaaggtgatatacttacaagacattatattaaatgagaacccaggcaggttacctaccctaccatgacactggaagtattctttgccttaagaaaaggagaattgctggttggttccaggtccggtgggtaccctcatttcccctgggcaattttactgtaaaaatagaccaaggatctcaaggcccagtggcttttgccttctggggtacttttttacctccctgtttagtagtaagggtcacattttaaattgcagctatcacactggagggatcagatcatttagaactttgactgcttaaatattactcttgctaagatcttgagcttgtctcatgttgacagactagtgaagttggttacgttgtctgtctcctcactggagggagagattcagagttgccctgtccaacccagtgctatctctggaaagggttggattgaaatctagtctgccttcattctgaggtataatcatgagggttaggtgaaagggtcccgagtgagaagatggcatgggtcctagggtggggagcccgatgccaagtcagacttcactcggtatgtttattcaaagccccactttcactcgtagcatatcataggtggtctctgcaagttgctgaccctgattcagactgttccataaaagtcagacacttggttttagttcccaaactgattttgatgacattcttgactgcagggcttggagttaaccccactgggcctgagttgtctctctgtaaagttacacatcatttcagactcaaaggcctctagcatgcagggtctggtgtcataataggcaccaatgggaaccattactgtcattgccttttttggctttaatcttcccaattgtaagttcctttcatgtttaaaacaagtttaaaagacagggggacttaggcaagctcaggcagtctagcctttaatgtaagaatttcaaaacataaaggaaaaaaaccttttttttttaagcagtactttgtgagttacaagacagcagcagctccttagtgttgattgccgaggcctttttggtttgaaaactctgcttcctttgtgaatttggtgttaggagttcttattgttattctgcagcctttactattgtcctttatttactgaacacagtgaataccaagcactgtttattagaggttaggagtaggggcaggtgattaaagaaacaaaaaagctaataatctcctcaagcaatttctggcctaatagaattatagtagacagtgaagtatctaaacccagggaatcagattgaggcaccatgtccatcgccttgagaattaataggctgcatttctgggttctccttttttttttttttttttgcccaactgagtctttctgtggacttacatggaacttcttattctcttaaatcattaagttacttgacaatattcttggatttggagaaactggatgtagggccgtatgaaaaaatcattcgaaatcagatttaggggtataaggttggataggaatgttttagaaagaagaatgtaaggcagataactaatttgtcacatccaaagtataaaactgctactttttccctagaaaagggaagctcattttaggcagcctaaaccagtaagattttcttcctcctccaagtgccagattttgtacctttcgtttgtcaaaacattctttggccctatacatgccagagtgatatagaaaggaagttaccacatttttttgagaacaaatcactcctgataaaatttcttagacaattgataatcattttaagaagaaatttaattgtatttagctctgtgtctcgcccctttggtgtcactcttctacctcttccatcactatagctaaatatttagaagtatatcttgacacctagcacaaatgttttggttaagtatcttaaaactgatggatggtatggctggggcagcatggctcacgcctgtaatcccagcactttgggaggccaaggcgggtgaatcacctgaggtcaggagtttgagaccggcctgaccaacttggagaaaccccgtctctactaaaaatacaaaaattagtcaggtgtggtggcgcatgcgtgtaatcctgtctactcaggaggctgaggcaggagaattgcctgaacccgggaggcagaggttgcagtgagctgagatcgtgccattgcactccagcctgggcaacaagagcaaaactcagtctcaaaaaacaaaacaaaaaacctgttggtatagtacgaaagaaacgtcttgcagttttctgttgcagagaattaattagaaccaacctgttggattatacacattcacctttcagaatcctttcttctctgtggaaacccacactctcagcagtgtgtgggaacacagtagattcttaaggaatgcttgttgaatgttgcagtctgcatcttcttgaagtaacagaactgttggtagctgtttaaaagtaaaatgtgtctaaagaccttttggaaattaagatgtaagagattaatgcaccaaagcagtctcttaattacttaaaatgaattatttcaaagaatctttaattgaattttctgtgaagtctggaatttgtaaattatgtccctttgttcaaaccagcccctgaaaagaacaattaaagcaattaagatagcattaaagttttcaatgaagttggcattttctgtgtattaagattagatgttagctgctgaagtttgtggaggtcggacataaagcttccaacatcagtaatgcaaaattgtcttgaacctgcgataaaattttgttggacttttttttcattgcagtgaaaagggccatgtagcatgcctcaaagccaggttactcagcctagtccttgtttaagcagttttgatattcattcaagttcaattttctcactgattttatgattaattccttggaaaatttgaaagttttcaagaagtaaaaaattaatatcttgttatcccagtatatagagattaacttcagttcaatgtttggtgcattttctctagtcttttttcaatgtataatattaaagttatttcatagttgagatcatactgcatatatgatactgtatcttgcttttttcattttaacgtcgtgagcaattttcccatgacattacaaactgtctttgaaaaatggaaaacatttggggctgtcagcataactgaaaatgttttcttggtgtgacacatgtgtctttgtaattggtttgatttagtgtgctttatttcaataaaaattcagtattataatttaaaaaaaaaaaa

SEQ ID NO: 24561 - DNA, 3414 bp, Homo Sapiens
gagtcgctgtttgggacgctgggtgtgcggtgttctgtctccgctcccgtttcgctgtcacagcccgttccttcccggagcccgggacaggctgggcgcgcgcccgtgacgcgtgaccaaaaccaaagacggccatgaagtgagatcgtgcaaagtagcagataaaacgggcagcatcactatttccgtgtgggatgagatcggaggtcttatacagccaggggatattattcggttgaccagagggtatgcatccatgtggaaaggatgtctgacactttatactggaaggggtggtgaacttcaaaaaattggggaattttgtatggtttattcagaagtgccaaatttcagtgaacccaacccagattatcgaggacagcagaacaaaggggcacagagtgaacagaagaataattccatgaatagtaatatgggtacaggtacatttggaccagtgggaaatggtgttcacactggccctgaatcaagggaacaccagttttcacatgctggcagaagcaatggccggggacttataaatccgcaactacaaggaacagctagtaatcaaacagtgatgaccacaataagtaatggcagggaccctcggagagcctttaaaagatgacctatgctaaatactcatgtgtagtttttatactacatgccctacttgaacacttattgcacttttatttattgttaactgtgaaaagtacgtcctttattgggtttccttttatattcttggtttgttaagaagaatggtttgtttttatagcaaaactgttaagctgctcgagtctcctgttgaagaatgggaacactgaaaagtaggggcatttatttttagagtaaaaagattattggatagcctttaaaaaacctgcacccatttcatgggtgagttacttaagacatcagctttatagcctctatgagtcaatcttctgtataagttttgtaatatttaacataaggcttaatgggagatgttcttttgtcttgtattcagatattgccaactaaagcaataaccatcaaaaaacacaagaacttgtcaatgctagcagtaatttttgagtgtttgtggctctcggaatgattgacttcgttcagtgactactattaagattttccaaggactgactcatcccaaatttttgttgtattaccaaaaaaacagattccttatcagaatttggaatagaatgtgatctctattgcaacaagtaattttaaaagaaagctacatttattttagagtagtgctcctaacatgtattatcaactttgtggattacattggaggaaaatttaaaactggggccttgaatatttattttttgaaactaccatgttaaatactgaagtataatttgggggagttataaagttatgataaacattcatctgattattttaaacaatagttgtggtagataaacatactggaggtgagtcaaattgaattcatatagtaacatgcagtctgaagtcctagttacttaataggtactcagcctggagtgaaaatcctgggtactgactttgagaggagtgagtgtgcatgttgtcaaagtttctgaacacagttcacatagccttattagcaaaagttttaagaaatggctctatcaaagaagcaattgcagctttattcagaaatataaaagtggaatttatgtacatgtcataagtggtacccacttcccctttttactgtagggtggataactcttaggatttaactctttgaatattatctcttgaataaagcatgtgttaatgttaacaaacctacgtaatttttgccctttcaatgacttacagtggagagccagtacatcttaactactgttgtagtgatggtatcaacctcatggttacttagctctgcatttgttgctttgttttttttccacttcaaatcacaaaataagtagattttgttttctgaaaactccatagcatttgaatacaaaaagttgtgccagattgtttgccctaattcactgtgtttaacaaatatttcagtacacactatgtattaggcactgtgtggaaagtgttaaggggtagacaaaataccgaataatctccacaagtttatttgtggtctatagtacttttgtaactggggttacaaaaattatagaaatttttttcctttgttcatatgcatattcatgattataatttggctttgtttgtgattaatgttttcttaagattttcacattatagaatacctcaaaagaagttgtctaaggactgggatagagagtatgtttcataaaattgtagatgtttagaatttttaaaaaccctacaaattagtatatgattgttttatataagtaagataggagcaacactttaaattatttgtgggagaatacagcattaaaggtgattttaaaagaaaaaaatttggaattttagaaaatttaaatgctgtcaggtatggaatgctgggcttccaatcctggcctcattgtctcctcacctgtgatgttggatgagttattacacttgaaatgtctttaagccttaggttccacaagtatgaaaacaagtaagtaacagtatcctttctagacttgtttaagatttccatgtaagtaattataatgacttctgacacataataatgtcgtcttataccccaacagtaggaaaaaaatgcagaattcagtatgaaagtattgttaccctttaacacagtggtccccaacctttttggcaccagagaccagtctcctggaagacagtttttccgtgggatcgggggatggttttgggatgaaactgttccacctcaggtcatcagtcattagttagattctcataaggagcgtgcaacctcaatcccttgcatactcatttcacaatagggttcatgctcctatgagaatctaatgccaccactcatctgacaggaggtggagctcaggcagtaagtctccctcgcccgccactcacctgctgggcgttcctgttcctagcaggccagaattgatactgatctaggggttggggacccctgcttaacatgttgagattaaatggagaaagacttaagcttttacttttgtgattgacacttgcttcaataatgtaaccttgttctgtgtttttatcatttattaacaaatttcttttttcttaagggaagcctccaaaatcaaagaaaagtgagttacaatccataatgaatatttgccttaccagcctactggaacacattcatcaagaacttaagaggaagaaagttttctgccttcctccttcctagtgctctcagctatcaactttgaaataagtttaaacaacacctactgaaaacaaaaaccacttagtataaaaatatcccccaccacaaaaaaaaaaaaaaaaaaaaaaaaaaaa

SEQ ID NO: 24562 - DNA, 2955 bp, Homo Sapiens
ggaggctcctgagtgatttcccccagctgccctcgtttgcatttggatagagcttggttggagttccaagggctgatgctgggaaccttgctctggatgcgaggcctgcccctggagggagccgcggaggactggcagctgcagatgctggagcaggccagcctgtggctgggccgtagcttcctgctggcaggcttcctggtatcgagcagctgccccagcctggagcaggcggccaagggtgagggctgttcccccatcccttgtttcgcccactgcctcgactccctggtgagaaactttctgtgtcaccctcacagtgtccagatcatcctgggcactgccagggccacctgcagccatttctaaggctctgtggaggcccagggactcctcacccagctccagcgccagcgcagcctcctagcccaccagccctttgaggagctcttggaccactgggtctcggcctaccacctgctggagtggctggtggagcagcagcagccccttcaagagtacaagggcaggcaccagctggggaaggctggtgttgccttgtcggccacattctggagcccggcagacagcctcagcaagctcctgtagcccttccagatggtggtccgcgaggcgagtgcggcacaggcctctctgagccaggtgctgccccagctgcgctacctgcacatcttcctggagcaggttcacacacactttcaggagcagagtgtcggggagaggggcgcaccatccagctggctaagggttgcccggcagctctgcaccgactgtcagctcaacaagctcttctaccgcgaggagtttgtgctggccaccttgctggacccttgcttcaaggggaagattgaggccatcctgccattggggccgaccgacattgaccactggaagcaagtcctcgtgtacaaggtgaaggagattagagtgtctgaatactctttgaactccccaagtcccctgcaaagccccaggggtctgtgcgtggaccccaccagggtagccaagagctccggggtgaggggagaagccagggggagcctctgcagagcagcagccactctggggccttcctgctggcccagagggagaagggcttgctggagagcatggggctgctggcctctgagagaagcaagagctcgctgtccaccaagagccactgggccagcatcattgtcaagaagtatctgtgggagaatgagaccgttggagcccaggatgaccccctggcttactgggagaagaagcgagaagcctggccaccatctatctgtcttaccccccacaggagccttctctgaaagcatctttgcctccctgaacagccccacccttgtagagcaaaactcttctctcaaggtggaagccattgagcatctcctcttcttgaaggccaacctggagcagttccccaactacaccccgcctcccctcatctgctctagtggtgacctggccaaggggatacagaccctgcagtccgctcagggtgggatggcagacatggcaggtgccggtgctcaccctgcccgtgaactcctagagagcccctgcctgtaataggtcaaagcagagagctgggtgttgcatcctgggcgccacatgctcatggccagaatcttaaacctatttggtaggaaagggtcagtttctcacttgacagattgccatatttttttttctgggagatgtcattttccatctcccgattacttcctttacgtctagcagtatgtgccgagaagaggcttactctcttcgtaggtgactgtgaattttgtactacgtggctttgtacatgtgatgctctgttaaaacataagtgggtatgaaggtccttgcatacaccttgtctgtgtggataagtggacacatgcccttaagaggcttgctttctcaaaaggtggccaaggatgtggagtgggcatgtgctggcaggtgggatatgtcctcggcctttgggggcctggataagctattgcagcactttctgaggctttcactgtagggagaaggaaaccccaagggtagaatagccatttccagagggaagtacacacatacccccacacaccagtctttttgggggtttcagagtggccggagaaaccgactgaagggactgaccagctagctaggagggctgagacgccagtcctcaaatggcgttcttaccaatagtctatttccagactactggaaacgttggggtttcttcctccagtgacagcagcctcagtagctttcctgggctccaggcggctggctgcacaccctgcctgccatcacccttgcccctgcttgtcctggaccacttttaaaggggaagtcccttatttggaagagagaaaggatgtgtgtagcacacactcatcatggattgctcagagttcctttagggcagagctgagggcctgggatccaggaaccagtgggattggatgggagaagaaggaagggggtggcccgtcacccccgcaagacttgcatccaggtagcctaaggactcctggtcactgggtagggtggctgctgagatgcaggtcggaagaggcaggggaaggctccaggcctaacttggagcatgtcactggccatgggggtgaggggacagactctgctctcactggctggcagccccaggagcctgttcccttgcctctcctggatgggttgtcagccctgtgtttcactgtgaccaattcattataacatttggatattactgaaaatgtaaggaagcaggaaaaattaactactttcattcagagatagcctctatcaatagtttgacatttttccctcttttacattgagatcataccctaggtactgtttagtatgcaatattttcattttcgcagtataataattgcacctgttaaataaagttttgtaaacatttaacaaaaaaaaaaaaaaaaaaaaaaa

SEQ ID NO: 24563 - DNA, 5270 bp, Homo Sapiens
ggaaacaaaaacaacaccatatatttatgaacctcagtgaaccagcctagaaaaattgacttctgcaggtgctaaagcacctactaatacgcagcatgcacagcatttcaggttgtgaataccattttacaacgagtttgctgttaactctctttatccaatgcaaacttgaaattctgatgcggttttccagggtggtattttttcagagtattgaatttactatttagtaatttatagtatagctttttatattaaaatgtgatatttttaaaagagatatctggttcaattggtataatgacgtgattatgcaatatgctgatctacaccttgcgctcacattgtgccaaacttaaatgtgcaagtgtacgtgagaaaagcacatgtgaatgtgaattctttaattctttgcttattatgttaaaattagtcttcatagtccactgatgtgtatgcttgaataatgtctatttactttggaatttcaagatttccagcttcaatggtaatttataatttctcagatcaccttaagaaatattgagatactctcccacctgaaaataatctgttctttaacccacctgactatgggagtagccaggcaggtgcctcactggcttcttcagacgaggcttcctcaggtggatatatgactattaggggaaaagaggcttttgagacagcttattacctccttcccctttttgaactaagtacattgtctcagtcccagtatgaatttgtcccatttggggtatttttaaaataaaagatggctaacatggaatctggggcatagccttggcctttaattatggttgtaagcccaaataatggcagagaaacacagggctgtttttacaacagaaaactcaatataagttttatataagaatcctataaaatttgaaccagagctcctatttagttgttataatgtctcctaaagatcttaaatgcttctaaaagctaattattattccagagcaactttttccttttcccccttataaagtttttttttaaatccaaaatcttagatttctgtgccacagcaaaataaaatgatcaacaattaaagatctgtacttaaaatagtacaccatttttagtggagggagggtgcatgcctatatgatggtaagattcttttgaactctaaggacaattcctcatggaaaaaataaatttcagtgcatattataaaaatgatttgcactgtgttagcaaaataaggtgttttaggttgtattttaaagacaattctaaatcatttctctggaaagcaagaccttaaattcttctctttaatagaactgcttttatgcaaagagatggtcttaacatggactaaacagtacataacaataatgtttgttatgtaaatagtatatcacatttgcttagtagcacaattcaacagcaggctgaaagtcgtggctcctctgctcagattgagttttaagttacctaatttatgtaatcagaatctattctaggtggccgtcaacgtaaactgtgtttccctattatatccctctggagactgagaatcaaattaaatagtctttcttcaaagcagtactgtaacatgaatgtatttatctcagtcaacagaacttatatgcccactgtatgtggagcttatttcaatgctaatttggcttagttagcagacctagaatctgcccaggtgagacctagaacaaaaatagctggggtgaaatggataagagaggtagaggtatatgtcaaggcagagccctatgaggaaggaagagttttcaaagaatatgaggaacatagtgctgagagtgtggctgccttcagcaccgtacacctaatctagagaaaatatttcccatgtgggaggtcctgtctgcattcagtccacccttttctgcctgcttcttcctccaagtgcctcaacctctacatgctcactctcctccccttccctcagcccatcttggtctaagcagctttcacaatccaaaccaaacatcaccagccacccgctgataagtcaccagcatttacttccctgagttactttttctccattcattgagactatggattcatcccaactccttctaaatccctcaaccatccagctatattttggctaacctttgccctagacactctaccagatgttaatgcagtatcaagtgtaaattgtgtcaccctattctgttctacccttttccctgctgccgaaatatcttgctctcctctacctcatccccaaagagcctataaattcagagtatccaaccttttcatggattcactcactgttgttcagtaatacaacttccatattttaaataaatcataaaagatttttgccttctatcaaagtaggaaactttatatttatacatgatacagaaattgaactatttctatcgttcagaatttagcatataacaggattttaaagtgattgaattgccatcctaacttggatttgtattaggttatgaatgaatactgttgttagtccaagctatttgaatgtaaagttaaaattctccagcaatccagaatgacttgtaacccttcagtggaatgggaaatttctggtatgcaaatagggtggtgttccagacatttgttttattggtggtgtttgggccttgaaacacatttctaatagaatgacatatggcaaagggtatttagatggtcctatgggatcacagaagcccatatgatttaaaatatagataaaataacacaaaattgggtacataagggtttaaccaggctttcctgggttagactaagcctctaacctctgttcctatcctgttcttatgggaggaaaaaaaatgttccatgggatgaaaagaaaatgcattgactttgtagtctttattctcctagccgcacttcgggtatatccagaaggaagaggaaatgcaaagaggaagaagatgtaatagttcttctctccagctaggtgcacttgaggttgttcataaatgtaaaattatgtcaggtttctaacatgggacactgcacacagttgtctgacctgatgaaccatcccatttgaaagtatagattattattatttcttgtagtatttggttgttttccatctcattcatgaacaactcaacctgatagtagtatccaataaatgcctttcagggctcaggaatgaattgacatcctagttaagaaatgagacttaataatggagactgaggcggtttgtattaaattatatgccatgaagtgttcattttagctttaacctaattatgactgtaccaccatgaagtacagaatgaaaaattatatatatgggggggaaacagaatgaatatctgattcttttgaatgcttgtggaaatctttgagatcgtgcagggcataccacaaaatagcctttagaacagatacccaattttacagttcataggacaacatcaaacattagtaagtctaaataagatgaatagaatttttgttatgtaaattttgctagaacagtctattttcttgcaccccctcaagttaacctcttaaaaaaatgaatgtataatttctaccgaaagaatatcagagagaatctctctggcctatagtgttaaaatattgttcacaaatcctgattagttaagtgcatacattatgaaacttacagaataaaacttattatacatctctttcttaaattaatatctttacacattttcaactggctccccaagtctgataaggaaggattaaaagaaaaaagaaatgtattagttgggtggccaaggagtttcctttgtaatgttgagagacttccgctttctgaatttcgctggttctctaaggtaaaagagttaaatagtacccttgttcaccaaggaaagtgatccaaactatatatctagtgcagatatttcctttgcattattcagtcttctctggagagaaaatacagtttccccttcctctttctcttcacatttactcttttcaacccaaaataagagacatagaaagcaaaccacagccagtttggcatcttctcagtgctactagtataggcacatacacatacacagtctcagcaaggttataaagaaccctgtcaggtccacttgcaacatggccttgctacttggattagctcctttaagcctgaaaataactttcctggtcatggaagaactggacgcatcttttaacttatgaaatagaagttgaacttgaaaactctttttaaaaaatcctggttttgcaggacagctacataatgaatgtatatattaagactgtagctgaattgcacatgaaatcagattgccaacttcttgactttcaatgttagacatttatccttaagttgtgagcgatatatgtagcatgctgtgaaatgtctgttatagctctttaattcatcagtattaatacagaattatcatttgcgtttcttggtactttttattcaatgtaatcagaagctgtgatgttttgcctttgtagtcctgtgctttgttactgtaattttttttttttttttttacgaagcacgtgactggactaatgtaaggcagatgacgtgatctttaagactgctatatatatcagtctcttactctataaggttttaaattagaataagcttttatcaaatagataattgatgcaatttaggattcacgcaagtttcagtgtcaaatggcggtcttatagtttcaattctgaaaatagcaaacttaataaacagccactttaaacttgttctggcaaaccagaccctgctgtagatatagtctaaggtagttaaccatataagccttttcaactcttaatgccctccacatgaatcagcagttaagaaggttctagaacccatgaaagcttttgtatgtattactaggttttgtttttcttatgtttgctgattttacagttctgactaaagctgacctaaatggatcagtttatgtgtaatattctagtgctttaatgactctttttttctttggagggagggtaacattatttggacagatgcagaaggaactgttagtgagtcaagacaaacacatctgaaataaaggaactgtgtattaacatgttaacaattcataactgcactttttatgacattttgaaaatctatttataggtacagaacaatgggttttgttaaactgtatcacatttatacttgcagaaatttatttcattgttattagtaggaattttattggttcaataaaattggcaaaactgaaaaaaaaaaa

SEQ ID NO: 24564 - DNA, 3340 bp, Homo Sapiens
ggggagtgtaggccagggggttggcggtgccgtgtcatggaggctcagtctctgagcagccattgaaggggaaggaactgcgggtgtgtgtgtgtatgtgtgtgtgtatgtgtgtgcgtgcgtgcgtgcgtgtgtgtgcgcgcgctagtgtgtggacaaggaggtgggggcagctgagttagagtcccaactcttggactccatttgctattctcttctttctcccccacacctatctggtggtggtagtgggcgtttatatttgcgttccttttcattcatttctaaatctcttaaaaattttgggttgggggtattggggaaggcaggaaagggaaaaggagagtagtagctgaagagcaagaggaggacatggagatgaagaagaagattaacctggagttaaggaacagatccccggaggaggtgacagagttagtccttgataattgcctgtgtgtcaatggggaaattgaaggcctgaatgatactttcaaagaactagaatttctgagtatggctaatgtggaactaagttcgctggcccggcttcccagcttaaataaacttcgaaaattggagcttagtgataatataatttctggaggcttggaagtcctggcagagaaatgtccaaatcttacctacctcaatctgagtggaaacaaaataaaagatctcagtacagtagaagctctgcaaaatcttaaaaatttgaaaagtcttgacctgtttaactgtgagatcacaaacctggaagattatagagaaagtatttttgaactactgcagcaaatcacatacttagatggatttgatcaggaggataatgaagcgccggactctgaagaggaggatgatgaggatggcgatgaagatgatgaagaggaagaggaaaatgaagctggtccaccggaaggatatgaggaagaggaggaggaagaggaagaggaggatgaggatgaggatgaagatgaagatgaagcaggttcagagttgggagagggagaagaggaagtgggcctctcatacttaatgaaagaagaaattcaggatgaagaagatgatgatgactatgttgaagaaggggaagaagaggaagaagaggaagaaggaggtcttcgaggggagaagaggaaacgagatgctgaagacgatggagaggaagaagatgactagatcattctaagaccagattctctaatgtttctgggtgtgcaatagagtgatcacatctttgtttcttcatgtacgatagctatccctacagaagataatgtgtaactttttataggaaaagtgtggttttactatttttgccttatcattccaaataagaactagtctgttaatgatcatattgtatgtagagaaaaattttcattgactcccattgtggaattccctagcaatttatttagacttaattttttaaattcaagcttactgtattagtcatttttagcccataattaaaacatgatcacttttacacaggtgtagtatggtgcatttcattccttatttataaattaactgaaattacagtttgctataatataaaatgacaatagtctcttgagtggtaagttggttatttttttagaggtgatccaggaatctttagtttgaaggcagttacctttttttttttttttttttttttgactaagagtgtttggttgcttttttgccacaagtaacttggaaaatagaagcagaatagtaaaggttctattcagcaacatagttcatggattttgtggaggttctattcagtaatatggttcatggatttagtggtgactgataagattttatttttgaaggaaaaattgcttatactaagtccagagacatgcaggtgagcccttttgtcaggctgcaaatcatgacatgccgatggttgtttattttgtttttaggtgtgcattctttttcttcttagcaattcctttatgatcaccttcccttcttgtttcactccctcccgctctctcaaaaggaacttgggaaacttgtgaaacccaggaaaacctttagtcttatacctcaactacctttcagtcctgtctgggttttaaataagtgaagtagaagaaattgagtattttctgacataagaatatattatcaatacagttttatgcagtaagctctccttaccataaatgtttcttggttgacaacatctaagacaatattagtgggatgaagaaagaaaagcaggggtgcttttggaagcagtgttagtgttcctcaaaagtcggaacaattgcctgttgatatattaataagacattaaagtcaaattttaatgttggcctctcaaatgatttggataccactctgcaaagtatttctaacctttaattcccagttttaaaacagatataataatagcatttaattggaatatactaggcagctggaaaagtatttgaaactaaattgacattaaaattaagatttgttttcaagtggatgtccattaaaagtagaaaaatatttgggataagtgagtgtgtgtttccttacatggctactaaataaaatataatgagtatacaagtatatctcctcttttgctatggaggctccatgttctaggatatggctttttgggtcttggctgtctaaaattttttccctttgttttgaatatttgtaagtttttaagaagttagtgtcagcaaattaattgaagttatgcttctatactgggacatatttaaatactgagtatagtactgctgctactgcttctacaatgtaaaatgtatgacttggtgttttaaagtaaaaattatgatgttacttgtggagaaactaaaaatgttgtacaactgaccgaaagaaaacccttggggataagtttagtgaggggattggaatccccaaaaagataacatatttcttctgcttttaaaaactgaaattccctgttctagttcctaacaattctcattacatactatgccagattacaaaatacttatttttaaaatgaaatctatatattgactttcttatcaatcatcttactgtgcaatcaaaattagagtactttggtttgaaaacaacacttagagcctccagataacttttaagacttatttagctttgtgggtggtattttcatgcaaataagtaagggtgggttttatattttgtagaagttttcggtcctattttaatgctctttgtatggcagtatgtatatattgtgttaagttcctcaagaatctccttaaaaactttgaagttaatacttttgtgcaactgtgttttgaataaagccatgacagtgttaaaaacaaacaaaaaacaaaaaaaaaaa

SEQ ID NO: 24565 - DNA, 6790 bp, Homo Sapiens
ggagatattttcttgttcaatttaaggagaggtaaatttggtatcaatagaaaaaatgtttctgaaaaatttaaaccctggaaatgtatttatggcatggagtcagatgtttcagggagagaagaacaaatcaagaagcattgcaagtatgctcatatggaatgcttaaggcttgtggttaaaaaatatatatatatggctgtcaatgtcttaggctcatggtagcagcagaaatcgtaataattcttttgtcacatgggttatatccatattggagagaattaactcaggtgaaattaacttgtacactgtttggttttataatatttagagggatcacaactgactgatgtccctttgaagtaccattcttcataaatcttttttttttcagaatgggccagccaactgtgacatcccttggatcggagatttagaactagaaagtattctttctacattattagggaagaaaaggagttacttggcggttagcaatattctattttgttttgttttgtttttagagacagggtctcattatgttgaccaggctggcctcgagctcctgggctcaagcaatgctcccacctcagcctcccaagtagctgggactacgggcatgtgccactacacctggcagtgtttattctgataaatacatttatgagctcaaaaatgtaactctaaaaccttatctctgaacttccatattaccatcagaaatttagatagttgtttagttctctttttctttgtagaacatagatataaggcatggtttcattgaagtcagttgtatatacatgtaactatcctgatgttcccaaataaagctctgtatttatgcttagtttattggggaggctgctaaatgtagtgcatcccaacccattttaccctgttctactttaaaaagaggttggcttcttgtttggatacaaggaccaagtcactcccccaggttcctccacagtaagggaggcctatttaaagccgcccatggcactaacagaaactggactcctatgagctcagatacataactgggcctcacaggggtgggacagtatgtagtctaggaattggaaggatccattccatatcaaagaactgaagcatcgtgttgccctctcagcagcaagagtaaggtgatgcccctgtcagttatagttcctgagttcctctgtctttgattctttgcctattagccagctagctcaccctcttgtttatgccactgttttttatcctattcatgccttctcacagacaacttttcttacctacagctttggactcatccttgtctcctttctgtttctttttcactttcccttcccatcaccaactttctgggtttttttctgtttcttcttagagtccagtggcagggagaaacttgtcagtccagtctgttgccatttttcctgtttgagaaagactcaccagcttttggctggctcacagattggctttccttgggtcaggacccacccttttccctgccagctttggaagcttgacagaattcgagtgtgcagtggtggtaaataaatagtaaggaacacagagcagtcctggaggcgtgcctccatctgctgatgagaaaatccagtgctgtcatccagcccaggtcccagcggaatgggcctctctgttcagtaggatccccctcctgctgagtggttcatggcatgtttctgttcaacgcttttccatctgtaggattcttattctgtatttatttgtttttttgggtttttttattttttgagatggagtctcgctctgtcgcccaggctggagtgcagtggcacgaccccagctcgctgcagcctctgcctcccaggacgagggagatcctcccacctcagccttccacgtagctgggactacaggcatgcaccacaggcatgcaccaccacgccagctaatttttgtatttttggtagagacagggttgcatcatgttgcccaggctggtcttgaatgcctgagctcaagcaatctatttgccttggcctcccaaagtgctgggattacaggcatgagccaccacggccagccttctcatttgttttttttataaggaagctatctcttcttccctccccaactagggtattctttttccctttcgtcactttgctcatgtactgtattccttcaacttcattaatgaatccatttggaagcagtgaaaaaggcaactcagaaagctaagaagaaatagatagaggaatactcagagctatctgagtattttctttagtttgttagctctttggagctttgaaactggaaagacccagggagtgatgtggagaaagagactgagcttgtaagacacaggagcagtgagctaagggagatggagtagtggggacaaattctggcacattctgtctacactctgggtagatagaggagggaggatggagcacccatggtgggggtatgttggtgacagcattttcccaccagccagtgtaacaagtggctgatttgggggaaagatggcataaacaaatgagagaatgtgtttactatttgatgtagatgggttatttgcttcatttttcaaatcagtgtatataatcaagaatattcagcatgtttgaatagactgtcagagctggaactctttcattaacatctctggcacctttagttttagccctgaacattttatcttaaaattaaacattaccaaatgccttagtttatttcatttattaaatttatattcttatttgttatttatatcagcttccaatcagaagactatacaacctcctaggaataactgaagtgaagtgatggactccgatttggagagtagtaagacgtgaaaggaatacacttgtgtttaagcaccatggccttgatgattcactgttggggagaagaaacaagaaaagtaactggttgtcacctatgagacccttacgtgattgttagttaagtttttattcaaagcagctgtaatttagttaataaaataattatgatctatgttgtttgcccaattgagatccagttttttgttgttatttttaatcaattaggggcaatagtagaatggacaatttccaagaatgatgcctttcaggtcctagggcctctggcctctaggtaaccagtttaaattggttcagggtgataactacttagcactgcccctggtgattaccccagagatatctatgaaaaccagtggcttccatcaaacctttgccaactcaggttcacagcagctttgggcagttatggcagtatggcattagctgagaggtgtctgccacttctgggtcaatggaataataaattaagtacaggcaggaatttggttgggagcatcttgtatgatctccgtatgatgtgatattgatggagatagtggtcctcattcttgggggttgccattcccacattcccccttcaacaaacagtgtaacaggtccttcccagatttagggtacttttattgatggatatgttttccttttattcacataaccccttgaaaccctgtcttgtcctcctgttacttgcttctgctgtacaagatgtagcaccttttctcctctttgaacgtggtctagtgacacggtagcaccagttgcaggaaggagccagacttgttctcagagcactgtgttcacacttttcagcaaaaatagctatggttgtaacatatgtattcccttcctctgatttgaaggcaaaaatctacagtgtttcttcacttcttttctgatctggggcatgaaaaaagcaagattgaaatttgaactatgagtctcctgcatggcaacaaaatgtgtgtcaccatcaggccaacaggccagcccttgaatggggatttattactgttgtatctatgttgcatgataaacattcatcaccttcctcctgtagtcctgcctcgtactccccttcccctatgattgaaaagtaaacaaaacccacatttcctatcctggttagaagaaaataaatgttctgacagttgtgatcgcctggagtacttttagacttttagcattcgttttttacctgtttgtggatgtgtgtttgtatgtgcatacgtatgagataggcacatgcatcttctgtatggacaaaggtggggtacctacaggagagcaaaggttaattttgtgcttttagtaaaaacatttaaatacaaagttctttattgggcggaattatatttgatgcaaatatttgatcacttaaaacttttaaaacttctaggtaatttgccacgctttttgactgctcaccaataccctgtaaaaatacgtaattcttcctgtttgtgtaataagatattcatatttgtagttgcattaataatagttatttcttagtccatcagatgttcccgtgtgcctcttttatgccaaattgattgtcatatttcatgttgggaccaagtagtttgcccatggcaaacctaaatttatgacctgctgaggcctctcagaaaactgagcatactagcaagacagctcttcttgaaaaaaaaaatatgtatacacaaatatatacgtatatctatatatacgtatgtatatacacacatgtatattcttccttgattgtgtagctgtccaaaataataacatatatagagggagctgtattcctttatacaaatctgatggctcctgcagcactttttccttctgaaaatatttacattttgctaacctagtttgttactttaaaaatcagttttgatgaaaggagggaaaagcagatggacttgaaaaagatccaagctcctattagaaaaggtatgaaaatctttatagtaaaattttttataaactaaagttgtaccttttaatatgtagtaaactctcatttatttggggttcgctcttggatctcatccatccattgtgttctctttaatgctgcctgccttttgaggcattcactgccctagacaatgccaccagagatagtgggggaaatgccagatgaaaccaactcttgctctcactagttgtcagcttctctggataagtgaccacagaagcaggagtcctcctgcttgggcatcattgggccagttccttctctttaaatcagatttgtaatggctcccaaattccatcacatcacatttaaattgcagacagtgttttgcacatcatgtatctgttttgtcccataatatgctttttactccctgatcccagtttctgctgttgactcttccattcagttttattaattgtgtgttctcacagtgacaccatttgtccttttctgcaacaacctttccagctacttttgccaaattctatttgtcttctccttcaaaacattctcctttgcagttcctcttcatctgtgtagctgctcttttgtctcttaacttaccattcctatagtactttatgcatctctgcttagttctattagttttttggccttgctcttctccttgattttaaaattccttctatagctagagcttttctttctttcattctctcttcctgcagtgttttgcatacatcagaagctaggtacataagttaaatgattgagagttggctgtatttagatttatcactttttaatagggtgagcttgagagttttctttctttctggtttttttttttttttttttttttttttgactaatttcacatgctctaaaaaccttcaaaggtgattatttttctcctggaaactccaggtccattctgtttaaatccctaagaatgtcagaattaaaataacagggctatcccgtaattggaaatatttcttttttcaggatgctatagtcaatttagtaagtggccaccaaattgttatttgcactaacaaagctcaaaacacgataagtttactcctccatctcagtaataaaaattaagctgtaatcaaccttctaggtttctcttgtcttaaaatgggtattcaaaaatggggatctgtggtgtatgtatggaaacacatactccttaatttacctgttgttggaaactggagaaatgattgtcgggcaaccgtttattttttattgtattttatttggttgagggatttttttataaacagttttacttgtgtcatattttaaaattactaactgccatcacctgctggggtcctttgttaggtcattttcagtgactaatagggataatccaggtaactttgaagagatgagcagggagtgaccaggcagttttcttgcctttagctttgacagttcttaattaagatcattgaagaccagctttctcataaatttctctttttgaaaaaagaaagcatttgtactaagctcctctgtaagacaacatcttaaatcttaaaagtgttgttatcatgactggtgagagaagaaaacgttttgtttttattaaatggagcattatttacaaaaagccattgttgagaattagatcccacatcgtataaatatctattaaccattctaaataaagagaactccagtgttgctatgtgcaagatcctctcttggagcttttttgcatagcaattaaaggtgtgctatttgtcagtagccatttttttgcagtgatttgaagaccaaagttgttttacagctgtgttaccgttaaaggtttttttttttatatgtattaaatcaatttatcactgtttaaagctttgaatatctgcaatctttgccaaggtacttttttatttaaaaaaaaacataactttgtaaatattaccctgtaatattatatatacttaataaaacattttaagctataaaaaaa

SEQ ID NO: 24566 - DNA, 9935 bp, Homo Sapiens
aacatggccgagaccagcgaggaggtggcggtgctggtgcagcgggttgtgaaggacatcactaacgccttcaggaggaacccacacatgaaagagctgatcctctctggcactttaaatccaattaaggatttacatctgggaaaactcgccttaaccaagtttccaaagagtccagaaacatggattcacaggcgatgggtgctacaacagctaattcaggaaacctccttgccttcctttgtgaccaaaggaaacttgggaacaattcccacagaaagggcacagcgactcatacaagaagagatggaggtctgtggtgaagcagcagggagatacccaagcaactataatgcttggtcccatcgcatctgggttttacagcacttggccaagctagatgtcaagattcttcttgatgaactatcttctactaaacattgggcatctatgcacgtttcagaccacagtggatttcactaccgccagtttttgcttaagtctttgattagccaaactgtgatagacagttctgtgatggagcaaaatcctttgagaagtgagccagccctagttcctccaaaagatgaagaagcagcagtttcaacagaagaaccaaggattaatcttccccatcttctagaagaagaagttgaattcagcactgatcttattgattcctacccaggacatgaaaccctttggtgtcataggcggcatattttctaccttcagcatcacttaaatggtaggtttcctcacagcatgacccagttgtcacctgcagacagccctggggggactttgagtgacttgcaccttatcccagcaggctcccagctgtctcaagcaatggaagtagatggactgaatgactctagcaagcaaggctattcccaggaaaccaaacgcctgaagcggacgccagttccagactccctaggcctagaaatggagcacaggttcattgatcaagtattgtccacctgtcggaacgtggagcaagccaggtttgccagtgcatacaggaaatggctggttactttgagtcaatgaaagaggtgaattagtcctacaaggttccccttttagtgcaatattgctttcttttattatttacatagttgcatgaactgtttactattattggctaaccatatgttcttcgtctttaggttgaaagtccatagtaaatctttcattttatttattttgttaataactggcattcctgtggggataaaataatcgtatagttccttcctgctgaacagcgagtcttaaattttctgtttaacttctcaccctttgtatttctatatgtggggcttctcatttggttttcctgattggttcacacacacacacctctacccccctcagtccaattgctgcataggcaaattcttttaaaaattaaaaatttaaggcctaggcaggaggattgcctgagcccaggactttgagaccaacctgggccacatagcaagacccgatttctacaaaaagtaaaacaaaatagctaggcatggtgctatgcaactgtgttcctagctatgcaggaagctgaggcagaaggattgcttgagccccaggtgtttgtggctgtagtgagccatgattgcaccactgtactcagcctgggcaatagagttgagaccctgtctctaaaacaaattgaaaataaacatttatgttgcagttcaactgaagaatgttggtatgaatgccgaataacttgatgtaattgttttgagaatcaaatggctagatgggcgaatgtttaaaaatgtaaactagttctctttctctagcatgttctacccaattaccaaagtcagaagtattggaatttatatgaaaaaaatgcttccaatgtaatccattttttaaatggttatttaagaaaaaactaacttaagagtttatgtaattgcagtaaaggaaaattatttttattgctagttttgatagattatttttacctcaaatttggtatatgccaaaacacatcagtccttataaaattgatttttttttcctgaaaacctggaatgccatttttagctattactactttttaatttcaaattcacttatgacaaatgggagaaatatataaagaaatagatccataaaaatattcctttttaaaaatctaaattattgaggatacactatggaaactataaaattatcatgaagtgactgttaaagtttactggcaaatgccaagggaaggaatagtatgtgcaaaacaaaacactttgatactgaacttaatcagggatgaggtaccaaagtatccacattatagccgtatcttatgtttccaataacaagggctgagtttttcaggtaggtgggatgagggtggggaatgggccatgtaatgtctgctttcttatatttgcccttttgtaagtggtctgtttcttcttttcatatactttgttttgccaatccattacgtgttttttgtcacttttgtgtgtcatttttgtatatctttcctttcttacttcaggggtgtgtcttcaagatttctaccccctatttgcaatgaatttcatacctcatctaaaatacattcatataccagaaatatgaagagtggcccttctaaaagtttccctaatgatggaagctgtcagttgtcctatctgtgcagaatgtgagtaatagtggcagaaataagtgtgacaacaatgctttgcctgttgttctttttacttgctaggtaatttgtaaagtggggataaagatgtagggaaagtaaacctctctctcactgttacggaaagcctggacttgagttaggtagactgccttaaagaagaagaaatatgtccttttctttggcatcatggttttgttgagtggcagactgttgaagtgagttgagacttaagaacgccagaaaagttgtctagcctggccccagtagacagaatttgttcttctctcaagtaaaaaattacctttttatagcttttatattatttagatgaaaaaataccattatgaacataattccatggccctttgtgtacaaagcatattttgaattaaatacctcaaggtccacctagacctctatggataaaatcataagtttatgatttttagctcctgtgagtgtttgggggcaaactacacagagaagacatgggtggttcagcccattccactaaaatatgttgccagattctggcctaactcagtattaccttttttcctaaaaatcatttttcacattttgagtaatagggcttatgctttgatgtgaaaaaatgtcaggaaatgagtgtagacaataccctataaaacactagctaagttttatagtgctccatgcctttgtgtaccttccactgattatcttgcctatctttggtgtgtaaactattttcatatcttctaaggctcttaacccactcttttctgaagccgcacagtcctttaatatgtcttgtttccttcctaaaagtttaaagtagagagcaaaaatgcaaatacccaaaggatactgttagtatgtaacttttgtgtgctgctttatttctagagtttgcattttttaattgttcattcacagaaaatcctaatattgccctatatggttggtttttttcctaagtggttaatatttaaacccgctagctgtagcatgataatgtctttgactgagcttatgtagtagaaaggatgtgtctgttttctgggacttttagtcttcacttatttttctataacaatctaattgttaaaaggaaaagatggcttattgacacatatttcattaaactttcactggaagaacagtgggtcatcctactgtggattaagaatactactgacaagcaaaaagcattaagctctgtaactgtctccaacaccaccttcaccccgcctttagtgtaccttagtgtactttagtgtacctattttggcagtacggtgttttccagattctacttgtgccctgcacattgtgaggactcattaaatatttattaaattaatgaatgactaacaggaagagaaagattgtttgtgagtgttaagaatgagtgatgattgagaaattgatggattagtgcaatggattgggaatgaatgatgctttctagtttcgtaatacttgggaagagctattgcatatagagtaagttgatttagactttttttttcttcatttcattaccttgtttaaacttgttaaatcccagccaagaaatgcagctctgtaattgtcaattaactgtattataatatatattaaaaatttgtagagctaaagaacccacttgcattaagaacaccactttctgttcatttgtgatactagaggacagatcctgcatacagagccgaaactgcttttaatcatctgaagaaattctttgatttcagtgacttactgatctgtacctgtgcacatatcattttatgcttctccttttttccccgcaacttgaactgtgactctttcagatatttcttaaatctgtatgagtcatttttttaagcttagggatttgatatgtattaatgtcccctttgtcttctgtagattttagcattttattacctcttaagaaactctgggcccagactttcagtcatatttcttattcctatggtacagttctcacttaaaggcttaattattagtagggttaaatatatacaggttatctctaaaagtacttaaatttttaaataagggcttatgtgatacaagatacggaaacaaaagtttttggatttttatgcagtagtttgcaggaaagcaaatacatagtagatcgtatgccacttaggtatgttcaggtcatgccagtttattcttgttgggccacacacacatgtatgtgtgtgtaaaaggaatttttagtattgaagcaaacaaattgtcagtttaataattttctcttacatagcacaagatggcagataccacctactgtacaacaatctaataatccctaccttagttcccctgagttatagaagatgctaaagatttagttgtaaagggaagtaacatgatttttttttttctaaaaagctgttttaagctaactattattttgctactggaaaattatattttaaaacttacagatatttaaagtatgctagaaaatttgaacctgataacaactgaaccttttgtcttgaataaatttctcaaatagaactgtgcaaaccctagcactttatgtgttgctgcctccccatacctaggtatgctctgtaataagctcccatttaatggagagatgtgtggaggcactgagaagttaatgaagaaaaatcaaccctaagaaatccttattgtcacatagtgtcttttaaaaaataactgtagagactgtgttaattcgagtgcctttcttacttttttgggagcaagattatatttaatgtttaagaaaacaggatggaagttttatcaaacagttgattgtggcccattgttttatttattcccatcgctaggcatggccccgcagggtattttatccttcagtgagagactgatataagcaggcaggatgctttgattattccattagttaccattttaagcaccctaccaagatttagttctttctttctggcaactaacgttttgggggttggaggcatcccatttagaggatggtgtgtgcacaaatagattagcctgaaacctgcgtccaaagggaaacagtggcactctgccctaaaataaaggccagaacgttgtcctaaatgaatcctttgccttactttaggaccttccttccctctcaaattcaggcataatgtaatatagttgaaagggggaaaacagtacttgctttctctcaggtattggaggaaaagaagtaaatgcgtagatgaaattttaaatgtatcattttatctgtttgtatatggagaagggagggataggaattccatatttcaagatagcaaatataatttcatagaaatatatagctaaagattccaaagtgcttttacagagaactgttgaataatatattcctaaagggcagcaatatgccatgttcatggtgaagacagaaaaccaatgaatcagttgtggatctcaggtgggagaggaaacctcaggctcccaactttgacttctctactctcaccaggccatgttaacactgtaaaaccaaactctttgctaagaacaatacagggcagtagtttagtctgctgatgaaaccttgtgcttccaagaatattagctatatataatttgtgctttctggatgattctattgtccagaaagctaaccctgacgttacttttattagtctgttgttattcctcagggtgtagaagatttagtaaattcaggacaaattttatattcagtggcaaaaagaaaaggcaaaaatatgctaaatatattattagctcttaaattttagtatagatcgtattttttataaactattaccagtacagtagctagtagatattctgtgactgcctcattgtttatcttgctgctttggtccctatggctctagtatgaacattctcgtgtcttctgtggaaatgatttctgtgttatagttccatctttggtagaggtggggatgattgtattttgttttagttgacatcattctcaacttttagaaatactgttgaggaaaatgattaccgttggttttcaaattgacaactattttgcttccaaagacttcagtttccctttgttttatgtgtagacctcatatatgttcaacacattgcatactgccttgcacattgtaggaattcaacaagtcaagagttgataaaagctagaaagataaaactagcttagctatcatatcatcattgtccatattcttagctttgggaaaaatataccattttgcataaaatacataatcagtttcaaatgcataaggcaaagatatacagttgcacaacattgcaagtgaaatttacaaaggatttttatttttgtgtatgctaaaagtgctcctacttaaagcagttttctttattagaccaacaccttccagcaaagttagaaaccaaacacaagtgctcatttgcccaaattaaccagatagttatgtaaactgttcatattaagtctttagtggtttacaaacaataacattctggcttttcttccataccttttaggaatcagccttaattttaagtatagcagtcactttcctcaaggtactatgcagcatactttagattgcttatttatcattataaggtgataggtaataaatttgaggtttacttgtcatataatttcatatggcagatattgattcaaggagcattctattagaaaaagttgataaattatcctcccttacaaatatcatcttgcatttggagcaggtatttttttcttattagttaaagactgggtacagttatagtagatgctcaataaatgcttagtcagtgattgatctaacatcaaactaacagctttcagaaaggagactgttgacatcttttcaccaaggagtatatttgtagagtaatatatgtgtggaattttgaaattatatcatttgacatgatttatgaggcttatttaagctggagttagtaacgtaatagaagtattatttatacagaacatagttgaaagataggagatgtgaaagattaagtagtattttcttgtgcaaggcatattaataaatgtaattaaatgtcttaataagcagctggctgaactctagagagaactgctgtagtcttctgcaatcagtctctgtattggtatatccagtactatcgggtttaggttctttttatttttccttaaatcttacttgtttctagcgtcttaagagtggtaatggtaaaatgtgaagttacaataaacttctgcttgttttctcagaacatctttggcatgaggaagaactttttgtgaatgatacagtagtctcagcatctgttaatttgtggttttcaaagcatttttgacagagtttacctaatgtaaaaagattaaacagttttataaaacacaaataaacattcctacctgaactgtgaggaacagagtgtatagtacaaatgtaattaggcattgcctcctggcgaggttcttgatgcatgacttcgatgctggctgctgactgaggtgaccactatcagtattgtactttggcatatgttgtttttaggaaaataatggaatgcattcttagattaacttactgtttttgagttggaaaaaataaaagatgaggtattataagtatgccaaatatttatacactacaaaagattaaaaaaggagagggagaaaaaaaaaggccagttatgattttaatagcgtctaattttttttttgactcgaattttgtggacactagtcaattgcataatttaacatggaggagctttcatttaaaagaagttctcagctactatattctgccattaaaattaaccatgcctgttaattttacattgcttgaagatataagtaagctgccgtcaatattgttttaagattttcttatagtttatgtttaaatggaaaagttacatatataatctatggtgcagggtcaggcattggccattaaagataagtttggctaactattttactgaagagactaatggtcttccctctgttgtactgctatgtttcttgatctgtttttccccaatgtaacagtctacattgaagtcctttagctctctccatatactaattgacatttgttaaggattcaatattttgtgaattctttttacccttaaaatgcatatctttcagagagataagaatgaattttgcaataatttatatgcagagtgtgcttatgggtttctgggagttcaagttagtaccccagagtgcttaaaagtatgatgctaaattctaaggctaatgtaatgactgtagattatctatgtccacattgttcaacagaaatataatgtgaaccacaacataatttttaattttctagtagccatattaaaaaagaaacaagcaaaattaattttaataacagtttatgtaacccagtatattaaaaatatcatttcaacatgtaatcaatataaaagattattaatgaaacaccttatcttctttttcttccatactaagtcttagatttgagtgtattttgcactcacagcacatctcaattctgactggccacattttaagtgctcagtagtcacatatggctaagggctactatactggacagtacagattcatagagtataaaatatgactttaactttggagatggtgaggtaggcctgtaattatggtactttaaaaattcagaatatttagaaaagcatctaatagaattatccacttgttttccttcatcttcattttaatatgttctagaagtaggatcagtctgttccaatttgccaagcattattaaggaggaataattccataccatgtaaaataccatgatatgctgattatactacattaacaaatttttaagttgcgttcactaaattctgtcctgtttcttcaaaataatatagcttaaattgcatgttaattgtatatcttacctattttgtttttatattattcttacaatataatcatgtatattaacaaacagccctgggattctaatcttcctctgcaactgtcttccaggacttactggcacttattacactgtgataagtggcagaaaagtagaatgaaatattctttttccattagatttgttcttatgtgaccatgtaccaagccagctataaagtattgtatttctgtagaatatggaaaatagtatttgtcttacctttgctaaatgtttgcaatttctaagtaaaccttttatctcctaaaaaaaaaaaaaaaaaaaaaaaaaaaaaaaaaaaaaaaaaaaagaaaaaaaaaaaaaaaaaa

SEQ ID NO: 24567 - DNA, 2883 bp, Homo Sapiens
ggagacagtactatgtcagttcagccacctattttgcattgttttctataaggaggcaaagcatatgtgttttcctgttatgcaccttttatagcctttaccactgtgtaatgttcacaaacaccaaagtaaaggaaaaatgcaggatgttaccgtaaaatccagctgctattcatggagctgaaaaacaaagcacaaataatagatagctaagttaagaactactaagtagtttatagaagtagggaaaaacgtaatactgctttttattcatgtctttaaagcctttttcagaataagtgccaatcactgatgttgtaaataatggtgccttaactttatatgcttccctggcacttcgtttctgatttttttcctgatttgataaataattagtacatagttttcactcacttgcagcttactaaagacaagaaattatgtacatgtactaatgtttttcccacaaaaaaatcctttacttctgatgtatgaattagttatctaaatagttaagcctaatacctgaataagactcaccaatgtgattgtacaataaattctatcattccattaaaatcctacatttattcccaggaatggtaatttcacctccctacatctatactccactccctcagtaaataagtgaaaattgttaacccatgtgcccattcctgagtagggcagactcttcacaagaggcccatgacaagaattctagggtccagattgaactttaatatagacctttgtctgtgtagaccagtttgtcttgtaaactgtcttacttatgtgtgtaaacattttacattcacatgaaaagttattttcctttatataattggattcagaatcataagggacaggactgaaattattctacagtaaccagtaagaataagattcggccgggcacggtggctcctgcctgtaatcccaacactttgggaggccaaggtgggcggatcacctgaggtcaggagtttgagaccagcctggccaacatggtgaaaccccgtctctacacaaaaattagccaggcgtggtagcgggcatctgtaatcccagctacttggggggctgaggcaggagaatcgcttgaacccaggaggcggaggttgcagtgagccgagatcacgccactgcactcccgcctgggtgacaagagcaaaactccatcttaaaaaaaaagaaaaaaagagtaagattcatttttattagttactcaacttcagacacaattttgttaatttggatatatacatatataataactcatggttagaataaaaatacagatactttaaaaatggtaatagaaattgtaccaatcaggttgctgtgagaaaactgacaaaatatgcaataaagaataccaagagagaaaggacaatcgccaattcagtttcccagaacagaatttttatgaactgcacaaatgtttaatgtaaatggtgatacctacagggaagaaatagaagagttgataatatatcactgggacggggtgggggaaagacttgaaatttttggtgcctaacactaatggtccatatgtagttaaacccatgagtatggtatatgaatgtcttttttaaatgttaaaatgtgttgtctatttaataagttaattaaaatgcagatcaaagcaccaccatttgctttttccacagatcattaacatttccttaaagtatgtaagtacctttgcaaatgcaaatgtactagtaattttcacttaagcttttgagaccgaattccattccaccagttatcacttagccactgtaatttaaaaacaaacaaacaaacaaaaactgtcttggtagaggtcgttaattagactcaacatgtactgcctttttgcagtctattatgacagtgtcttttagcacaaataatagagctaaaaaatgtcctgtcacttccattataagaaatctggattcatatctaagtgtatattataatactgtacagttaagagttcagaacaagtggtaatgttttctcttaatttaactcattttgtgccttctttactcattcaaacacacatacattttacatatagtttatttctttatgaaatgctaatcttcagcccgtaccaaaaagtagtggagcctctttgcactactactatcaataaattttaaatcagttggatttttaagcattttttaaaagctgacattaaagtaaatctaaaaaaagtttaacaaactggccaagacactaatttttatgtataatcacaatattttatactcacctttattgactaaaaataattatgctacatgttgtcctgcatcagaagaattatttcttcttgccagtgttttgggatttgaagataatggttcactcaaagaacctattattttctctactgaggaacccaatgtagaacttgcactgatatttttattactgcctttatatgaatctataggtatctaaatgttaaggcatgtatgatctttgatcatttcttttttcaaattaaagttgtataaaagtttcaatatcttgccttaaattagttgcctattctttctaggattcaaatattgtgacatttaaaaaagaaaacattcacttttgaaacttagacttcagatcaaaaaggactgaacccccactatcataatccatacattcatttccatgttgtttgactagcagtgcatatatgaatgaatatggtaattaatcttacctataagaaccaaatactttaattatattaagatagtgaataaagatgtataatatttttattaataccttgaatatattcagtggattgaatgtgacttcataactgtactacgattgtattaaaatatttctggaacaaaaaaaaaaaaaaaa

SEQ ID NO: 24568 - DNA, 3008 bp, Homo Sapiens
gtagtgaaacttccttttatcaactttatgaagacacgtgggacttcctttctgaatgcctacacaaactctccaatttgttgcccatcacgcgcagcaatgtggagtggcctcttcactcacttaacagaatcttggaataattttaagggtctagatccaaattatacaacatggatggatgtcatggagaggcatggctaccgaacacagaaatttgggaaactggactatacttcaggacatcactccattagtaatcgtgtggaagcgtggacaagagatgttgctttcttactcagacaagaaggcaggcccatggttaatcttatccgtaacaggactaaagtcagagtgatggaaagggattggcagaatacagacaaagcagtaaactggttaagaaaggaagcaattaattacactgaaccatttgttatttacttgggattaaatttaccacacccttacccttcaccatcttctggagaaaattttggatcttcaacatttcacacatctctttattggcttgaaaaagtgtctcatgatgccatcaaaatcccaaagtggtcacctttgtcagaaatgcaccctgtagattattactcttcttatacaaaaaactgcactggaagatttacaaaaaaagaaattaagaatattagagcattttattatgctatgtgtgctgagacagatgccatgcttggtgaaattattttggcccttcatcaattagatcttcttcagaaaactattgtcatatactcctcagaccatggagagctggccatggaacatcgacagttttataaaatgagcatgtacgaggctagtgcacatgttccgcttttgatgatgggaccaggaattaaagccggcctacaagtatcaaatgtggtttctcttgtggatatttaccctaccatgcttgatattgctggaattcctctgcctcagaacctgagtggataccctttgttgccgttatcatcagaaacatttaagaatgaacataaagtcaaaaacctgcatccaccctggattctgagtgaattccatggatgtaatgtgaatgcctccacctacatgcttcgaactaaccactggaaatatatagcctattcggatggtgcatcaatattgcctcaactctttgatctttcctcggatccagatgaattaacaaatgttgctgtaaaatttccagaaattacttattctttggatcagaagcttcattccattataaactaccctaaagtttctgcttctgtccatcagtataataaagagcagtttatcaagtggaaacaaagtataggacagaattattcaaacgttatagcaaatcttaggtggcaccaagactggcagaaggaaccaaggaagtatgaaaatgcaattgatcagtggcttaaaacccatatgaatccaagagcagtttgaacaaaaagtttaaaaatagtgttctagagatacatataaatatattacaagatcataattatgtattttaaatgaaacagttttaataattaccaagttttggccgggcacagtggctcacacctgtaatcccaggactttgggaggctgaggaaagcagatcacaaggtcaagagattgagaccatcctggccaacatggtgaaaccctgtctctactaaaaatacaaaaattagctgggcgcggtggtgcacacctatagtctcagctactcagaggctgaggcaggaggatcgcttgaacccgggaggcagcagttgcagtgagctgagattgcgccactgtactccagcctggcaacagagtgagactgtgtcgcaaaaaaataaaaataaaataataataattaccaatttttcattattttgtaagaatgtagtgtattttaagataaaatgccaatgattataaaatcacatattttcaaaaatggttattatttaggcctttgtacaatttctaacaatttagtggaagtatcaaaagaattgaagcaaatactgtaacagttatgttcctttaaataatagagaatataaaatattgtaataatatgtatcataaaatagttgtatgtgagcatttgatggtgctcgatgagttacttgtatttgatgggattgtttggatgtatttaatgggagtatttggagtatttaacgggatgtaaaccctgaatgtacctgattttgttactgttttattttaataggtaatatatatacagggtaaaagcttcaaatggtacaaaagggttaacagtgatcgtgaagtctctgtcctttccctcttccctgccatccagttccccctccaagaagcaagtaccgaaaccacctgcttacgcatttttagagattggccacaaatttataaacaaatgtatatattcctttccccctacacaaacggtaacatactgcacacattgttctgcatgttgcttctttttccttttttttttcacttaacagtagatatctagaggtgaaattactgagtcaagactatatttagcaaaattacactagatactacaaattacctctaaagaaggtatactaactgataatctcaccatcaatgcatgtcttcttatcctttgccaacctaacagataaaaatgttctatttttatttttctttttatgagtaacgtagagcatattttcatgtatttaacagccactggaatctgctttaccatggcctttcctatttctattctttgcctatttttctgttggttgttggtctttgttttgtattacaggtgtgctttagatattagctttttgtaagagatcctgcaaatatcttctttccagtttgtcattgtcatttgtcttttgactttgttctggtattttttgatatgtagaaatttttattttcatgtaagcaaatttatgaatctttgtacaccataagtatatacaattatgatttgtcaattaaaaatattagtaaaaaaaaaaaaaaaaaaaaaaaaaaaa

SEQ ID NO: 24569 - DNA, 4403 bp, Homo Sapiens
gctgcgcttccgagtggcgactgcagcgggtccggtgcaggtgaggggcgcgcgcctgcccagctttgcagcccccgaacgcggcctcgcacagatacccagacaaatggattctaaaatttgaatagaagagcaaagaaaataggaaccaatttgaaggactacaaggtggactgcttgctcagctcagtatcaacacttatggagtcattgcagttttcagtagaggtgtacttctgagaagtggcttcttgggtcttcatgcagccatggatctggataaaccatctgtttggggctcattaaaacagcggaccaggccattgttgatcaacttgagcaagaagaaggtgaaaaagaacccaagtaagcccccagatctacgggcaaggcatcacttggactgccgtctcagcctctctgtgcctgatctcctggaggctgaggccttggccccagagggccggccttactccgggccacagtcttcctacacctcggtgcccagcagtctgtccactgcagggatctttcccaagagcagcagtagctccttgaaacagtctgaagaagaattggattggagccaggaagaagccagtcacctccatgtggtggaaacagactcagaggaggcctatgcctctcctgctgagcggagacgggtgtccagcaacggcatctttgatcttcagaaaacttcccttggaggggatgcaccagaagagccagagaagctatgtggaagcagtgacctgaatgcttctatgacatctcaacattttgaagaacaatctgtaccgggggaagccagtgatggcttgagtaacctccccagcccttttgcgtacctcctcaccatacacctgaaggaaggccggaacctggttgtccgagatcgctgtggcacaagtgatccttatgtgaaatttaagctgaatgggaagacgctgtacaaaagtaaagtcatatataagaacttgaacccagtatgggatgagatagttgtattgccaatccaaagccttgatcaaaagctacgtgtggaggtatatgatcgagatttaaccacatctgatttcatgggttctgcatttgtcattctcagtgatcttgagcttaacagaacaactgaacatattttaaaactggaagatccaaacagtttagaagatgacatgggagtgatcgtcttaaatttgaacctagtggtaaaacagggtgatttcaagagacacgtaagttggaaccttctattcttttgaaacctctcattttgtcgttttgaaatggctcattgcaattgtcccttgatagctagcagatgactgatgtttttgcaattattttagggggggtgcaacattttatggagtcttaaaatatctgttttttaatacaatgctcttctttgaggaaccggaaaggaaatttgttaaggaattatttcttttgtgttattaagatgatcaggcatacatttgcagcattttggtttcttctttcttcttttacttttagctaccaagttttccattgggagttcttttgggaagatacaaattttaatgttctctagtctagtacatgcaaatttctagttgatacagtacctatcaaagatgtctgtaacatcagtgaagcattagactttgtcacaatatgattgggactcttcttttgagcaaaaatgtggatacaaatcataatcttattttatttgggattatattttataattctaaggctatattagaacaaaagcatctttgatgatgacttatttgaaaagtatttttaaagccaattgaagtacctgctttttaagatgtgttataatttagcatgtttataatccaatataaaaatataaagcctatttataattaggtctccagtaatgcttcttgaattgaggcagtggggtgggtgaggagaatatttttcttttgacatcacttatgcttctagttgtagctttttatgatgaaaaccgtgattgatttactagtaaactcagagaagatagcttaaagcagtaggaaaactgtagtgtgacttttcagttaccttttcaaagattcaactaaatatctgctatttttaatttgagttccttttattacttctttttaaaaagtggcactgttgacacttgtgacctcaataaaagagatattttaatgttaaaatgtcttaaattaatgttgaaaataaaagtattttttctcatcccacctaaagaaggagggattttctttagcttcttcttgatcttgacagcattgctgctgcatccgtgactctggattcagtgtcagtgatacagtaggtgaccggtgacttgagctgggggctaggttatagcatgcaatgtaaatagttatttgtcatgtggttgacaacttgccagctgatatcgtcaaaaaatttcttatatattcaagtggggcttgtaaaggtagttgatttctccatgaaaatagctgcatattcaaatgactgcctttgtgaagttttctatagcatattagattatgtttagcagtaatattggcacttaaaagatatttaatattgtcaaaatttagagttttaacataatgccattttagtttcaatttatttcaaattgcagaacagttaatactagacacagcttggagctgtttttgtaaaagatctcaaagagactatgttttcagggctcaagaatagccatatttcctcttagtgtaggcctggtttcctctgactccccacctcccatgttgaagactttgtcagaatgtctgtccgctcactcatgtgcttccttattttcttttgtctttgtctggcagaagcctagtgtacactatattgattatatatacacacacaaatatatttttatccccatatatacacacacacacacatatatatttatcttatatatacacaaatatatatttgtctccatatatacgcatgtttatctccatatgtacacatatatttatctccatatatatacacacatacatatatatctctatatatacacatatatatttatatatacacacacatatatatctccatatatatacacacacatacatatatatttatctccatatccatatttattcaagttgggtttgtaaaggtagttgatttctccatgaaaatagctgcatattcaaatagctatctttgtgaatttttatatccatatttatgtatatggagatatatatgtatgtgtgtgtatatatatggatacatgtatatatacacatatatatggatccatatacatatatacacatatagacatatatgaatacctatatatatatacatatggagataaacatgtatatatataacatatatatatataatggaaatatagacaactgcctactcttatctcttctgattggtagtttttttccatttatatatttgatcaaagaaaattaattgaggaataatttattctgggccatgtgtggttattcagctaacagtgcatattgggagccttggggtaaaatagattatcagaatctttgttcttttcattgagtttgagttaatatttaaagagatttttatattgggattttaagtgggaataactagcacttgggactggaaatcagtagattatttgagtgagataatttgtttataaatttccattttaatttaaactctgatggagagatttcagtttaaattctcagttttttacccctttttcttccagtcatctttgaggtagcctttgttgctttagaaccaagctgacaaaaatctcagtatgtacaaaatgtttatgaatttactcttgtgtccagggacttaaatgtatatgagaatggtgcaggcagaagggaagacactggctgcaaggctgacaaacatactctgtgttctttttttgtggcaaaaaacaggaaaaaaatagtagctaaaattaggagctctgttctcagactgcctgggtctgaatcctagatccaccagtggtctggttaactcaaagaattatttaacctctctaagctataatttcctcatatgtgaaacaaggataaaaagagtgtctgttttatagggttgtgaagattgaaattatcaaatatggtgcttggaattgggtagagacactcaatatatggtagttggtagcattgtaggaagtgaatagtaatagtcattttccattaatttatttacatgctttatcttgtgtaattgttaaaaaatatcaaatgcgttcctatgtgtcaaaaggcctaaatagccctgtgtacctaaaagatggtaattaattttggtggttggtttgggtgaaaatatctgtcactatttcaggaaaaaaaaaaaaaaaaaaaaaaaaaaaa

SEQ ID NO: 24570 - DNA, 2952 bp, Homo Sapiens
gaagatacgatgaaaaatgtttatttttcttgccaaggtgcttaaaacaaaggaagctgtcccctgatactcgggaccactcactcctgcagcctggctctgtgggcacccggcaggcgtcccgtggccgtgctgcctcaggtgctggggactgagatggagtcgctgacttcctattgggcttgagctttccttgcagcctggaattcacttttaggctgactggggagggaagaatgagacagacactgctggccctgtcccggccccccggcctgtctctccatcctcggcctgacctgctcatggtgtctgcggccttcaccccgtgaccactcccgagggaagccgcctgcgaccctggcaaccctcctgccttgtgtaccccagtcgtgggtctcctgctctggccagattctggattcctccagaggggacaggccagcacctggggtggcgccaggcccaccgagaggttcagcagcgacagctgtcgttgggtgtagatgcttggtgccaaggcgtgccaccccttccagggaaagcacgtggggcagggcaccttgcgcaccagcattgagagcgccccagcaggaggcccgtgtgctgctcgccgcactgagcatcgtgggtgggaggcacgggcggtggtgccacggtgggctctgtgtctccactgatcccctttgaatgtgccaagtgccagtcctgacgtgtagacttggggttgtccaagcagaggggaaagatggagaaaggaagccccacagtgtcttgttgaggattggaacgcgggccctgacaccgcagggtgtaaagttaaaatcacgatgtcaggccatgaggaacggtccaaggcttccaggcacagtccatggcagctgtgtggtttgaggggctgacctgggtcccaaggcaggccggccagatgtaggggtgagttagtgggagtcagagagaggcgtggggaggcctgacctagggctgggggctggcaacacaggagagaccagggccggggccgcacggaggctggggcagctgtggggactataggagtcagagctgagggcaaaggggaggaggctggcgggtggaggtgcccagggaggcctggggccgggtcccaccaggctctggaggggcctgtgggacaagggtggagaagcagcctccacaggaggactgggagccgagggcctggcccgggcctagcggttccccccagtgccctgtgccttcttgtctcccggggtgagaagcctcccttctgggctggggatggctgcctggtccagggctgctccggacccagcgtcttcccggctcccagggttggcagcacaaaggcgggacaggcctgtgcacgcagcgcctcctctagattaggtgggctgggtcgcacctgcaggtcctccccaccctcctgacacccagccagcgcttggggcagaaaccaagtaggaaggtgatggctggaagagggaatgcctgggtttctctcttggcaccgcttttaacccgactgttggccttcgttgacgcaacacagggtggctgaaacttggatagttaactccactctgcctttcttgaagaacccacaggcagagttcgggtggagttaggagatggggcgggaatttcaaaccctcgtgttaaataaaaccatgaacactctcagaggaatatagcagtgtagtctatgacacatcattcacagtgtctaggatacaactcaatgttattagacatgttttttttaaaaaagaaaaggcgaccgttgctggaggacggcagcagtggaggctgacccacgatgatgtcgcgtgtcgcactggtcagatgggtgtgcgtaactacacccaaggacagaaaacatgctcagaatgtagagcacagagtcccagcagagaaatggaagctacagaaatagagccaagtggaaattctaggtctgaaaactacagtatcaaaatagaaaatgaaccagatggggttaacagcagattggaggggacagaagagtcagtggacttcatgatatgtcaacagaaatgatcatatagagattaaagcctgaaaaaagaaatgaagaatgctccaggaaacagagggatgatctcaaaggtctgatgtctgtcatgggaaccccagaagaaaggaaatagagaatgggatgtaaaacctttgcaggggcaggtgcagtggctcacgcctgtcatcacagcacttcgggaggccgaggtgggcagattgcttgagctcagaagtttgagaccagcctggccagcatggcaaaaccctgtctctacaaaaaatacaaaaattagccgccgggtgtggtggtgcacacctgtacccagctactcgagaggctgaggcacaagaattgcttgaatccaggaggccggaggttgcagtgagctgagattgtgccacggcattccagcctgggtgacagcaagaccctgtctccaaaaacaaaacaaaaccaaaaaactcacagctttgaagtaagacgtaacgggatgaacgggatgttttctaaacttggtgaaacgtataaatctacaaattcataaagctccagaaagcccaaccaggatgtgtgtccagaaatccctgtctaggcttgtcattgtcaaactgctgaaaagcagcagtaaagagaatctttaaggcagccagagaaaaaaggatccatgacatacaaggggacactcatgggaatcaccacagccgccctgtcagaaaccatggggttcaggacacagtggatcacatcttcgaagatctgggctgggaggaattaacccagaattctgtgtgcagcagaaatattcttcaagagtgtaagtgtaataaggagagttcagacagaatccaagagcatttgtcgtcagcagagccccccctattagaaatgctaaaaaaaaaaaaaaaaaaaaa

SEQ ID NO: 24571 - DNA, 4614 bp, Homo Sapiens
ggagtcccctcgtttcaggctcttcagtgtcagtgctcagtatctgccttagagaactacgagaaggggctgctagcagccgccatccggggcactgggtggctgcaggtggtggtggcgacggaacggtaggagggcggccagcagcgggagcttctcctgccgggcaggaggacgagtagaagggagaggcaccaccacatgctggaggctggagcttgcaccgccgcagctcgcctcactgcagttggaggtgacgttggacactacagcttggccagagtggtagaaatgttgttgcataggattaccaggagacaccaggtgctgcagcagcttcgggataacttgaggatgcatcctggggaagagacacctcttgtccatggcgctgactactgaggacagcttcggtgtggcttttctgcggccagcttctttgaggcctttttctttcatgtagtactcactccctgagggcttttgaaaagcataggaggctttagggctgtttctgagggaaactccccgagaagatggagagagaaggcggctctggctgtgggaggaagaggaagcccagtgcaggatggtagagagcagtctacagcctgagacccatcacaaggttccttgtgagacacctgggggactccaaacagccggaatccatctgcccactggtccggagacagggatcctccgcctccttccagggttgatggctcaggaggccttctctgcaggggaccaggacacagctgtgttgggagtggaagaggaggaggcccccgacatcggcatataccactgcccaaactatgagaaaacccatgtgaagtccaccttgttaaagacatagtggcccatgtgccggacagtcagctcacgctgggccacatggaggagcacagcttcaccgagcccatcctcatccctaagaaagacgggctgggcttggctgtcccggcccccacgttccatgcaggccaggcgtcctgtgttttcatttgctaatctggccaccctcgctgaggcctgtcacctggccacctcgcagcatcaccaggtcagaggaagagtggtcggggcacttcactgagccaagagaaaagcaggtgggtgaagctggacgttggcacccagagcctcagcatgcagcccctggcagctcctgccgtgtgtgagggcagccaagggtgtgtgcccactggcagctcctgccgtgtgtgagggcagccaagggtgtgtgcccactgtacacgtcctggcctcgggaggctgtgccaccttcccagggtgctcaggctccgcccgccaccgccccatggctgcagtgcagtgtggctgggacagatgtcaccaagcagaaggactgcaagatgaagctgcaggagcttgtggactatgactacatcaccaaccacaagcgggtcctcaccatcaccaaccttgagttcttcgacacccagtgagcgccgacaccatgggggtgtgggggatggggttggggcaggggctctgtgctgtccttggcagtcgcctgagaaacacaggacgaaggtctcatagtctggaatactgcacacggcacgcactgatttttcctgtttctctctctctcttaaatttttttcctgttttcttcctttttcttaaagactggcccacagctgtttttcttttaatgtatgaaggtgacacgttgtgaacaattcaaacaaaaataaggagcaaaaaggcaaagctgcctctgaccttggccacccccatcccactcctcggagagaaccattggtaatggtgtgtggtttttcccagaatgcacacactcatgatgcagacacatctatcacacacccacttaggacacaacatccacgcttactcatgaacacactccactcatgacaccaacttgtagacacgctcatgacacactgactcatctacactccaacacatgacacattcatgacacttacattcgcttgtggacacacatgacatgctcactcatagatacatcacacacagtcatgacacactcatacctactcagacacgtggtgcactcacactcatggacacactcaccaggacatggcacattcacaacactcacccatggacacactcatgccacattcatagatacgacacagcggacacatgaacacactcatgacacacagcactcaccaacacggtacactgacattcatggaaacactcgccaacacacttgtgacaacacaccgacacactcgctcacatgacatggacatgtgatacactcatggacattcacggatacacctgtggacacactcgatacataggactgacacactcagactcatgacatgcttatgacacacatccttgatgcactgagacactgactcactgacacactcacactcccaacaccctcatccctggcacagttaccgacacttgcacacacccatgtagacacctacactcacacacgagatcctgtatgggtggctgttgtgaatcgcaggctgcctttgcatttccttatcttccctggatgtgagttggctggatttgacagtgacctcaggggtcgcgggtgccctgttgtcagctctgaagagcagtggctgttacccaggtgacaccagaggcacctgggctgagtgtgagaaatgatatctatgctccagccccgcacgttacagtcacatgcacgtggccaatctggaaagactttccagttcccgggaaaggagtttccctctcgggtggatgattttggggccttctcattgtcttctgggggtggaggccagcatcagatccagtctcccgccagggccacagccagcgcctgggctcgttttgccctctgtgatcctgcgtgctcctctgtgaaacgggagctgtgacctgtggcccgcaggtggtgagagagtgtgggacatgcctcacagagcatgtttcctgctccaggggacatcaaaaagggagtcccaggttccctcaccaccttcctgtcccaccccaagaatgtccagcttcgtggagccacctgacaccatgaagaaactgttccgggtagaaaactggccagatgatgcattgctggccaagcccaaagtgaccaagtcctgcctgatctgtgtgaaggacagctacaccgacttccacattgactgtgggggcgcctccgcctggtaccacgtgctcaagggggagaagaccttctatctcatcaggctggcctcggtcgacatctcctgtatgagtgctgatagtctgccgctaaccacagcgagatgttctttgctgaccaggttcacaaatgctacaattgcatcgtcaagcagggccagaccctcttcatcccctcaggcactgacagagctctcgtgggccccgagccctgcagcctcccagggcggttgtcccctggtccacttcagctatgcagggcccagtggggaagcctgagctggtgtgtctggggcttggacccacccccatcgtcgcctgcttgatggtcagtgcactgagaatggctctttggtggcttccagagcatatgaagttgaaaagaggttgaaactaggcagcctgactcagtttcccaacttcaaaactgcctgctggtacatggggaagcacctgctggaggcgttcaaagtaacagtgtgcagctgagggatccaggctggtgggaagctctgctccatgtcttctcccagacacccatattcagtggctcttactcccatacatgctcaacatatggcctctatacctggttccatgggaactacaaagatgttattttccaagcaactttaaggaggcgaggaagtgccggcaagtctgatctttaaaatggtgactaaatagtagtgtggctatagaatttattgtctaaacccgagcaactttgaggggaaaaggggagtgctaaacatacttatatactttttgaaatatttattattagctaataatttatttttattgtatcggtagctctaaattgttctaaagcaaattataaaatagttttaaaaatagcttatatttgtatgcctacttccacagaaaggaaactgttggctgtgttgtgtgcatccagagaggattaagaataagattggttatgttactggacgttgttcagatacaagcttctgttacagtgagaacccttcttgctgtgcccacacagatgtctcatgtgctatgagaggaaatcaagggagagtctggaagtgcagaaaccatcaaggcctaccttaatgcaaccattaatagcgtggttaaaagtgaaaaattctgggaaaaatcctaaactagataggaagatagactgataggaaacctagttttttttagttggataattatatatcccgataaatctcaaggaacaattccaaaagaacaagaaagtgagagctaaacttgtatcatgggaattcattgtaagtattaaagacatacgcgaactttgaaactttaacagttttgagatagagaagaatataattatgacattgttatacagaatatgttctttataataaaatgtctttaatattcagaaaaaaaaaaaaaaaaaaa

SEQ ID NO: 24572 - DNA, 7636 bp, Homo Sapiens
atgagccactgtactgcgctgtgcctacttcaaaaggctgaaaataaaaaaatcaataaatctttgccaaattaaaaaagaaaacaatagtttccaggtcttagacaaagacaattctgtgtcatgaagggtggcaaaaggcttatttagctgttaaaatgatttgcttatatttcaaagaagcagagaaaaaaagatacatataaaagttttccaggccaggcacggtggttcatgcctgtaatcccaacatttggggaggccaaggcaggaggatctcttgaagccagatgtttgagtccagtacaggcaacatggtgaaattctgtcaccataaaaaataaataaaataaatatggctgggcatggttgttcacgcttgtaataccagcactttgggagtcggaggcaggtggataatgaggtcaggggtttgagaccagcctggccaaaatggtgaaaccctttctctcctaaaaataatcacaataaaaaattagccaggcatggtgctgtgcgcctgtaatgccagctactcaaaaggttgaagcaagagaattgcttgagcctgggaggcggaggtcgcattgagctaagatcatgccactacactctagcctggcccacagagcaagacaccatcttgaaaaaataaataaataaataaataaataaagttagccaggcctggaggtgcatgcctatagtcctaggtaattaagaggttgatgcaggaggactgctcaaacccaagaagttaaggttatagtgagctatgattatgccattgcacttcagactaagcaaaagagtaagattccatctcaaaaaattaataaaaaaagttctctaaattacattgtttaagaaaagggaaaagaaaaaatatattttttaattttcaaatgggagaatagagcctctcatttctaatttgtatttccttctgcaaaaacatggtctaggcccatggtcttgaactactggacatctgaattttagtaggtgctagattcaggcaactgagggttggcttggacacactgagtgcaagtaaaaaaaaggtttgaggtgaactaaaaggtaaaagaggggaaggtgctattaagaacccacaattgggagactgtacagggttggtggaaggactggttcatgttacagatactgacccaggtgaaactttgctctgacttatttctatgtccatgcaggaagacgagattatgatcaggtggcacagaaacctgggatggtgaaaaaaccaggttgcccctgcagattcggtgtctgaagtagaacatatgccaggggtcttgtaggcacgtgtgtgggtttttggtgggaaagtctatgaggaaaggtagcatgggcaacaatcttgatgccgaagccctgtgctgggaggggcttgaccacgtcaacatgcggtgcatatgttcagtgggtgaaaaacatgtggtggcctcaggttggcaggagggtagaaggcatctgttctcagaacttcttccctcagagtcgtcggtccttcttaccatgggaggatgcctggaaccacagggcagtgcatggtgtagcagcctgtgtgcagagcagagcctaccttccccgagacacctggagtctctctccagcagaggcccccacattgtctttctttttacaatgtttttgatcctaagtgtggaaagttccctgaaaacccactgattctccaacacccatttgttgccccaaaatttaattctgacacaacttagagttcgcacagaccccacaaattcagggctcagtcccacatcacctctctcactgtagaggagagttacacatccctgaagcccatctacacttctgagctacctcctataaatctgagactagcataaaccccttttcaagttaaataatttgatagaattactaaaaagataacctcaacaaataactgtaattatatttactactttattataaaaatataactcggaaacagccaaatggaagagatgtctagggcaaggaacagttgtgggtgaaggtaatcctggaaatagctatatttaaagaaattcccccattctttgcattctcaaagaacagcttagtgaagagaaacgtgcttccctgatgactttgaggatgctccctgctgtttttttaacctatcacaaaaatggacacagattgcaaattcccatttttaaaaatgaacaaccattcagtaatttagtcttcagtggtcaaaataacatactctttacagaaactttgtttgtttctcttcttccaaccagcccctgaactttgactcacccacagcttcagcaaacctacaacccttatttatacataaccctcctaagaacaggctgagttcaaggtgaaacattatcttatctgggatctcattttgctaccctccatcgtgtgcttcctttccaaccttctttgtaaacttgttttctcctccctatgaaataaggcccttttccacctaaccttagagatactcaaagatctaatcatttgtactttttctttgttgcaatacttcttaggtaacttcttagaccaagtctagaaacaatctgaggacaataacaattccattctaaaaagaatctcccaacatttcttctgtctcaacctcaactgcatctgcctgtgaacttccagcttaccaaggctctatatcttctggcagtgacaaaggctccttccatggttggtgtgagtaggcttggacacctgcagggtagacacccaggaataatcaactgggccttcagtggtcctcttttgcagggtcaaggtgggccttagcttttagtcaatggtctaagacttctacttaccagttagtcattcagttagttttcaattcaaaaaatacttcatgtttgaagaatccagcaaaaattattcaaatctaaggtataaaagagaggaaattacagccgggcatggtgactcatgcctgtaatccctgcattttgggaggcttaggtgggcagatgacctgagatcaggggtttgagaccagcctgaccaacatgaagaaaccctgtctctactaaaaatacaaaattatccaggtgtggtgttgtatgcctgtaatcccagctattcgggaggccgaggcaggagaatcgcttgataccaggaggtggaggttacagtgagcagatgtcttgccattgcactccagcctgggcaacaagagtgaaactacatctaaaaaataacagaataagataaaataaaaacattataaggggcttatatcttataattcatcaagaaaagccaaagtatctatccctttcagaaaataaacatgtaatttaattatgttcataacaaatcatttagtaaacaattaatcatatgtgaacacttccaagaggcgcaaagtcccagctcctaaaacttaacattaccctcaaacacccagatggcagcatatggaatagagttattcactttcacaagttctctcttttgaaaaaaagaataacttatgtgataaatttatgtaatttgacaattaatctacctcatgtgcttgcagatatgtattcatttcctaccaccgtagtggaagagatactatccctatctttacaactgatagcatttccaacagtaagctgtgagattctgcttgaaatcacctctcaaacaaataaaaaacagacctgggagacatgctacactcattctgctcaagaaatagggcaagaaagctttctaagaccccgaactccagatatgcgatggggcaaatcctgaagcgtacatggctatctctcacagctaaagcatccctcacccctatccagcgcttcttacccctggcgcaagagaatcacctgcggggaggaaaactttcaaaatcccttaaacccaagttgtaaccgcacaactaaatcagaatccttggagctggatctgaaaaaaatacggttgaaagtcgtgcaggtgattacaatgtgtaggcaaaccagaaaaccatggctttaaccagcagcttttgttagaaatgatttctccaatgaatgtagaaacgtttgctgctgaattgtgacctttccattttacctgcttttcctgcaaagtatattttgcagacccaggcagtgctgctcgctctgttcctggttcacccagtgccgtgtgtgctcagtgcatcctgtgcacgggtcactgtgtgccctggcctgggtgagcatcattcttcggggagaaccttgatgaaaacaaagctgcattccaaaaagttaaaaccgtgctacttactgtactgaggtaaaaattaaaagacctaggggactcttccaaaagttaaaacgtaaataaatatcttgtaacattaatatacacctgacgatgtcctgagtgaacacgccccactttaaaacaaaacaaaacattactattattctaaaatattaatttaggattgttatgcaaatatgtactatttaaatatttattgatgaataacatgcatacagcaatataggaacaaaatatttatggaatgcttgatgaattattactaaataaatacacttgtgtatgtaagaatcagatttgctcatgcccttgacactttctccttcccaaaggtaaccaagaccttaagagctaagtgtagataaactttgtcatgttctacaagtgttttattacagaacattaaaaacgtatacacaatacaaaaaaaggataacagaccagtcacccagctttaacagctactagtcatgtgtcatttttgtttcacctatacttccagccattcccaccccaatttcattattttttagcctttttggataaaatgtatattcattgcaaggtacaatgtggactgtaaatagtagagacatggggtttcaccacgttgaccaggctactcttgaactactgtcctcaggtgatccacctgcttcggcttcccaaattgctgggattacaggcataagccaatatactcagcctgagaattcatatttgtaacaaagtacaaatccatagggcacatgagaactacaatgtctatctacagtaaatacagtttgatgaataaaatgaaaggcaattgacctaaggtgaaaaaaaaaaacaaaaaacaatcaaagcatgggtactatgtgtcatctgtaagagcatttggttaagaataacaaacaaaccagtattatcgttttaatagccgaaattggcaaaatttccagtttttctttcataagaatgttctttgcaagaaaaaattttcatatagtgagagcaaaaatggcaaccatttgcaagtaaatgtcccatgaaattaagtagcagatatcaagctcatgaccttcagatagttacccctaactcaatcacttacatagcaagtgcagataattttcatagctccctattaaaattatatttcaatgcccttacaaattgtgactgtttttaaataaagttgaccaactaaaattttgtatatgacatatgataaattccccttcaagtcaccttacatttacttaattttattaggcagtgtctgtctaccacccaataatacttgaggattctccctccatttgcacagacatcatagctgggaaacagggattcacaagacccaggctgttccctacatatgtttcctcctccgacatcagttcatcagtcaatcaagccatgtgagagtggaggccttgtattccctattattcttgggcactctactccaagtaggaaaaggccaggaggtcctgttaaaggatgcactcagagcccgggctccctaacgtatgagagtgctaaccagcaggtgtagacttttcaggagtgaagaatgaggcaggcattccaaacctggaccttcatcaccttttgtttcatctcaagacaattctgagggactgttttggagcgtgtctggaaggtgaacgttgaagaagagtgtgggctttgatgtgactcagttgagatctttcatggggaggcaggaattcaatgcccagaatctgggctggtgtctttgaggtcagtaggttgcgtctttgtatccaagtccattgttactaggttggaggctggagattctaaatggcttccagaccatctctctgattctctttgggagatggggtctgaaagacaatgtcagtagttttgggaaattctagaaagtgtgcttggaaacgtgggaagagctcttgcctagtgcctaaacgctccatttgcagctctagccaagtagatacttggtaggtatagagccgggtttgcatttatatcagcaaaacctatgtcagaattgaagaagtagtcaggaaaaagtgtcttggtcgcaggccggggaacatcttaaaagcaaacttctagcctgctgactcttggcaatgagtgttggatcctggctaaattgccttgaatgcagcatgaggccaatctatgaatccaacttctcatggagaaatgttaatattttttcagtttgaatcaatcagggtgaaactaccatgctattggtttgcttactttttattatttcatataaaatctaagacaaaatacattaaatgcttattgacatatgtatttattcttcaccgggctgataatatctgcctgattttaaactttcttccattgtgtaggtttcaacttattctattgtaagatactgttaaatctaatagaggcattgtcacttttatgtataattttattttatttcatatatttcctattggctttttacatttaaattatggagcacttcatcatataaaaagcttcaattatatttaaacagtaagtctttggatttttttgtcttgtaatttccatattacataataatgagataaacattaatgttttcagggtactttaaattttagataattactcattgtattcatgtgaaatttgtttttactgcatgtgtgggttggaggactgttttcacttctgattcatctttactcttatctcatcagagctcatacctcttgtagttgggggattgcagtttataattccaataaatggggcaaattcaataataacataatacaaatgagtttgaatgcaggacaggtcttcaaagcatacacaacatgggcctacatatgtacaacaataataatttataagttacagtttggatggaaagtaaaagtacagaaaatttgttaaaggaaattaaaatggagatcatgtctcaataatctctgagcagacaaaattagttaggtctcataagtgatctcaacctcgcttgatttgcaaatacaaacaaaacttacattatttcttgtagctgcatatttaaaaaagagaaatgaagctcaaccagtcagaagtagccaacaaccttatattaaatagaaactgtccaacaaggtaaacagacaaacaaaaaacaataaaaaaagttgtgctactaccaatcaaatgatttctttgtttctacatttttcaaataaatacttgcttcttacactgtcaatgaagcactcaatatctttctgtctgatattttataatttatcaattgctcttactcaaataaacactttgcaatttcaagaaaaaaaaaaaaaaaaaaaaaaaa

SEQ ID NO: 24573 - DNA, 7208 bp, Homo Sapiens
atttacaaaaaagtttcagttattctattaaagatttgttggtatattctgcattttacaagtggaaaaaatcagatttaaagaaagggtttaatatttccaaaacagagtttgttatctggggtcgtgtgataaactcttgtggaataaacacgtttacagtttattattttactcctcccatgttacatcctcaccctaaaaaatgctttgacagattacatgaaaacaagcagatatgacatttaaatggtctttttctcctcagaggtttacattctttgagatatctggtcaacctaatcaaagccagttaatgtcattggaaataaatatattttaccaagagatgcctaacctgacccatatgagcctgagcaagacaatgacctgactttgtttgtttcctaaccagatgctcctgccagcatttgtcttcattgggctggaacaggatgactgctgtggctgctgtggccatgaaaactgtggcaaacgatgtgcggtaggtcctcctgccctggtggtgaaaatgactcctaagatgtagctgtggcactctgtggctcacttcctgtgtgtctgcttttccctagatgctttcttctgtattggctgctctcattggaattgcaggatctggctactgtgtcattgtggcagcccttggcttagcagaaggaccactatgtcttgattccctcggccagtggaactacacctttgccagcaccgagggccagtatgtaattactctctacatggctacacatttttatccaccacatgtatatagtggcagctctatcaaaccagataggcatccacttatccatccatccacccacctagccagtgtttattctcactgactcaggcatggtttaggcaataggtatccaaggatggatccccagtccccgacctaaacaaattctaaatgcttcttttcttttctttctttctttttttttcccccagagacagggtcttgatctgtcacccaggctagaatgcagtggcacaatcatagcttactgcagcctctaactcctgagctcaagcaataccccttcctcagcttcccaaatacagagtgcttttgaatagattcaataattcagtccttataataaccctatgaagtgacttcctattttaaagatgaggaaacaaaatcacagagagatggagtaattcatccaaggtcacgttgccagaaagtggcagttagcatttgaacccaggcagtctagatgtagagtttgtgttcatatagtgcatctcaattacttcatacattataccagaacaattgcctgattaagtgtaatacattttactactttataagaaagtattatagaatccatatataataagaatggcaactatatgaatttaacccaagcccagggcaaaccatgcccttacccctgtgtatacatgcactcatataaaacatacacatacatacactcatataaaacatacaaactatgtacaatgcccccttttttagttattaagctatataagtaatgcctattcacaatcataatatcaggataatttgtgctgttccaccattctatgttgatacttattttttttatcagttatccagaaaagaacagaaacagcacagctgatagaaacggatgtatgtggtgatgaatggatgacatgtttctttgagcaggagttgattctgagtttcccttttccctactcaactttctgaagttgaattttgaaaggtttagttttgagattcatgattaaaaataatattaataacaaattatattatcaagaatgtttgaccccatgaatttaaagcatgtagtgaggatatatgaatctcacaaatttagcacagttatgagatcatgaatttgaattagctgggttcaatcacagctctgcacctatctgtaggaaaaggtgaaatgagctctctgcatctcagttactccactggtaaaataaaatcaatggcaattgtcatgagaattaatgaaataatatgtaaaatgttccccacagaggctgccacattgtatgcaactgccactgttagctgttaatattagctactaccttacaataaacataacccaatggtagcctttgaaggaaaattgatacttacagaagtttgaaattttggtgttcaaaactgtgatcaatcatgactcagcttttatcagaaaatactggatgtactagtagaaaatggctattcacatatgtacaaacatacaaaactattgcacaaacagacttctaagaaaagtcatgacttatgcaaccagaatgcagggagaggtggtagtattgctaaatggtttttatagctatttgactgtttgcccctcccattatccactctggattctacaagaaaccttcctcctcttctatgtcattcttcatttaaaactgtccaaggatttcaatatgggaaataactaacagtcacaagccacaggttagttgcctgggagccaggtggagccaaaaatttttttttacattgagacctgaaaatatagatttttgttctgctgacatgcagaaagacagggccacaaaaacagaactttttttgaaatgaacaactataatctctgattggctcaatgaactattctaaagttaggtctcaaattccaagcccctttgttctgttgtggaaggaagtcgtgataagaaaagaattataccaggcctctttgtggaattaagtcaaaccttgattttcccacatgattgtattatattttgttaagaatccaaatactctgtagcaaaggctgaaattctaggagagctatcagaagtagaatttttcagactggaagaatatccaggtatttataaaatcgactaaatcctagaatctatagtcagatatcacctcagtatggtttgctgacatttcacaaagcaacttcatattgttatttatcattcaactgcttttaaaatgtgctgagtggctattgtgtgtcagatactgttctagcggctggatatacaatgatgaataggtctggctactaccttcatggagctcagccttattgaatagatacataagcagctgttctccctggactaggttagatgcccttcctctgtggctcttccatactttgtttaccgatcagcatatctgttgcattgagattacttgtgacttgcctcttcctttagaagctatgctctttcaggacagagcccgtgccctgtgctccattatatccccagctctggctcagtgtcagactcacactgactgctcaataatctttgttgaatgagcaaatgcagtgtgctacatgctattatcaactcttgggcacagcatcatgaaagtgaagagctatcagccgggcgtggtggttcacgcctgtaatcccagcactttgggaggctgaggcaggagaatggcttgaacctgggacgtagaggttgcaatgagccaagattgcgccattgcactccagcctgggcaacagagtcagactccgtctcagaaaaaagtaaagagctatcaaattagttgggtttaatcccatgaatttgcttcctgttgcaaattaatttattccttaaaaacaaaaaatagctttgttccaaaggtctcagttgaaaaattccagcatattaaatatccaaacttgccagaatttggataattttcagcagtaacaaattgagatgtaataaaatgatctaaattaatattttaaagttcaaaaaaaaactagcctaaagagattgtattttctaaatattcactcaatattgaatacaaatacccatcttttataccaataacaacaataaaattggaaaacagttttaaaaaacacctacacatactctactttagcacatgaattattttcatttttccgcatttgctcgtagtttacttcctacacatacatgaatcttacctagctttaaacacagcacaaatacagttctgcatttttatttttgtttataagaattcagatgcctgttagggaatataaatatcattataaggtgagaatttctgaccatgtaatcctagattggggtcaaaaattataaattataattttatgtttatcattacagtaggatctgggctaaattcctccattttgtggaatgacatgcagtggaagaaacttacacaggatattgaataattcattccttttttctgaatgaaaaaccaccaaacaaaagtagtttatgaagtatcccctcaagtatgaccgtgtgtcagaagtttctctttttacccacaggtaccttctggatacctccacatggtccgagtgcactgaacccaagcacattgtggaatggaatgtatctctgttttctatcctcttggctcttggtggaattgaattcatcttgtgtcttattcaagtaataaatggagtgcttggaggcatatgtggcttttgctgctctcaccaacaggtaagaacctgcatgaaaatgtcgtagtctggccctggtgttaatataccattgttttcatcataaagaaaaaggcaaaaccaaacatgctcgacctaccagcatttattctgatatcatctttgtagcaacacaattatagcattcactttagctgtcagtaacaagcttcctcgagtctcacagtcacaggattgtcttagttctttgcagttggctctatgtacacaagaacatgctgcccatagacacagcgctcccttcaggatctaattcactgcctctgctctcgctgcagagacagaaaaaaaagtgatgtctgctctttgtttgctgttatattcccaactagtatacataagtaatagccaaccattcaatgcatcaggcactatgctaaacccatatgactcaaatattaagcaataggcttaagatcacctactcaggaaataacaggcttcaaaccttgagtcgctctgtgcaaaagctcctacttttaacctgtattccacacttgctgtttggttggattttctgcaattccttcctaataaggagtcataaaaatgcctaagcagtaagtatggagaatcactagcaatctttgaacagcagctcatgaaaagcctttcgttgtgaaagaaaaccaggaagcacttgtttcctggggatatgatttaggagaaaaaaatgcatttgtttgtagcagtgaaagttcttgtttctatatcctcctaaaatatatatattattgaattaatgaaagtccagctttgatcctatctttgagagggttattttatgtcttatatttttcaaaccatttactcctctggtgccagatctgttaactttcttttaaaaataagacaaaaacctaatgaaaactgaaagcccattgctaccatgaaaaactttgctgaaaataaaaggaaactttctgtaattttgggggaaggttaaaatgaaaatctagttttccttatcaggcaagtatagcaagattaataatttctttggcaaatttccaagaaaataagggaatgggaaaccttcaatatggagcttctttcaagcagtacggttggggaagggcagagaagtatcctctagggattgctgtcatgcagcttacctttagccttgaatttcatacaaggcagagttcaaagtaagtgattacttgtactaaatgtactcacttagtacgttttggggacaggcataaagagccagtgaccaaaatggctgaagtgatttggcagggaatgatactctcctctgatttggggtagtaaatacaccaggtttcccagctgagtcactgtagggatggcttcttcccagatactacagggaagatctgttacctttgtttataagacaaaagacactttcaaagggcaggccttttcatgtagaagagtcaggtccataactcggtagcatttaatttgaaaggttacccacattgagctcataccagtgtgaaacttccatggcattatcttttaaatccctaagattaaaaccccacacaaatgcactcaaagcaacccaacatcagtatcctgcagtttctatgggccctttctgcagcctttactcatggaagacaagggatctgggtttgtttaggaaacattttgtgagcattgtccaagccctaagtatggttggcctaagctttgctgaagctaagatcagtctgtttatgtttgcttaaaataggaacttaaaggactaaaatgtcatcgttatttatcctgattatagcctaatggtattttattttctctacagcaatatgactgctaaaagaaccaacccaggacagagccacaatcttcctctatttcattgtaatttatatatttcacttgtattcatttgtaaaactttgtattagtgtaacatactccccacagtctacttttacaaacgcctgtaaagactggcatcttcacaggatgtcagtgtttaaatttagtaaacttcttttttgtttgtttatttgtttttgtttttttttaaggaatgaggaaacaaaccaccctctgggggtagtttacagactgagtgacagtactcagtatatctgagataaactctataatgttttggataaaaataacattccaatcactattgtatatatgtgcatgtattttttaaattaaagatgtctagttgctttttataagaccaagaaggagaaaatccgacaacctggaaagatttttgttttcactgcttgtatgatgtttcccattcatacacctataaatctctaacaagaggccctttgaactgccttgtgttctgtgagaaacaaatatttacttagagtggaaggactgattgagaatgttccaatccaaatgaatgcatcacaacttacaatgctgctcattgttgtgagtactatgagattcaaatttttctaacatatggaaagccttttgtcctccaaagatgagtactagggatcatgtgtttaaaaaaaggaaggctacgatgactgggcaagaagaaagatgggaaactgaataagcagttgatcagcatcattggaacatggggacgagtgacggcaggaggaccacgaggaaataccctcaaaactaacttgtttacaacaaaataaagtattcactaccaaaaaaaaaaaaaaaaaaaaaaaaaaaaaaaaaaaaaaaaaaaaaaaa

SEQ ID NO: 24574 - DNA, 5960 bp, Homo Sapiens
ggactccatggtaacgacgctcggcccgaagatggcggccgaatggggcggaggagtgggttactcgggctcaggcccgggccggagccggtggcgctggagcgggtctgtgtgggtccgaagcgttttactcctgttgggcgggctccgggccagcgccacatctactcccgtctccttgggcagttcccctccctgccggcaccacgtcccctctgacactgaggtcataaataaagttcatcttaaggcaaatcatgtggtcaagagagatgttgatgagcatttaagaatcaagactgtctatgataaaagtgttgaagagttgctccctgagaaaaagaatcttgtaaagaacaagcttttcccacaagcgatttcttatttagagaagacttttcaggtccgtcgacctgcgggcactatcttacttagcaggtatgtcacatgaaacacagatcattttcttcagccgtttagtactctgcctttctcgttctatgaacatggcaaggtatgaaacttatactagaattttattatgcttgttcttagggacctaactgcaaggtatttaaaaagaataaaaaagcacctgctggataatcattctttccctgacctttcattgtgagatggtctactgaattttttctgggtgtagttgtcccctgttctccagatcacctttttccctctttcatgtagatacagtgttggctttatgaagtatttgggtgtttaaaaacccaaatcaagaggatttcctatagaacccaaattctttcttagctactttcctgactaaaatagtaacattattaatgaagtaatatagcagctaccagttggtttccatgtttttaactgctataaaatattctcttttttgtatttaaactttgatgtacaaatggactgaagacaatgtgcaacaaaaccaaatacctccggaaggaaaacgatcctcacaggtactgcaccggggagtgtgccgcacacacaaagtgcggccccgttattgttcctgaggaacatctccagcaatgccgggtctaccgtgggggtaagtggcctcatggagcagtgggtgtgccagaccaagaaggcatctcagatgcagactttgttctttacgttggtgctctggccaccgagagatgcagccatgaaaacatcatctcttatgcagcctattgtcagcaggaagcaaacatggacaggccaatagcaggatatgctaacctgtgtccaaatatgatctctacccagcctcaggagtttgttgggatgctgtccacagtgaaacatgaggttattcatgccctgggtttctctgctgggctgtttgcattctaccatgataaagatggaaatcctctcacttcaagatttgcagatggcctcccaccttttaattatagtctgggattatatcaatggagtgataaagtagttcgaaaagtggagagattatgggatgttcgagataataagatagttcgtcacactgtgtatctcctggtaacgcctcgtgttgttgaggaagcacgaaaacattttgattgtccagttctagagggaatggaacttgaaaatcaaggtggtgtgggcactgagctcaaccattgggaaaaaaggttattagagaatgaagcgatgactggttctcacactcagaatcgagtactctctcgaatcactctggcattaatggaggacactggctggtataaagcaaattacagcatggctgagaagttagactggggccgaggaatgggctgtgactttgtcaggaagagctgtaaattctggattgatcagcagagacaaaagagacagatgctgagcccttactgtgacacgctcagaagtaacccactgcagctaacttgcagacaggaccagagagcagttgccgtgtgtaatttgcagaagttccctaagcctttaccacaggaataccagtactttgatgaactcagtggaatacctgcagaagatttgccttattatggtggctccgtggaaattgctgactactgccctttcagtcaggaattcagttggcatttaagtggtgaatatcagcgcagctcagattgtagaatattggaaaatcaaccagaaatttttaagaactatggcgctgaaaagtatggacctcattccgttggtctaattcagaaatcagcattcgttatggagaagtgtgagaggaagctgagttacccagactggggaagcggatgctatcaggtttcttgttctcctcaaggtctgaaagtttgggtccaagatacttcatatttgtgtagtcgggctgggcaggtcctccctgtcagtatccagatgaatggctggattcacgatggaaacctgctctgcccatcatgttgggacttctgtgagctctgtcctccagaaacagatcctccagccactaacctgacccgagctctgccacttgatctttgttcctgttcctcgagcctggtggtcaccctctggcttctgctaggcaatctgtttcctctgctggctggatttcttctgtgtatatggcactaggaatggaaaagtggatcttcaagatattcttttatgttatgttcttgtgaacaaagcacaaagtttgagtgagtgccaacctatgcagatggtagaagtggcattcctggctttggcttggaagaattgacgaccatcagaccttgaagcagaacttcacagcagcctgtcctcatcagcaacccaaccaccttcatcagcaacccaaccaccttcatcagcaacccaaccacctcgtcagcaacccaaccacctcgtcagcaacccaaccacctcgtcagcaacccagccaccttcatcagcaacccaaccacctcatcagcaacccagccaccttcatcagcaacccaaccacctcatcagcaaaccaaccactttcatctgcaacccaaccactttcatcagcaactcaacaccttcatctgcaacccaaccaccttcatcagcaaaccaaccaccttcttcagcaacccaaccacctcatcttggagaaggagaaggaactgcaagccaccaagtcttcatttttcagggtttgtaatcttcccaaagttttcctttgaaaataggataatgggtggaattttcagagtgattacatacctcaacatttttattaacatacaacaatgggaaagttcatcatccatatactgcagtcacttaaacaacagccaattattgcaagattagaattggagatcttgtcctcaaaagtataaattgtcctttgagttatagaaaataatggaattgggatttctacatatcattattatacctattttaaatttaatggcagccaggcatggttccagctacttgggaggctgaggcaggaggatcgcttgagcccaggagttcaaggctgcagtgagctatgattgcaccactgtattccagcctgcacgatagagttagaccctgtatcttaaaaaaaaaaaattaatggctggtatatagtaaacttaattcactgttcccattgttctaaagaatttttttaaataatgtttcattaaatcttatgatttaaccgtgcttgccctttttgccagctatgtggcagtttacggcagaactgctgtcagtgtgctggtagccctctattcatccctcctcagagcccagcttccagaactgctatcactgtgcaggtagccctctgtattcatccctcttcagagctcagcttctggttgtattctccatgagtttaataatgacatgaaaaaatgtggaagccgagagagtaaaatactctgccctgtaaaaacatggaagacatgcaaacagaaaaaaaataattgtattgttttagataatacttaagacaactgtgaaacaacaaaaacacaactattcctttgtgaccgatgaagataaaaagaaattctggtaaagacgggtatgcagtttttttaaaatgggttaagaaattgttgcagaagaatttctaacatctgaaaatggttttatgtttaagaaggatggtctgaattgtgtactaatagcaaggtataagtttggtgtagagcctatccagtagcgtccactgtaccacttttaagtaagactcagtccacagaagctggaagattgccttcgctttaaatatcctttaccttctgcatttgacactcctcctgttactacatagattccggtccccagaagcaattttacactggtactagagcttaccagccccatttagtaatttttaatggctagatgaggtttaacaagaatatgaaaagaaaaaagaaaaaatatattcatgaatgataggcgatgcccattctttctctcaagctaatgaagtcctatggcattctaaccacaaccctcggacagactcctcctattcctccatggcattgtaaccacaaccctcggacagactcctcctactcctccatggcattgtaaccacaaccctcggacagactcctcctactcctccatggcattgtaaccacaaccctcggacagactcctcctactcctccatggcattgtaaccacaaccctcggacagactcctcctattcctccatggcattgtaaccacaaccctcggacagactcctcctattcctccatggcattgtaaccacaaccctcggacagactcctcctattcctccatggcattgtaaccacaaccctcggacagactcctattcctccatggcattgtaaccacaaccctcggacagactcctcctattcctccatggcattgtaaccacaaccctcggacagactccttctgttcctcctttcctcgtccttccctgcttttcgtccattcagcatatagctattcagtactccattgaagaaattatgctaagtgagcaaagcaacataattactaagaattaattctgattatttggcactagagccaacagcaaccccagcacagaggaaagtcgcttttttttcaaatgcataaatttaaagtatgtatttgcatgcagttttaaatgggaggtatttgtcattgtgaaaagctgggaatctcaaacatagtcaacttaactaaaaagaagctaatacaggttgagcattcctaatccaaaaatccagaatccaaattgctccaaaatctgaaactttctgaatgctgacctgatactacaagtagaaaattccacatacaagtacttaacacaaactttgtttcatgcacaaactactaaaaatattgtataaaattaccttcaggcagtgtgtgtagttatatatgaaacatgaatttcatgtttagacttgggtccatgcccaagatacctcattaggtatctgtaaatatccgaaatccaaaaaaaagtctgaaatctgaaacacttctggtcccaagcatttcagtaagtgatgctcaacctgcgtaatggtctgcgggccagtgctcattttctgcctatgttgtacatactttaaattgtgtaaattaaaagtcaaagcaaagagtctatttttaaagaaacttacaataatctaaacatatacttcttatgattatgaatcatcctgcaaagctgaatgaagaattttaccaaaaatacaatgaattaatcatatatttgagagtcacagtgataggttcgactatattttgactgttgtgtagtggcaccgtttaggtagtattgtttctgagcatggtgctttttatacttgaaatatatttttgccttattttttattgatataattatatttgcactaatggctttctgaagaaaatattatagatgccttttttgtatatatatttattaagcttgggaacctggtcgcccagtgttttctctggacaaatgtgaaactggataaagtatggataaagtctgagttctcagggtaaaaaaaaa

SEQ ID NO: 24575 - DNA, 3000 bp, Homo Sapiens
ccgcccgttcgcgctgccagcagcttccgcctgctacggtcctggcaagcacctcgggatcccattccttcacagggaccctagccagttaaagctgatacattcctgtgggtcaactatgcaactaactcagattttgagcaaacaaagctctcaagttggtgatcctcaggagtctctgcattagttggacagctcttctggaattatcttctaagtcaactgtgggttgggtaggtggctctgctgatttttcgctggacttccacatttgggaccagttggctgtcatcagctctagaaagggtgtggctgttttacattggctgttttcctcacattcctcaagcaggtactgtaataaagaactggagaaatacagtcagatgggaagtagcccctgctgtcaaggagcttgccatctaatgggggagacaggcaagtaaaccaaagactacacagtgcagtatggtaagtgccatgattttgatgtgacagggcacagtggacgaccttccaaatcaaagcaagtaactaggggttgacaatggtaagtatcatagttgaagtatccttgaacaaggtttcaggaagaagaagaagggaatttcatgcagggaaacagccaaagctcagtgagtcaaaatatcacagcattcttggtaagcccaattgttttttctgttttgctattttggtggagagaaaggaacacataaaggaataacatgagagaaggctatttggggaagtgtagtagttaaggttctggctcaaacaacaactgcagctcataaagttgactttagtggaaggatactggggtatctcatggaatcttgggaactgttgaataaccagggaaactctgggaaactcactggtaggaatccataaactgtcctcctggtgggctgtaaacaactcaccctctatgcatctcacatcaaaattccagtttcttgggaaaacaagtctgtttgcccaatttgggtcatatttccacctccatgttactcaggcatgattcatctgcaagttatgtgtatagatattttgctactgttccacccttacgctgtgctggggagggaggtgtcactgtgagctgtgtcggtgccttaagagatatctgttgtgtcttattacttggttgcttttccccacatgtacaatgacaaaaatgccttcaacctatttgatccagccgttccagtacaactcctatacttgccatctttccaagcccaaaggtacatccagctgatggaaggagcatcttggtgttaatattcttttagtcatggtctctgaaagtaaaatgtctattcttctaattctggcacaatcttatctagctatagttcctcatggtcctgcactccatggactaaattgtaagtataattactaccaatgtactctataaataacttttggggccagggtggcaatagttgctagaaaaaaaaaaaaaaaaaaaggaaggagaagaaaacagtgatagttcttattttaaaaggaaaaaaagaggcaggaggctctcttgaggccaggagtttaagaccagcctaggcagcatttcaagaccctgtctctactaaaaagtaaaaaaaaaatttagtcaggcatggtggcatgcacctgtagtcgtagctactcaggagactgaggtgggaggattgattgagctcaggagtttgaggctgcagtgagcaatcatcatgccattgcactccagcctgggcatcagagcaagaccttgtcttttaggaaaaaaaggcagggaagaggaataggtaatttttcagtgttcagacattccagcaatatgtgtggagtactcattctcactacagtttatgaggccatagctagtatgtatgactacccatccaagtttccctgcttacagttactattccaactgattggggggcttttcctaatagagtgatttaagccttcatttttagacatctaagcccttggtgatcatcagcataaaatgtgacaaattaaacaaaagcaagacagcacatcagagaacaactctgaggtggaatgattgggaaccaatgaatagttgttcagtaaatggtttatattttacagatgatgaaactgaaacacaaaaaatttagattaactcttaggtgacaaagccaggattgaagctcatgcggtctggctccagaacaactcttcttcatagttacgttatactgcccctgcattgttggtattgaaaaatttcctttcatctctggtaaaagtcagctctctaactactgcatctcacagctgaacagataactgataccgtggttccagaagatttttctaacagtgtttgcaagctataaaatagtgctttcacttagaaaaggctggacgtggtggttcatgcctgtaatcccagcactttgagaggccgaggcaccatgctgggagataaggatccaacataagacaaacagtgctgatgcttttggaaagctcatattcaagctggggagacaaacaacatacaagtggctgtagctaccttctgcatatggatatccagttttcccagcaccacttattaaagagactgtcttttctgcagtgtatattcttggcaccattgttgaaaatgaattcattgtaggtgtgtgggtttgtttctgggttctctattctgttcaacttgtctatgtgtctgtttttatgccagtaccgtgtcattttagttaccagagctctgcagtataatttgaaaccaggtcatgtgattcctccagttttgtggtattaggataggtttggctattctgagtcttttgtggttccatataaattttagaattttttttttctatttctgtgaagaatgtcattggtattttgatagggattgcgttgaatctgtagattgctttgggtagtatggacattttaacaatattcattcttctaatccatggaacatgggaatacctttccattaaaaaaaaa

SEQ ID NO: 24576 - DNA, 922 bp, Homo Sapiens
aaatgttttgttgaatgaatgtatggtgcttggaagagaaaacaactcttggagacagttgagagttgtacttcatcctgtttgttctgggcgagggaagacaatcttagagttggaagagatgtaatccggctcagcctcccaggataaaggaacttccttttgaaacaccctggatggctactctctgcttgagtgttttgagtggagggcactctgtgtctgacagggtgattatgagccaggatgtgcctacctctaatgctcacatttgccccagagtcagggtgctccctggcatggttgctcctcttactcttagacccaccagctggttttctccagataggaacagggctaggagaaatctttctcagaaatccatctcttctgatttcagattattctctaggcggagaaaaacttcccgtctttaaagttcttagagaagatgtatttattgtatactaatcctccagcacctgctccactccttattataaaatgtcatatccaaagaacagatgctgtcactgatgcctgatgagccagtagtttaagcttccttgtctcatcagtggtacagaatatctcatggactacctcccacttagttttctcaaaattatctcacttaaaataggaaaactgctgctgtgtgtgatgctttttttaaaagtgaatttctaagttgatgactaagtctgtccaacagaaacatacagggaattataacttctgtgagactgactgtcagtcattccatctttgcaaaccactggcacacagaagcagaagctttggaagacaaaaaaagcaccctttgattcagccaaagactgactttaacagacgcaaaatgctatatacatgaaggtgtttgctgcaattttatctataatagcaaaaaaaaaaaaaaaaa

SEQ ID NO: 24577 - DNA, 1529 bp, Homo Sapiens
gcagcacaagcagaagcctgggcctggctagcagccaatcagctctcatctgtcatcactactaaggagtctagtgctacagatgaagcatggcgactattatccacttacctggagaggtacaaagtccagaataacttgtatcaccactgtgtaatcaacaagctcttgtctcatggagtgcctctgcctaattggcttataaacagttacaagaaggttgatgctgctgaattgcttcgtttatacttaaactatgaccttttagaagaagctgtggatttggtgtcagaatatgtggatgctgtattgggaaaaggacatcaatacttcggaattgagtttccactgtccgcaacagccccaatggtgtggcttccatactcctctattgatcagcttctccaagctctgggagagaacagtgccaacagtcacaacatcgcactgtcccagaaaatacttgacaaattggaggactaccagcaaaaagttgataaggcaacacgggatttattatatcgtcggaccttgtgatttggattgtcacctagcctttgtaaccgcttggtgcctcttaggacttaagactaccctacaggaaccctgtactcaaggccgatttttgtaactgtaaatgatgtgtacaacattcaagtctgcattctgcacaagataggagggcggaagagtcagaggaccctgtgcttgctggtggtgctaacacaatttctggtgttcaaccttggtctcaaatagctgcttttgtatatgattcacgagcttttttagagtttatatttttttaaactaccgaagacattcattatctgcaaattaagactcaccttcactttccaaaatagctgagggttgttggcttgttgtagctgaccaccaaaagcagtcactgcaaatcttttaattcttccctatcaccttttgtattttaatgcaattattttggtccagaactgacctgtattttctgtattgtacacaaaagctaataattttgtgtactttttatttattttggaggttttatatgatcttcaattgagtattaaataatttgcctagattaagcctaaaatgatgaccagctaattaaagaagatattttgaatctggttctgagctaaagttgagtaaattcttagctaagaaaaaattggaaatccatcatctatattagcaacagattctcagagtaaattgttaacttctatgatttatgataatcaagctggacttgatcatacaagttagtctcataatgtattggaccaaaatgtaaacttcattggtcagatttagaagcattcatgctcacaagttttgggaaagtgaaaaataataaaatcatcttggattttattctgtatattaaaatttatcttttaaggaaacaatctctatactacttgcttgtatagccttttgacccttcttgagtttttcagaagcctttaatttttatactttcaataccatatttacattatatactttaattaacaaaaaaa

SEQ ID NO: 24578 - DNA, 3228 bp, Homo Sapiens
gaacatttataaatggactaatactgcttgtctttcccccaccgcacaaaactggttcttaagatgccagcaatgaatttgagactatctttatttataaatggaaaccggaaacttttataccaaactataataatgtgcagcactgtagggctttttttttttccctccaaatacagtgaaatttttttattcacaagagctgccacatctcagcatttagtaatagagctgctttaataaaattctagtttgattgtcatgtcaaaaaaagaaaaatgttgcatctttgtgattttaaaacataaattaatgaaggctctgataggctattaggagttggcttggaaacagtttttggtctcacaggttaccattgtttggggatgtctgagctgttttcagatctaggaatagcacagtgttgtcttgtctttggcagtctcatttggctctgtttcttgcaccaccagcatgttcattaccacttaaatatattgctacagcagtggaacaacagagtggtgcaagacactgtagattaacggtagaggagaaattgtgcccttagtgttaacaatgtgccttttgttctgaatgccatgttgtagggcatgcattttttggcctctttaactcttcgaattctagtcagtaagaatggaacccatctctgcaaagatacatctgtcttaaatatctagttacaggccttaatagaaaccataaggcatgactcctcttcaggcactgaaaaaagataaccatcaggtagtgttacacaaggacttcctatatttaaggggttaaagatggtctttgttgtatcttaacatcagactgatttttacattttttttttgttatgctaacactagacaaaaatcaactgtatttgtaaaaatttacctcaaaccatttaattttatagtgtgattaatcccagggcatttggtatgaaccaaagtgcattccttttatatgtgcctggctctagtaaggatggccagggatttttacaatttgggtgcaaggcacttaagccacttttaaacttaatgggtggtttggggtcgtgttaaatgaccccatcagaatgttagaaaacactttaggcatcagtagcattgggccatattggaatcctaaagtgtgaattattttaaggagagcattcatttttgtaatttttttcatcaaaaatatttctggtaagcagaagactttttaaaaaaactgatctggtctcggtaaaggttttaatattgcccaacataatgctgtaatagcattaaaaaaagtatttgtgaactctgtttcttaggggcttgtacatctctctgctatggacatacataaaattaattgtaattatactcagctcaactgctacagttctgtctaggcagtggcttgggtttttatcgagcaacaacttagacacgtgactgtaatatgctgcaactgtgtgtactgaaaatatgtgaaaatggttgaatgtggactgtgtatatatgtatgtaaaaatttctgtgagatgctgctgtcgccacttaacattaaatatgttctagtggattttaatcctagtggccagttctatgatactgtatgtattatacagctgatgacaggagtaagactgtttagtgaatatctgttaaattttattgttgtggccagagataatttcagaataaaattttaatgtcctaccttacttctctcccctttctaactataatttaactcctgatctatttctggtattatcctttgtcaattagcctggagagggtttagaatgcaaaatggatagctctatatcagggtcttgagaagttaaaataattcattctactagtttgttcatagcaatactttattagttcaatataagtatgcagattccaagtggaaaaacaaaggttttagtaagtagttcttgcttttcccaggatattctattccttcacctgtcagatttttatgttaacttttttatatatagcctctgctgtgttctttattatgctagagcttcatatcttcttttattttaaccttcacaatgatagttaagctgggggagcaaaacctgtcaattattccccaccagtcttcattcttttctctgcacaagttctggtaaattattctaatgtgctctaaccagttccacccaatgttttttaatgcttatgagtttgcagtttttgtacttggtggtctctgtggttcacatttttttgtgttgtagtgtctcctgcctcggttggctcagaaaataaggcctaggaactgcaattagctcatgatttgtcaagttcagttagtaccaagctaagagtttacttacagatgacagcaagcagatgctctagtaattcgtcagacattgcagggatattgtgtagtcagatattaccctcttgtggaaagaactacctcacatcattatttatttcccttctgttaccaacagccaaggaattacttagtgtggctccctgcatcaatactgggatatgcttaaacaagggaatgccataagagttcccaattgcctcgtcatagcctgggccatagatttttgttactgctaatcttgcttcttaaagttcacacccagtgcaaaaaacccaatcagcaaactaaccccaaaatccaatatatttagaaatgtaagtgttaagagatgtgcattatgtacaaaattgaaaattggtgctaaagtggcaatgtcaatttaaaatttcttgtccagatctgactgactgactcaggagattatagttcctactcattctctttccttttatcagatctttcaaaagcgctttttaaaattgatcaatgtgcaattctgtttgagtctctacagtcctatcccttttggaatgaacagctacacaaataaatattcttggaacttcgaagttgtcttcaaactagctctagaaaatgtccctagttgacattagtgttggtctgttagaaggggaaattgatttgactgcttcatgttttgaaaagagcattaagagggatttgaggaaggtatatgtggctttcttttttcttaagtttgaattacacttgatttcctttgggttattaggcagataaacccttgtcattagtaatacttagcactgtccaaaatgaaaaatgactgccagtgtgttgcacatacataagaaaattacatcttactgcaaaaaaaaa

SEQ ID NO: 24579 - DNA, 3245 bp, Homo Sapiens
ggcggcggcctctccgcttgggttccacccagcctctgatgacccggcttcgtgatgtcagcggcgaggtggcaggaacaccgagggcagggctccaggccagggctccactggagcccttcagccttccctccctgcccccgtgctttctatggggctgctactgtgctggccctggagagtctttttggctgctagttttggggtgctctgccccctttctgtcttccttactgtggttgaggcctcccgagggggctggctgtggtgtccagcagctctccagaggtggtcaggagctccctaaagtgcatggaattggggcttggggtgtgggagggaccaaggggtaggctgctagcagctgaaggtgtcgtaggtttttactaaagaaccttccactgtctagagacttgagagagggaaagagagagagaggcctagacgaacacaatcacatgttttctttgctgttcctcccgggatgggcctgttttggggtttgggactctgaacccgagcggggttccttcgcttgactttgatcctggtcctaaaatgcctttccccactcccctcccgtgggttcaggggccaagcggcccctcctcagagcacgggcagcaccgtctcctggacccctgtgtgccagcctctgcagacgcagctggtgggagggagcatggatttggaggtggagaagtcactcctggtcctcggagggggtgggctgtgtgcctagttcagtgtgactcggggattggtgagggcggacaggtttctgaggcctccctagccttctttgtaaattcacacgagatagtccagggctttccagcgcccagcttggatgataatcctcgtctcccccactctaaggcctccttgagatttctttggggtctaccacgtcctctgcctgtctccaggtggtacaggagatgtggttcctctccctctcctggctccctagaaccccccacttcccctccctgtagctttagctgaccccgtggtggtgggtgtggggtctgtgcgcgtgctcaggtaagcttgggggctccaggtaagcggtcccgtgtcccccccccgggaagcccgcctcctcgccaggcccccaggagttgccgagccccccccatcccgctcggtttggacacccgcaaggccggcatcggtaaatggcacctttttctcttcctctggttgttatttgggggggagcgggctggggcggggcagggtattacggttggttgaggacagccccctaggccagggctgggtgggggaacggggactttttggccttcatgacagccccacgttgatcacaggccagggcctcaggcttgccttctgctacgcgctgcccgagagcagcagtgagcctctcccccgtctcccctctacgactcccctttcctggcaggctcaggctggggtgcgctcccagcacgtgttgagccgggggtgtggagggcgagatggggcagggctggggggaggcagagtcagtcgtctcaggtaaggcagggattttcagtagcaccgcacggctccccatgcttcctccactgcccctctcccctgctgcaggggccccgccaggccccctgggagtgtataacccgcctctctgctccctgccatttcctgaagatttctcccacccccttctggttcattttctgttctgatgtctgttccccccacactcacccccctccaaaaaaaacaaaaacagaaaaaaccggtgtggtctggggtgcggagcgtcccagctgggcctcctgccccggcttggtgtctcagggtgcatgcttggggttgtggaggagccccctcccccacagcagagtccagcgtggagttaaccttcagtttctttgcagcgattttggccgccctggcgggagggggctgttccatcatgtgggagaggaagggccggggagcctagggggtggcgggtgagggtggacgtctcccccgaccaggagtggttggggcgctgagaggaagcagacgctgagatggagcaggcccttcaccggtttgggagagggttggtctggctgtcagttgcctggctgtctgttgggcgtgtgcgtgtgcgtgatgatggggacacggggcggggattctgtagagctgggcctgtcctgactagaggaccctctggggactcctctcccctccccctccccacatctgttacagccgcttacaaacacgcagatggcaagaagattgatggcaggagggtccttgtggacgtggagaggggccgaaccgtgaagggctggaggccccggcggctaggaggaggcctcggtggtaccagaagaggaggggctgatgtgaacatccggcattcaggccgcgatgacacctcccgctacgatgagaggcccggcccctccccgcttccgcacagggaccgggaccgggaccgtgagcgggagcgcagagagcggagccgggagcgagacaaggagcgagaacggcgacgctcccgctcccgggaccggcggaggcgctcacggagtcgcgacaaggaggagcggaggcgctccagggagcggagcaaggacaaggaccgggaccggaagcggcgaagcagccggagtcgggagcgggcccggcgggagcgggagcgcaaggaggagctgcgtggcggcggtggcgacatggcggagccctccgaggcgggtgacgcgccccctgatgatgggcctccaggggagctcgggcctgacggccctgacggtccagaggaaaagggccgggatcgtgaccgggagcgacggcggagccaccggagcgagcgcgagcggcgccgggaccgggatcgtgaccgtgaccgtgaccgcgagcacaaacggggggagcggggcagtgagcggggcagggatgaggcccgaggtgggggcggtggccaggacaacgggctggagggtctgggcaacgacagccgagacatgtacatggagtctgagggcggcgacggctacctggctccggagaatgggtatttgatggaggctgcgccggagtgaagaggtcgtcctctccatctgctgtgtttggacgcgttcctgcccagccccttgctgtcatcccctcccccaaccttggccacttgagtttgtcctccaagggtaggtgtctcatttgttctggccccttggatttaaaaataaaattaatttcctgttaaaaaaaaaaaaaaaaaaaaaaaa

SEQ ID NO: 24580 - DNA, 2030 bp, Homo Sapiens
aaagcataatttacttaaaagaaagaattattgtttcagaattaaataatatagctgaagctaatagtcaaattataacagaagttaaaagcttgagagtaaggctgggctatttcttctcccttacctcttgcatgcatatgattatcaatttctgctcattttatttccaaatacttcttgaatttactactgcattaactaatacctttattattacaatggcatctttaaaaacctatgccaccagtctcatcttctatttattttccacagtatgtcaagggatgtattcctctttaaaaaaattgattattcccatgcataaaacccttcagtagctcctaattgcctacaaaactacagaataaatataatactgaggaggtgagggagggaaattatagaccaatattactcattgttgtactgccgaatcctataagtagtattttacttatactttaacacatgtatgagtaatattggtctataatttccctccctcacctcctcagtattatatttattctgtagttttgtaggcaattaggagctactgaagggttttatgcatgggaataatgaaaaaaaaattcaagatactctcagaacatacattctcattgagagtgatactgctctcaaggggtaaaactggttcttaggagaaaaaaaaaaatctcagatattacaatagtttctggccatagtacttaaacagatatatggtatatctgtggtattaaattttcatgggggtgggggataattaggaactaaaatgtctataaaggcttcttaggggagcaagagaaaaaaaggttagaaacactgctttagtatgacagtagacacataaatttaatctctccacgtggtctccaaaaatccatacaaattaacaagtaaggcaagtaaaataacctatagtccatgcctacagtgtaactaagaggcagaatattaaacatttgtatttgcatataagtcaggaaataaaaatttaggaccagcgcagtcagcttcagagcctacaccaaagaggaaactcaggccagacatggtggctcatgcctgtaatctcagcactttgggaggctgagatgggcagatcacttaaggtcaggagttccaaaccagccaggccaacatggtgaaaccccgtctctactgaaaatacaaaaattagccaggggtggtggcaggagcctgtagtcccagctactcaggaggctgaggcagaagaatcgcttgcaccttcaaggcggaggttgcagtgagccgagaatgtgccactgcactccagcctgagcgacagagcaagaatctgtctaaaaaaaaaaaaaaaaaaaaaaaaaaacaaaacaaagaggaaactcaggtggcaatttcatagaagaaagaataaggaaatatctttataatacagaacatggataatatcaatgagagtttacccataagaagagagtccccttgctgtgtagggaaatactaagaacaagtcagagagctgatggatgaaagccttaacctctggggagataaaagaaagaagcttggaaatacaggaggccaaagatagcagtcttgagatggtatatgagggaagcagaaattaatattagaacctgggtacaggacagattctgaaagtgaatagtattacataaagcttggtaggaaaatcgcactagttcaccagtaatggatccaaaccaagaagaaatccctgatttacctgaaaaagagttcacgaagttagttattaagctaatcagggagggaccagagaaagacaaagcccaatgcaaggaaatccaaaatatgatacaagaagtgaagggggaaatagtcaagggaataaagaaaaaaccatcaaaaattcaggaaattttggacacgcttttagaaatgcaaaatgctccggaaagtctcagtaatagagctgaacaagtagaagaaggaaattcagagctcgaagataagttcttctaattaactcaatccaacaaagacaaaaaaaa

SEQ ID NO: 24581 - DNA, 2680 bp, Homo Sapiens
ctgcctctgaaacatggcaggctcggatgctgagtgggtaaccattgccaataaccttctttttaagtgtcatatacatctgagaatacatgaacttcaagactgtgatgctaatgtttttattgctctttatcagtctattttgggagaaaaggtaccagacctcatagttattcctaggagtcaagaagatgatgcacacaatgtacaagcagtaattgattcactggccttggactacttgcaggtcagcttgtctcacataacagctctatattctgtctccaggagaaaatatagtgaaaggagataaagaatctattaagaatctcctggaaatatttgatggtttgttggagtatcttacagaacgcatcagtgaaacatctcatgagaaaagtgaaactgaacagtattttaaagaatctgatcgaggagaacgtttggaagagccagaaagtactaaagaatctaaatcatcatggaaaagagtttcttttgggaggtgctccttgtcttctgagatgttgggcccctcttgggatggagatgaagcagaatccactggtgaaatcattagacttggagacacagcacacaccttttctctaagaagtaatggtgctcaatgtcctaatgaaatgctgtctaaaaaagccttagcctcaccaagttctaaatcacatgaagatatgttgtaccctcctagtgttttgtccaagagtaggacatcctttgttgaagacacggaaaccctttctgtgagtgggattccaaatgctaggaagctaggggagcctatccgagcagctattcctttacatccaccctaccacccttcagagcctcgagcaccctgccccataggaaaagaatacttgcattcaagtcactgctccccagccgtaaattctactggagagcatacggaattttctggggatctagatgatggacttttcttaatttccaagttgcctaaaggcagcaaatgggaagtatatccagctcaggtccaagggcctaggacaaggaagcctcccaaaggaaaaagaaatgaaaacagagctacagcctcatcctgcaattcacctttcccccagaggccaagaaagagattaacagaacaagaattacatgatgtatcagaaaaactctctcagcggctttctgaactagattggatgttaaaaagtgctctgggtgatcggattaaagaaaagactgaccataaagaagaaaatactggaaatgaggaggtagaggatggaactgaggagacactgtctcagcacagtgatggcatcgtggagtatgggccaaagaagtcaaggccaggactttccatgcgtagaaagccaccctacagatcccattcgctctctccatctccagttaacaaacacaaacagttccacttggagagaaaaaggcagcgcaagccaagagaaacagatgtccgccaattccaagcacaggcgtttactgaagcatttgaaagggaactaagaagacataaagttcaagagaatattggacctctaagaatacatgagaaggaggaggaaacagtgggaaaaaatatacagaggagaagcctgttcgtaaaggaactccagaatgtagtcagccctggaagatatactctagaaaaaccacaacgcagagtcctaagaggtggcctcccaaagccaaataaagcagttccaatgaaagtaagtgaacacagtctcctgccccttatgctggagcagtttccgtttctttatgtttctggcccaacactaagcaaaatgtggaaacagcaaattgcacaggttgaacagcttaagaaagaagcatgtagagaaaatcgatcaaagaagaaactccaagatgaaatagaagaagccctaagaaggcatgacctccttactacccttgtcaagaaagaatatgaacataacaagagactgcaagacttcaaggactgcattcgtaggcaaaggttgacccaatcaaagataaaagaaaatcgacagcaaatcgttcgtgctcgaaaatattatgatgattatagagttcagttgtgtgcaaaaatgatgagaatgaggacccgggaagaaatgatatttaagaaactgtttgaagaaggtttaaacattcaaaagcaaagattacgagacctaagaaactatgccaaagaaaagcgagatgaacaaaggagacgccaccaggatgaactggactccatggagaactactataaggaccagttttcattgctggcagaagccatatcacaggaacatcaagaacttaaagccagagagaaatctcaggcccagacattacataaggtgaagagggagctgagatctaagatggagaaggaaattcagcagctgcaggacatgataacacagaatgatgatgatgttttcttccgggaactggaagctgagcgcttcagatctcggcttcagctggcttcctttcagtacagtaaaagtccctccctatgaggccagacttgataatagtaggtgaaggttctggaggcctttaccaggacagagctagaatcgagccagtaaacagtctaagccagaaaaataattttcaaatgctttacctgtattttcattccagtactttttatgattttttaaataaaaattgttttctaaaaaaaaaaaaa

SEQ ID NO: 24582 - DNA, 2391 bp, Homo Sapiens
catggtgctgtcggagctagcggcgcgcctcaactgcgccgagtacaagaactgggtgaaggcgggccactgcctgctactgctgcgcagctgcctgcagggtttcgtcggccgcgaggtgctctccttccaccgcggcctactcgccgcagcccccggcctggggccccgcgccgtctgccgcggcggctcacggtgcagccctcgcgcccgccagtttcagcctcagtgtcaggtgtgcgctgaatggaaaagggagattttgagacatcatgtcaacagaaatggagatgtgcactggggaaactgccggccgggccgctggcccgtggacgcctgggaggtggccaagggtcttgatctgttatccagactggagtgcagtggtgaatcagagcttattgcaaccttgaactcctgggctcaagcaatcctcctgcctcagcctcttgagtacctgggactatagcacacaccacaatgcatggctaattttttttttaatagagatgggagtcttgctttgttgcccaggctgggctcaaacgatcctcctgcttttgcctcccgaagtgctgggattacaggaatgagccactgtacccagcctatttagagttcttattgcgagtaactttttgttctagtcccttggcaggagtgtacccttgtgattcttagcctagtaaagttgttgcatcccagtataagttgagaaatatttcaggaaagaaatacgcccaagctttcccataacaccattttgggggtctgtgccataaaattcctactaaaggcaagatcctgctagcttgaggcccttctggcatatctagtatctcccatccccggattccatctgtaactcctatgtgggtcctactcgccttgcaccatctacataataattgccaacattgatgtcctggttactagcacgtgcctagcactgtgctagtgctatacctgcattctcttatttcattctcacaatatcctttgaagtagataaggacagttatcccccatttactgataaggaatctgagggtaacttgaccaaggtcacagctggcaaatggcagagctggcatttgaacccagtttgcactccaaagcccagactcttaatataatacttccatacggaacttcctcaagtcatttagaaagtgtccacttttattttatttttaaatcttcttatttaacaactcaaccactgaaatttcagtaaggaaaagaaaaaagatgccttctagttatgctttctgtttatatgccattaagacagaatggaaagcctgttatatcatatgtatctaatagcagggataatacagcccttcagttattgcccttggccaaggtttagctgtgacagtttccctacttgcattttgggctcatgaggctttaagttgaaacctcagtgcataagagaacttcagtcatcatttggaaaatagacaagtaaccattgcctttccatctcctagagttggaagagactcaggtcccctcctccctcccttgctataggccttcatgccccgaggactagcagacaaacaaggacctgaggaatgtgatgcagttgctcttttaagtctcatcaactcctgcgatcacttcgtggttgatcgaaagaaagtcacagaggtaattaaatgtcgtaatgagatcatgcactcttcagagatgaaagtatcttctacgtggcttcgagattttcagatgaagatccaaaattttctgaatgaattcaagaacatcccagagattgtggcagtatactccagaatagaacagctgttgacgtctgactgggctgttcacatccccgaggaagatcagcgagatgggtgtgaatgtgaaatgggaacttacctgagtgagagccaagtcaatgaaatagaaatgcagttactaaaggagaaacttcaagagatatatcttcaagcagaagaacaagaggtgttgcctgaagagctctcaaatcgactggaagtggtgaaggaatttctgagaaacaatgaggatcttagaaatggccttacagaagatatgcagaagctagacagcctctgtctacatcaaaaactggattcacaggaacctgggagacaaacacctgacaggaaggcctgaggttgcccgtcaacaaaaatcaggcatgttctgtgaaagtcagcatggcttccatctcagacatccttttctgtgcaaaaggaaaaagttaccagagtattgtacccaaacaaaaaggaatttttgttgttttgtcctggactttcctctaactctttggaactattttaatatttataaacttggggttgtataatctattgcaataaaaaatattagatactctaaaaaaaaaaaaaa

SEQ ID NO: 24583 - DNA, 2680 bp, Homo Sapiens
gacagagagtgaaagcgaggcagagctggctggcttctccccagtggtggatgtgaagaaaacagcattggccttggccattacagactcagagctgtcagatgaggaggcttctatcttggagagtggtggcttctccgtatcccgggccacaactccgcagctgactgatgtctccgaggatttggaccagcagagcctgccaagtgaaccagaggagaccctaagccgggacctaggggagggagaggagggagagctggcccctcccgaagacctactaggccgtcctcaagctctgtcaaggcaagccctggactcggaggaagaggaagaggatgtggcagctaaggaaaccttgttgcggctctcatcccccctccactttgtgaacacgcacttcaatggggcagggtccccccaagatggagtgaaatgctcccctggaggaccagtggagacactgagccccgagacagtgagtggtggcctcactgctctgcccggcaccctgtcacctccactttgccttgttggaagtgacccagccccctccccttccattctcccacctgttccccaggactcaccccagcccctgcctgcccctgaggaagaagaggcactcaccactgaggactttgagttgctggatcagggggagctggagcagctgaatgcagagctgggcttggagccagagacaccgccaaaaccccctgatgctccacccctggggcccgacatccattctctggtacagtcagaccaagaagctcaggccgtggcagagccatgagccagccgttgaggaaggagctgcaggcacagtagggcttcttggctaggagtgttgctgtttcctcctttgcctaccactctggggtggggcagtgtgtggggaagctggctgtcggatggtagctattccaccctctgcctgcctgcctgcctgctgtcctgggcatggtgcagtacctgtgcctaggattggttttaaatttgtaaataattttccatttgggttagtggatgtgaacagggctagggaagtccttcccacagcctgcgcttgcctccctgcctcatctctattctcattccactatgccccaagccctggtggtctggccctttctttttcctcctatcctcagggacctgtgctgctctgccctcatgtcccacttggttgtttagttgaggcactttataatttttctcttgtcttgtgttcctttctgctttatttccctgctgtgtcctgtccttagcagctcaaccccatcctttgccagctcctcctatcccgtgggcactggccaagctttagggaggctcctggtctgggaagtaaagagtaaacctggggcagtgggtcaggccagtagttacactcttaggtcactgtagtctgtgtaaccttcactgcatccttgccccattcagcccggcctttcatgatgcaggagagcagggatcccgcagtacatggcgccagcactggagttggtgagcatgtgctctctcttgagattaggagcttccttactgctcctctgggtgatccaagtgtagtgggacccctactagggttaggaagtggacactaacatctgtgcaggtgttgacttgaaaaataaagtgttgattggctagaactgctgcctccctgactgtgagctgccttccacaccctgcactgcactgtgttctctcctcacccttaacctgcttcactccagtctgttctggctgtttattaccttgttgcaaaacagggccgaagcaaggattaccttgacaaccctagcttctccttagccatcttccttgacagtgtgatctgtttagtgagatttagcatgtgtgaataaagtatatgcaggaggaaattgctttgtcttcccaatcggtagaaattcgggaccataaaaattgtgttttaccatgtggcctacaaccttaacactgctttcttaagaagtcttcacccatctacatgctaacaactcactcagcctggatttatctttactggggaagccaaacaagcaatagaggacctttacctgtgttagaaatgagttggagccaaggaacactgaagaaatagtatcttaacagttactgagtccattgtatgtgcttggctctgctctgaggtggtttatatgtattaagatttttcctcacaggtcagatatatactgttactaacttcattttatagacaggttaagtttcctgaaggccacaggtcccagtaaattgtggagccagaacccaaacccaagaagttttggcttcagcaaatgcatcagacagcccctgtccattaatagggcacaggtgggaagatgcacaaggatgtgggaactatagagaaccaatctgatgccttggcttaacaaagagtggacatggcaagccttcctcttcggggaagaaaagcccagaactgagcagatggcctcctttatgagttcatgtcctccgccttcagctggaggtaccatatggcgatgctacctgtctttctgctggaggtaccatatggtaatgctgcctgtctttctgctggaggtaccatatggtaatgctgcctgtctttctgaggttgacttttatgccatgtctttcctaagtgtgtaagaatttttctgtttgcttcaaaaaa

SEQ ID NO: 24584 - DNA, 2930 bp, Homo Sapiens
gcttgaaaacctccagtatcataattgctctgacagatggcaagttggacggtctggtgccatcatatgcagagaaagaggcaaagatatccaggtcacttggggctagtgtttattgtgttggtgtccttgattttgaacaagcacagcttgaaagaattgctgattccaaggagcaagttttccctgtcaaaggtggatttcaggctcttaaaggaataattaattctatactagctcagtcatgtactgaaatcctagaattgcagccctcaagtgtctgtgtgggggaggaatttcagattgtcttaagtggaagaggattcatgctgggcagtcggaatggcagtgttctctgcacttacactgtaaatgaaacatatacaacgagtgtaaaaccagtaagtgtacagcttaattctatgctttgtcctgcacctatcctgaataaagctggagaaactcttgatgtttcagtgagctttaatggaggaaaatctgtcatttcaggatcattaattgtcacagccacagaatgttctaacgggatcgcagccatcattgttattttggtgttactgctactcctggggatcggtttgatgtggtggttttggcccctttgctgcaaagtggttattaaggatcctccaccaccacccgcccctgcaccaaaagaggaggaagaagaacctttgcctactaaaaagtggccaactgtggatgcttcctattatggtggtcgaggggttggaggaattaaaagaatggaggttcgttggggtgataaaggatctactgaggaaggtgcaaggctagagaaagccaaaaatgctgtggtgaagattcctgaagaaacagaggaacccatcaggcctagaccacctcgacccaaacccacacaccagcctcctcagacaaaatggtacaccccaattaagggtcgtcttgatgctctctgggctttgttgaggcggcagtatgaccgggtttctttgatgcgacctcaggaaggagatgagggccggtgcataaacttctcccgagttccatctcagtaaaagggaagcaggaagaccaagaaggtacgaagatggcacattttcacatagctgattttcaaccaaatgaaaaaaatcaagtgcatttcagaagcttttggaagagcagcttaattcctctcagtcgggaaatgttttctctgccttctgctttgcttgcaccaaacatttctaaacacttgttctgccatctacatgggaggtgatgaaactcagtggtaactcatgatttatgacattgaaaataaagaggaacattgacctgcagactatggtttgtacaagaaagtttgtttgaatgtgtagaagaggaaaaagcaacaacagcaacaacacgaagatgataccaaaacaaggaccacaaaacaactagccatgatgggagacaggagttttttacatggaaacatggcacttgtgtttttatgtggcaagatctttatccataggcagagtatgaaatttcccaccaggctaagcaaataaagaagtccattgccttatagctatgtcagatcacagaatccttccaagtgctctatcacagtgtgccttatgggaagtttctgactggaaaatcttgtcattctaacactgaaaagtgcacacgcatgacaaaatgtagacaagatgcctcaaggtattggtagcaagcaagattttgccctttagttttcgaagacacctttctttcattatgcactcgggacaagaaaattaatagagcgttattccacagaaggcctctagccagagatcttgagtgtagtgcaagggactcattttttgcgaacttgtccctgtgactagtagattcccccttttcctgtgtttaggatttagtagtgcataaagcattaatatccataaacatacctagaagtttgttttgcttttaatttaaaggaagcagtaaccacaaagcttccgctcagggttttttctttcttcaagtctccaagggctcttcagcgtcacaagccagcaactctctttgcattaaaatttcaaagtttaattaatataattaaaagcaacagcaagcagcagcctgtgaagattttgctcatcttttttatgccttttgacattgaatgacctattactgtatgcgcattacttggattttgaggggcactctaccttggttatgattcagtagaggaaaaagaccacctttcttcaatttacaaattaaatcttctggagggtcgctatcacaaaacattgacgatgtatgtattataattttttagaaaaaccaccatcgtgtcacgtcgacgatgccaaattatgttagcgtgagcagaaacaccgtgggggaggaaggcagcagctgaagaaaaaagctcaaatgatctagtcactttcgatactgtacttcagatgcgaaatggatattcgagtggaaacctgacaaagtgcgcctgctttgatgtgaactggtatagacaatgaccagtggctgggtcagtgggatgtctctctgtgagcacaaaggcttatcaaatgacactaaaaataagttcaacaaccatcacattggaagggagaaggcgaacatttcatgtttggcgggcatgtgagtgcacaagatggaaagagcgattggagcatcctggtataattacccccattgtgctcttaatggaaatttcaaaggacgggagtattctgttggttggtgtccaggtttgtggcactgttccaagaggccttacacacacacacaaatatataattttctatacatatatatcctctagcttgaaacttttgctcaagtttatttatgtcactggctggctggatccaaagtcatgtgtccacacattcataaataaaaattttacctataaaaagaaaaaa

SEQ ID NO: 24585 - DNA, 3463 bp, Homo Sapiens
ggaacatggctagcaggaatgcttactgttgcgtggttcgttattaacagggtagatacaacaagaattgaatactccattcctttaagagaaaactgggcactaccatattttgcatgccaaattgctgcacttacaggctatttaaaaagcaacttaaatacttatggagagaggttttgctacttgttgatgagtgcttcaacttacacatttatgatgatgtgggagtatagccactatctcctgtttcttcaagcaatatctctattcctgctagataccttttcagtggagcaaagtgacaaggtttatgaagtttataaaatctacatattttccctctttctgggatatttactacagtttgagaatccagctttgttggtatctcctttattaagtttagtagcagccttaatgcttgctaagtgccttcagctgaatgtgaagaaaggaagttttgtagctaaaataataaaagtgattaatttttacttggtgtgtactctgacaataacattgaatattataatgaagatgtttgtcccacacaaagaaaatgggcacatgctgaaattccttgaagtaaaatttggactaaatatgaccaagaattttacaatgaattggctcctctgtcaagaatccctgcaggcaccatctcaagatttttttctgcgattgacacagtcttctttattacctttctacattctagtgttaattatttgttttctttctatgttgcaagttatttttaggaggattaatgaaggcttgaagtacatctggattccttatgtgtgcatgttagcagcatttggtgtatgttctcccgaactttggatgacacttttcaagtggcttcgattaagaactgtacacccaatattgttggctcttattctgagcatggccgtgcctactataataggtctcagcttatggaaagagttttttcccagattaatgacagaattaatggaactacaggaattctatgacccagatacagtggaacttatgacctggataaaaaggcaagctccagttgcagctgtgtttgcagggagtccacagttaatgggtgcgattaaattatgcactggatggatggtgacaagtttgcctctttacaatgatgatgatcttctcaagagaaatgaaaatatctaccaaatctattcaaagcgatctgctgaggatatttataaaatactgacatcttacaaagctaattacctaattgtagaggatgctatctgcaatgaggtgggacccatgagaggctgtagggttaaagatttattagacattgcaaatggccacatggtttgtgaagaaggtgacaagctaacctactcaaaatatgggcgattttgtcatgaggtcaaaattaactattctccatatgtgaattatttcactagagtatactggaacagatcctactttgtatataaaatcaacactgtgatatccttccagtcttgaaaaataacagagccttcatttcaaagactacctgaagtaaaatgcagttttcttctacctactcggtgtcttttgcagatcagagtatggacatttgaaatattgctgcttctttcccccttctgctgttaactggatccagagttctgtgggaaatagaagatcaagcattactgtcctttgattaaatgtgatatctaccactctgcaatattccagacaggtgtcttccttaccgttacatggtctttaacacttttactgattgcaatattttccccataaaatcttcattctattataatattgatcttgaatttgaatatgtgcaaggtcagatacatttctcaaacataacatttaataaataatgtgatataattatttaatagaaagaataattccgaccttcaagcaagtttctgaaggtattttatgatgtataacaactgaagttttacaataaaaactaatttaaatgttagctgaagatatgtggcatttaaattaaaatggaaattatataaaggaaagtgatttttaaggatatacataaagatatatttagaattttcatgatactgttctcctcatctactgcttatgttaagtgagaactttcttagtaatacataatgcatgatgttactgcattttctaaatgactagtaagtgattagttttttcacttatgcctattaatttgataccaatttaatcatgataaaacaataaccgttaacatatattttgttaaatggacatttaaaagaatgttgttcaggttttttttttaaatactgatatggggcatacaatctattcacatgttttctactgaagtactaagtaaaaaaattaaatcattatcagaataaaaatatgtgttctaaaattagcaacaatttctggggatacatgcagatgttgttaaacgtacctctgcatacagatatattataaaacacaagcaatgttatttatgaaactgtgatgcagtcttcaacatcaagaaaaaatgacaactataataaaatttacaacacagtttcacagtctaaatgctatgttcctttaagtattttcatatttttaatcatttattaagagaaaattgtgaaaagttaatttggccttatagagagattcaggatagatgtagcctatagatgtgtcattttaataagttgggatacatgtttagtttttccttatattcctgttcagtgaacagattttcataattctcacttgttaaagtgctgcaaaaattgcattttcagtactctaaattactacattagaagagagcatttctccattgtctttattttctgttatatatgtgttgtaaaagtacactacattagaagggagcttttccgttgtctttattttctgttatacatgtgttgttaaagtacatgcattcttagactaactctcagatgctttgctcttttggagctgaagaattgtttgatggtgatgtcatatatctgatagattagtttcagtggttctcatttcacttttatacgtaatttcttaactatattaagatagttgcaggcagtgtacctcaggttgactctgtacatctgaatagtgagtcactagtattttgcttcaagccttctgaaaatataaccatagttacctaagcacacagtgaatagtcacatggtagtacttgtgattagagcatgtaaaacaatgtaattgaaaagtcagcttccatattttgtaggggaaatagaacaccctactttttatctagtgtgaaatatttaatcgaatttttgttgatttatattatgttacctgtgctgaattaggtttggtacttgtgttttgtttgacatattagtaagttgcttttgcttctttctgtcaacttattttttaaataaaattgatctggaaaaattgttaaaaaaaaaaaaaaaaaaaaaaaaaaaaaaaa

SEQ ID NO: 24586 - DNA, 2772 bp, Homo Sapiens
gtttaatgtttccagaaagccaaagtaattttcttttcagatatgcaaggctttggtgggtccaaaaaatgtctatcacaagccattttttccttttcctctctcgaaaagttaaaatatctatgtgttattcccaaaccctcttacctatgtatctgcctgtctgtccatcatcttccttcctccctatctctgtgtatctggatggcagccgctgcccaggggagtggctgtggggagggcaggtactgtctttgcctgtgggtccagctgagccatccctgctgggtgatgctgggcaagacccttggcccgtctgggccttggcttcctcacttgtgaaatgagcgggaagatgactctcagttccttccacctcttagacatggtgaggtaacagacatcaaaagcttttctgaaatcttcagaagaaatagttccattacagaaaactcttcaaaataaatagtagtgaaaacttttaaaaactctcattggagtaagtcttttcaagatgatcctccacaatggaggcagcgttcctacttgtcatcacacagctgaagacattgtttcttaggtgtgaaatcggggacaaaggacaaacagagacacacggcattgttcatgggaggcatcgtcaccctcctgggtgttctgtgggaatttcctgtgtgaggaaaacgtggccacagggttgtgctgtacccacccttccccggcgagatggccctcggcctgtgccgctgcttccaccctcgccactccatggcagcttttggtctgtttccggctctgccctctgccctgaactctcatccggcttgtacctgcctgctggacccctccacctggaggccagcccatgtctcaggcccagccctagcctcttctcctcaaattctaagtgttttctctttaggtttccctggctttgtgaatggatcatgtgtctctaggtataaacctgacatcatctttccacccggcttacctccaccagatctccccagttctgtctccatcttctacctgcagctgctctgttctcatggtcactgctgcatcactgagtctggacccttgttatcattttcaaactggcctccttccctcgttccccacttcttaaagtcacctgtccattgccaccagattaagctttctccagccagatcacctctctctgagaaacctccattgacatggaaacaccattgtctggcacacatactcacatactcaccttcccgtcttgatccccacacatctttccagcctcccctcccactccactccctgctccctcctccacctccccatcctcttgtctcccctcccctctgaatccagcccagcggggcttctcctgcctccatcacatcacagaagtacctcctgcttctggttttaattagagccttccccgattacattttcctctgaattttttcctatctacatttgatctgtcatgtttaaaccccctacttctaagggaacttctctaatctcttatcctcatccccaaatagtgttttcttcctctgggttcttataatgttggtatcaatctcacagcatttagtgcttcctgcctggtgtgacagttacctgtgtgcatgtgcaatttctaatttcccacgctagactgtgagcttcctaaggcaagaatcatgccttgttggtttctgtattcctcatggtgccaaacacagtgccttctacattgcaggcgctgaataaacatttttaaagcaaaatgatgtggatttttaaaataaatatttaagtgctggtaagatgagcatgtatccggggtgcccatgaaatgttcttggggccgtgtggggacagtcgtcattcctcctcctgccacccttttctttcagtgagtcactgtggatggtcccagctgtgtcatcccaaagttcagcagggaaagctgagctgggcctctccaggtgagttttctagaagcatttctcaaactgtgggttacatcaacttgggtgtcttgagctgtaaggaaggaactccggagtcagctgggctacaggggagcttctctaagtcctgcgggaggccagacccagcctgagcttgctgttagctagcggaggcagctgctggtggcccaggtgctcgacaccaggcatcccctctcctcccacgaagggtgtgccataatccccttcaacaggaaatgcttcccagaagcctctcagcagcctcccctcctgtcctatcagctagaagcgcctcgcttgtcccaagaccagcagggacagggaactgtccgagcccgtggctgtgtggaggaaggcgacccccagcacaagattggtttcctttgggaagggaagagggagtgtgttggggtaaggggtagagcagaggaatggtcagggggcaacaaccgctgacagctgcaacaggtgcatggcatctcacagggaggcagggaggtgcgagctcctaagtaatggagcaaaaaaattctattctgtagaatggggagagaaaatgtgacattttaatttttttttgcatttatattcctaattcctacttaaagtgaatatactgccgctgtagatcataaaatgtatcttttccatggccaacaaggggcatcttttataaatgcataataacccagtttgtatcaaagggtatcgacttaagtgaaatttcaacatgctgttactttttccttttaatgtaattctgttttccaaataaatgggggagacaaatggaaaaaaaaaa

SEQ ID NO: 24587 - DNA, 4410 bp, Homo Sapiens
cattaggaatcagtggtattgttatagtctaccaggaccgacctggtgctgctcagaaccaggggctcaaggcagggcctcccttcatcttcttaaattattctctagcagctctgagtctcccaaagattggtcctagagaaaagactatgtcatttactgctttttctgatggtaaaaacatgcatatttactgcagaaaatttgaaaaatagagaaatgtgtaaagaagaaaacgtacaaaataactttagactcaaaaccaatctgattaaatcaggaaatcattatttattgagcacctactatgtgccagccactgttgttcttggtgctggggacatagcagtgaaaaaaaaacaaagtcctccccttcgtggagcctatatttcagtagggacagtcagtacagtacaggaaggggctgggctgatggaacaggatgccttttttgatagggtggtcaggacaagaggaagcaagggatgcagctatttggggaagagtgtttccagcagaaggaagaagacctgcccaggtgtcggataagagcctgcttggtgcattcagggatacgaaggaggccagcgtggctgagatgaggtaggggcagccggggtgagaacaggtgggacttgccggccatgaagaggaccttggattgctgttgagtgaaatggaaagccaaatgtagggtcttgaacagaagagggacatgatgagccttatgttttgaaatgatcattctggacaccagatggaaaatagacaggggctgggggtggggttggcaaggggagaagcttggaagccatttggttattgcgaaagtcacacaaagctgtgaaagcagagctggcctggttgaaggaagggtggaggtggggggagggccggcatttcctcccactgagcctctgcccttcccttttcctgctctctgaggttccaccatgggaccccagggtacctaggattacaatttgaaagctattggactagaggttctctaagggcccttccagctttgcctcctgtgctcttgtgtttcaggaccatgctgattctgtgggaccaggcccgggctctaccagccaggcctctgaacatgtcaacttgagaactgaacaggttcagggtctaggaaggggagacatttcaaaattttaattaaaaaatatttttaacgtttaaatttttgtagagacggggtcttcccatgttgcccaggctggtctcaaatttctgggctcgggtgatcctcccgccttggcctcccaaaatattgggattacagacatgagccatgagatttggaaacttaattcagctcccacatactaaacgtggccagccctgtgtggggattgtaagaggggataagtaagaggaaatgtctgctccaagaaactcactggctgggatgggaactagggaatcacacaaatggcccagcccaaagtctgagaggccccggcccctccctgcctggccttttttccatgtggcccctgagccagtggttcccaaactgggcaggtcatggggtcatcgaggaacttcagaatatgcagatgcccagactgtgccctcaaagattcaaattcagttagtcgagggtgggtggggcctgggaatctgttcagacaaaggcctggcctgaagcctgggctggagggttcagtccagacagaagaacagagactgatgagagggcttctgccagcttcaccaagcccgtgctaggcaggatgtggaaatcaagcctgtcttccagtggggcacgggggtggggagctggaggagggggtggcagctcctttatcagctgtccccatcagaggcccttctcccaggaaggaatgtttaaaaaactcccaggaaggaattgctgggtttggagactatgagaattccccatctcccccaatctcctcagccacctcaaatcaaccagcccgtctccccatgtttgggttaactccttattggctcggaatgtctcgcctgggttgactactgatctgtgagatcgcttagtggcctgaaatatttccagaatacaagcaacactgacaaaaatattcttgtagggccccacaaatctcactgagaaagaacccctacaggtggagaggagtgtggggtatgcagactggaaggtgggaccctgattcattccagaactggaaggaaatcagacatttccaaacaggagagagatgggaagccggaggaaggagcaggaggagggaagagaatgaatcttatgtgaatgaatggtaattttctctcagttactgggaagaaaaaaaaataacaaaatcagaccttggtctggtccactaaaaagaattctctgagtcagacttctttcatggaagttgtgaactttatcctctggcagccatttatctaatattaaaccccttaaccttcctaattgttctctttcagtatcagctggtttcatattaacctttcagtctttcccataatgcagttacctccaactcccgccagacccaattcagagctgccatcaggtcagacctttgcctgctcttggcaacacgtccccctgtcctgctcctctgcaacctgcccctctttttcttcatgtgctgtgaaggcaccatgtggatgggtgttcaacttctggattggggatgcacagagcctgagggacacactttgcaaacctgcaccttgcacttttgggttctggcctgcaaggtctcctttattcttttggaccaaggctgtccctgggagagggcagccgccggcctgtcagagcaaatcagcctcaggcggtttctgcggctctggtatttgagctttgttttccctctctcccgggaagaactcattgaaatagtttctctgggaaagacaaagcgtctcgcccagatgctgaaggatcacttggtaactgcctgtcttggtttcccgttgtgcccatgaaggcgccatcagctctaaagctgacctgtggttccgtctccaaacagctaacccagacgtcacccccttgcagccagccgcacagcctgagttggagttctggcctctcctagcagtgagtgacagtgttggaggggccttggacaccttgggtaattgctaactaaatatgagcagtaggggaaggtcttctggtccacggcagagccaacggggcacttcctcttctcttttctagtcagggtagaaagctagaaagaatcctaaaaatcactatccaagtccccattgtgtggggacagaggcctggcctgaagcctaggctggagggttcagtcggaagcagaagccgggagactgcatgagagggttccttccagcttcaccaagcccgtgctgcgcgggatgaagaaagtcaagcctgtcttccagtggggccctgaggtgggggagctggaggatagggtggcagcttttttatcagctgtccccaaaagaggcccttctcccagttgccacggaccaaagctcctcctgggagctccagcctgtctgttcaatgtttgccttgcgccttttcctggtgaggccacccccggcaccatctcaggcctcagaaggacgacctcactgaaacagcccttaggttgggaaagaagcaagccctccgcgccccgtccaagtctctcaactgggcacgagcacacacagacgcccaggccctgtccctgcgccagaatggccgctcgcgtttccaggcacgatgcccctttccatgagtgcacagagccctgggctgagctgggggccgagctccacgctctctgagcagctctgagcggcacgccaaagaaggtctttcagatgggctctgggatgtggaaccatggcgtccagccctagcgtcgactccacactagaggcaccctgactttcgcccccttcttacctgagtatcagcttacttccatctggggactgaatatggggcagattccagaaaaaggaggttggggcaccaaaaccaacaccaactctgccaacggagccagcacagctatttgtctccaaccacaggccgcaagggaagttcacgggctcggcacccccaggtcccggatgtaaggatattgcccgttagacaaaggaaaggccccaagtccacaactcatgtttgtgagcttaaccttgtcctataaagcactttggaacaggcccaggttctcccaccatgtacagctgccattgacctggacagtcccgcaaggtccttcagtggaaacccagaagggagagtcactgcatgtgaaccctaagggttctggaggtcaaagttgctgtgggtgacaggcaaccaagactaagggcaaacttgaaacataaatgagttaaaacccacaaaaataagacagttttaaataactaaaaaaaaaaaaaaaaaaa

SEQ ID NO: 24588 - DNA, 3115 bp, Homo Sapiens
ggtgttggcgcatctctagatcctttcccggagttcagttatgggtgtgagaggtttgcaaggatttgtgggaagtacctgcccacatatatgtacagtagtaaatttcaaagaactggcagagcaccaccgaagcaagtatcctggatgtacccctaccattgtggttgatgccatgtgttgtctcagatattggtatactccagaatcttggatctgcggtggccagtggcgagaatacttttctgctttgcgagattttgttaaaacttttacggcagctgggatcaagttgatattcttctttgatggcatggtggagcaggataagagagatgaatgggtgaaacgaaggctcaagaacaacagggagatatccaggatttttcattacatcaagtcacacaaggagcagccaggcagaaatatgttcttcatcccctcagggctagctgtgtttacacgatttgctctaaagacactgggccaggaaactttgtgttctttgcaggaagcagattatgaggtagcttcctatggcctccagcataactgtcttgggattctgggggaagacactgattacctaatctatgacacttgtccctacttttcaattagcgagctctgcctagagagcctggacaccgtcatgctctgcagagagaagctctgtgagagtctgggcctctgtgtggccgaccttcctcttctggcctgcctccttggcaacgacataatcccagagggcatgtttgaaagctttaggtacaaatgcttatcgtcctacacctctgtaaaagagaactttgacaaaaaaggtaacatcatattagctgtgtcagaccatatatcgaaagttctttacttgtatcaaggtgagaaaaaattagaagagatattacctctgggaccaaacaaagctcttttttataaaggaatggcatcatatcttttaccaggacaaaaatctccatggtttttccaaaaacccaaaggtgtaataactttggacaaacaagtaatatccacgagttcagacgccgaatccagggaagaagttcccatgtgttcagatgctgaatccaggcaagaagttcccatgtgtacaggccctgaatccaggcgagaagttcccgtgtatacagattctgaacccaggcaagaagttcccatgtgttcagaccctgaacccaggcaagaagttcccacatgtacaggccctgaatccaggcgagaagttcccatgtgttcagaccctgaacccaggcaagaagttcccatgtgtacaggccctgaagccaggcaagaagttcccatgtatacagactctgaacccaggcaagaagttcccatgtatacagactctgaacccaggcaagaagttcccatgtatacaggctctgaacccaggcaagaagttcccatgtatacaggccctgaatccaggcaagaagttcccatgtatacaggccctgaatccaggcaagaagttttaatacggacagaccctgaatctaggcaagaaattatgtgtacaggccatgaatccaaacaggaagttcccatatgtacagatcctatatccaagcaagaagactccatgtgtacacacgctgaaatcaatcaaaaattacctgtagcaacagattttgaatttaagctagaagctctcatgtgtacaaaccctgaaattaaacaagaagaccccacaaatgtggggcctgaagtaaagcaacaagtaaccatggtttcagacactgaaatcttaaaggttgctagaacacatcacgtccaagcagaaagctacctggtgtacaacatcatgagcagtggagagattgaatgcagcaacaccctagaagatgagcttgaccaggccttacccagccaggccttcatttaccgtcccattcgacagcgggtctactcactcttactggaggactgtcaagatgtcaccagcacctgcctagctgtcaaggagtggtttgtgtatcctgggaacccactgaggcacccggacctcgtcaggccgctgcagatgaccattccagggggaacgcctagtttgaaaatattatggctgaaccaagagccagaaatacaggttcggcgcttggacacactcctagcctgtttcaatctttcctcctcaagagaagagctgcaggctgtcgaaagcccatttcaagctttgtgctgcctcttgatctacctctttgtccaggtggacacgctttgcctggaggatttgcatgcgtttattgcgcaggccttgtgcctccaaggaaaatccacctcgcagcttgtaaatctacagcctgattacatcaaccccagagccgtgcagctgggctcccttctcgtccgcggcctcaccactctggttttagtcaacagcgcatgtggcttcccctggaagacgagtgatttcatgccctggaatgtatttgacgggaagctttttcatcagaagtacttgcaatctgaaaagggttatgctgtggaggttcttttagaacaaaatagatctcggctcaccaaattccacaacctgaaggcagtcgtctgcaaggcctgcatgaaggagaacagacgcatcactggccgagcccactggggctcacaccacgcagggaggtggggaagacagggctccagctaccacaggacgggctctgggtatagccgttccagtcagggacagccgtggagagaccagggaccaggaagcagacagtatgagcatgaccagtggagaaggtactagtcaacctccagaaagagtatggagagaaaaagaggcacacctggacgcagagccctgccagcgccctcctctgctgttgcagctgcaaggagaccatgcctgtgggagccaggcctcgcttgcatgaagaaggaacgatgcctttttcaatggtgtctccctcccattgtgcagaagagcttttgttggcttctctcccgagcttgtgcctgattctgtggcccaaaacaatcattgttaacatcttcatgtgtttcattctgatctttcattcatatatatgatgcctagctaatttcattttaaaataaatgggaatctgttgtaaaaaaaaaaaaaaaa

SEQ ID NO: 24589 - DNA, 3541 bp, Homo Sapiens
gtgatccacctgcctcggcctctcaaagtacagggattacaggcgtgagctcctgtgcctggcctgcctgtgtagttttgatcaccatttgtttcccgtctatggaacctctgactcctctgtctgctttgactgaggattctattctgggtgttctctcatgtctgaagccttcttcagagcctctcctcttgtcatcatttaaagtaccccagcgtttgtacattattaccatgcacactgtaactcagtaaagatttttgatgacctgtggtgtagaaggattatagaggaagatcctagataacattgctgctagtctctgcccacatcacagcatatgtccagtgttttccctccagcctacctcttatagatgattgtgtatgatatgtaggagagctcttatttggtccttgcttctgaaacaaaagttgctgttgaattgctttgggttctaggttgaagtctgtacaaataccagcagtcctcatgctggcctctttcctaaagataactcgacactggctgtggacatctacaaagggggtgttgtgctgggatgttactttgggcctgctgcactctacatttgggcagtggggatcctggctgcaggacagagctccaccatgacaggaacctattctggccagtttgtcatggagggattcctgaacctaaagtggtcacgctttgcccgagtggttctgactcgctctattgccatcatccccactctgcttgttgctgtcttccaagatgtagagcatctaacagggatgaatgactttctgaatgttctacagagcttacagcttccctttgctctcatacccatcctcacatttacgagcttgcggccagtaatgagtgactttgccaatggactaggctggcggattgcaggaggaatcttggtccttatcatctgttccatcaatatgtactttgtagtggtttatgtccgggacctagggcatgtggcattatatgtggtggctgctgtggtcagcgtggcttatctgggctttgtgttctacttgggttggcaatgtttgattgcactgggcatgtccttcctggactgtgggcatacggtaagcatctctaaaggcctgctgacagaagaagccacccgtggctacgttaaataacactggattagtctgtcttctgcaggtagccatcagagccagtgtgtttctatggtttactgtgtgaacatagccaaaagtatgtgccgttgcacagactgtgtttatgactcaaccgttggttggaaaagactttgtttcatgtgtatttgaaagatggaattattttttccttcctgacctaaccttagaactggattagggtgggatctttgaaaagctgacatttgctgctatcattccaacactaaattcttaagtagttgcccaagggccagctcagtttatccttcggagagacaaggatatgcatgattcttaaccaggctatatgttaaaaaaaaattggaaaatgcaatacattttttattatacaaactacagaatgagtatgcaagttttatttatcaaaatgtaatggatttttaaaggctgagaaattttccttatacctaccttttcagttattttaattataccaaattatcaactagaatagcttcatccatatgaaatataaaatgaagagacacctagctctatcaggcttaggattctttgaacttatttccactttaatttctcagtggaagttaagaggggtgagaaaacaaagaaggggaaaaactgacaactaacaaaaccagcaccacatcgctaggtggtgcttactaattaccttctcaggattttcctcagattgaaaagcttatgaggatttcttgggagtcttaataacctgcctgttagtacagagctttcctgatgatatttactcttgagcacatgtggttgtaaaaccttaactttctttctccaggagggtggtgatagaaacagatggtagtatttatgaactgatgttctcgtgaaatgttgagggtggggagaaaagactttaagggaggagagccatctattttgttcctaaagccacctctcagcagaatcgtcatgtttttctgatgcaccgctctgcttcatgcccaagatgacttgcgaggcaatctcaggagctgtggacttaaccattgcaaagcacactgtctttctcagcgttctctgcaagtcagtaggtgttagtatggttgcaaagttcactgtctcagcaaagttgaactgggctacctctctacagctgtttcctcagagggaaaaatcttgagaccagatggtggagctctggagtcagaggaaatgggtgtcttcagcacaaagctgctgcttttacttcagccacttctgacatttttacataccgagcctgagattgtgtgattatctcaaatcaaatcactttgatggagataaataatcaaaactgttttatagtcattgatttggtgagaacagtaatggaaaatggtgttgaaggacttctcatttttggagctttccttccagagtcctggctgattggtgttcgctgttcatctgagcccccaaaagcattattactgatacttgcacacagtcaaaagcgcagactggatggatggtcttttataaggcatttaagggtacactactgtgtttcactgaccatacatttttcttagcccctcaagtaatatagcacagagttatgaatgacaattcccctaaccattcctcttcatatctgcctcttccccttaccatcgtaattctccaaactggtcataaaggcactctgtgaagatattggggactgacatcttaagctctcacctggctgcagtaggaaaggccaaactgacgacaaaaaaaaaattctttataaagatgatatggtaacatgtatctttgccctgggtctgggtgggtccagtcagtctcagatttacaagcatttaggagcctaggtaaaagctgctagtattcttttaaaagttacatttatgacttgcaatgatagaaaactccttccaattaaatggcattttataatattatgtgtgtacttcacagtgttaaaaataccctcatacgttattgcatttgatcttcacagaaagtgcattttaaccagtactctgggtgcaataaataatatgtagaaatttaagtcctccaattccagcatatccagtgagttttgacagtgtgtttatgtggaatgtttaaggatatacaattgtactttatataaattggttcttgttcttcttaaatgtgacatgaaataattgtgctgctacattatactggaaattaacaggggaaaagggaagagctcttggctcccttgaggttctgctagtggtgttaggagtggttacaactgagcttttagtaaccatttaaccgtatgtaaacttggtttctaattaaaaaaaaaatttcttctccataaccgtatgtaaacttggtttctaattaaaaaaaaatttctttttccaaaa

SEQ ID NO: 24590 - DNA, 4091 bp, Homo Sapiens
cgggatagtccttatacagattggaaaatgcaaggcaataatttgcaaataagatctgatacgctgtctctagaattagtgtccagggttctataccgggaactcaggctgctgtgttcaagactggtattgatagggggagggattgggccaaggacaaataaaagctccacaagacttttctaccagttttcatttttctttatatatatatttatctctctgttaatagtacggggtgccaaataaaatcctttatttgtttttggaatgctgcactttcttggtgagaaggctttcagcattttttagatactgtgagttctattagatttggtaatgtaatttttgttgactactaaaagatttgttttagtttcttagtaagtattataaatattcatgagagatgacactgagttctttctaagaatatgtgcagtctttccccttctttctttcccctttggcgttactcaaaatgtttaaaatttttcctttgaggtggtgtaatatcttttctcagtctgttgtcatacttcagtacatttgatctaaaggaaactagttgccagcttccaaatattctctgtaagtataatcacataggatgggctaaatcccccaaataacaagttgcaacaaaacgtgaaatgttatctacccagaaagttcattatagacccaatgcccagagtgtttctttgtagctgtcttagcctgtttcttgttattcataacagaattactgaacctcggtaatttataagaaacagtatttaatttttacatttctggaggctgggaagtccaaggttaaggctgggcatctggtgagaaccttcttgctggtggggactctgcagagtccctaggcggcatagagtatcacatggtgagggagctgagtgtctagctcagatctcttactcttctcagaaggacatgagatagctcatttattcattcacccgttacggattaatctattcatgaggtccaaacccttaggactacatcacctcttaaacctcacttttttttttttactgccactttggagattaacattcagtgtgcattttggaggggacaaccattcaaacctagcagtggctgatcaggtgcactccctgtgctgagtatgtaacaaaattccaaactctcagaaggaagatggggttaaggaaatactgtattttttttgcgtaaacaatttaggcacactccacccctattattagttacgctcctggggccctcccctaaatacactgtctagataccatgaaaagcccaactttgtgaaaaagcatttgtaaggacacacagtctcagcactgctaatggtaactcccttttgcacaataagtagtaggactttatcgtgccaaggactgcagacccactgtggaaatcgacattaggggtgatccaggctatgtgattcactcactcagttcgccaacaagtggcatgtttctatcccactgttaatttaccaaacatgtttaactgtagcttcagagttactgtgtaggagaaagtgagtgtagacagagaataagagtgggtttaccatgtcattgaataaaatggttggaaaccacagcatcatgtgaaatttatgaagtgagtatagattctcagtactgtgattttcacccttcctcctctgtacatgtgggatggatcaggcctcagtggctttagaggatgtggctgtgaacttcacccgagaagagtgggctttgctgggtccttgtcagaagaatctctacaaagatgtgatgcaggaaaccatcaggaacctggattgtgtaggaatgaaatggaaagaccagaacattgaagatcaatatagatatcccaggaaaaatctaagatgtcgtatgttagagagatttgttgaaagtaaagatggaactcaatgtggagaaacatctagccagattcaagatagtattgtgaccaagaacactcttcctggagtaggtccatatgaaagccgtatgagtggagaagtcatcatgggtcattcatcccttaattgttacatcagagttggtgctgggcacaaaccatatgagtatcatgaatgtggagagaagccagatacgcataaacaacgtgggaaagccttcagttaccacaactcacttcaaacacatgagaggcttcacactggaaagaaaccatataattgtaaagaatgtgggaagtccttcagttctttgggaaaccttcaaagacacatggcagtacagcgtggagatggaccttataaatgtaagttgtgtgggaaagcgtttttttggcccagtttattacatatgcatgagagaacgcacactggagagaaaccatatgaatgtaagcagtgttctaaagccttttctttttacagttcctatctaagacatgaaagaacacatactggggagaaaccgtatgaatgtaaacagtgttctaaagccttccctgattacagttcttgtctaagacatgaaagaactcacactggaaagaaaccctatacatgtaaacaatgtgggaaagccttcagtgcttccacttcccttcgaagacacgaaacaactcacactgatgagaaaccctatgcatgtcagcaatgtgggaaagcgtttcatcatctgggaagctttcaaagacacatggtaatgcacacgagagatggacctcataagtgtaagatatgtggaaaaggctttgattgtcctagttcactgaaaagtcatgaaagaactcacactggagagaaactctatgaatgcaagcagtgtgggaaagcgttatctcatagctcaagctttcgaagacacatgacaatgcacactggagatggacctcacaaatgcaagatatgtgggaaagcctttgtttatcccagtgtatttcaaaggcatgaaaagactcacactgcagagaaaccctataaatgtaaacaatgtggcaaagcctaccgtatttccagttctcttcgaaggcatgaaacaactcatactggagagaaaccctataaatgcaaatgtgggaaagcctttattgatttctattcctttcaaaatcacaaaacaactcatgctggagagaagccatatgagtgtaaggaatgtgggaaagcattcagttgtttccaatacctttctcaacatagaaggactcacacaggagagaaaccttatgagtgtaacacatgtaagaaagccttcagtcattttggtaacttaaaagtacatgaaagaattcactctggagagaagccgtatgaatgtaaggaatgtgggaaagcattctcttggctcacttgctttctacgacatgaaagaattcacatgagagagaaaccctatgagtgtcaacaatgtggtaaagccttcactcattcccgttttcttcaaggacatgaaaaaactcatactggagagaacccgtatgaatgtaaggaatgtgggaaagcatttgcttctctcagttccttgcatagacataaaaagactcactggaaaaaaactcacactggagagaacccgtatggatgtaaggaatgtgggaaagcatttgcttctctcagttccttgcatagacataaaaagactcactagcattctctctaaatgtatggaatgtgggaaagcatttattaattttatttcatttcagatacttgtacgaaacacattggagatagaccctgtgaatgtaagcacttggtaaaaccttaagtaatttcagtttctttccagtacagtcatcccttgatacctgctgggtattggttccagcactccgtgagccatgtccagtcccttttataaaatgacatatttgtatgtaacttacccacatcctcttgtatactctcaattatgtctagattacttaaaatacctcatgcattgtaaaagctatgcaaatagttgttctattgtattgtttagggactcatgataaggaaaagagtctatgtattttcagtatagatgcagtaattgtcagcctatcaacatagtatagtcagccagaacattaaagtttctttgtttcaactctcaaaaaaaaaaaaaaaa

SEQ ID NO: 24591 - DNA, 4816 bp, Homo Sapiens
ggctaagcaggaacgtttggaaattgctagtttgtcaaaccaagatcatacctctaagaaggacccaggaggacacagaacggctgccattctacatggaggctctcctgactttgtaggaaatggtaaacatcgggcaaactcctcaggaaggtctaggcgagaacgtcagtattctgtatgtaatagtgaagattctcctggctcttgtgaaattctgtatttcaatatggggagtcctgatcagctcatggtgcacaaagggaaatgtattggcagtgatgaacaacttggaaaattagtctacaatgctttggaaacagccactggtggctttgtcttgttgtatgagtgggtccttcagtggcagaaaaaaatgggtccattccttaccagtcaagaaaaagagaagattgataagtgcaaaaagcagattcaaggaacagaaacagaattcaactcactggtaaaattgagccatccaaatgtagtacgctaccttgcaatgaatctcaaagagcaagacgactccatcgtggtggacattttagtggagcacattagtggggtctctcttgctgcacacctgagccactcaggccccatccctgtgcatcagcttcgcaggtacacagctcagctcctgtcaggccttgattatctgcacagcaattctgtggtgcataaggtcctgagtgcatctaatgtcttggtggatgcagaaggcaccgtcaagcttacggactatagcatttctaagcgcctcgcagacatttgcaaggaggatgtgtttgagcaaacccgagttcgttttagtgacaatgctctgccttataaaacggggaagaaaggagatgtttggcgtcttggccttctgctgctgtccctcagccaaggacaggaatgtggagagtaccctgtgaccatccctagtgacttaccagctgactttcaagattttctaaagaaatgtgtgtgcttggatgacaaggaaagatggagtccccagcagttgttgaaacacagctttataaatccccagccaaaaatgcctctagtggaacaaagtcctgaagattctggaggacaagattatgttgagactgttattcctagcaaccggctacccagtgctgccttctttagtgagacacagagacagttttcccgatacttcattgagtttgaagaattacaacttcttggtaaaggagcttttggagctgtcatcaaggtgcagaacaagttggacggctgctgctacgcagtgaagcgcatccccatcaacccggccagccggaagttccgcaggatcaagggcgaagtgacactgctgtcacggctgcaccatgagaacattgtgcgctactacaacgcctggatcgagcggcacgagcggccggcgggaccggggacgccgcccccggactccgggcccctggccaaggatgaccgagctgcacgcgggcagccggcgagcgacacagacggcctggacagcgtagaggccgccgcgccgccacccatcctcagcagctcggtggagtggagcacttcgggcgagcgctcggccagtgcccgtttccccgccaccggcccgggctccagcgatgacgaggacgacgacgaggacgagcacggtggcgtcttctcccagtccttcctgcctgcttcagattctgaaagtgatattatctttgacaatgaagatgagaacagtaaaagtcagaatcagatggagtactgtgagaagagcactttacgagacaccattgaccagggactgtatcgagacaccgtcagactctggaggctttttcgagagattctggatggattagcttatatccatgagaaaggaatgattcaccgggatttgaagcctgtcaacatttttttggattctgatgaccatgtgaaaataggtgattttggtttggcgacagaccatctagccttttctgctgacagcaaacaagacgatcagacaggagacttgattaagtcagacccttcaggtcacttaactgggatggttggcactgctctctatgtaagcccagaggtccaaggaagcaccaaatctgcatacaaccagaaagtggatctcttcagcctgggaattatcttctttgagatgtcctatcaccccatggtcacggcttcagaaaggatctttgttctcaaccaactcagagatcccacttcgcctaagtttccagaagactttgacgatggagagcatgcaaagcagaaatcagtcatctcctggctgttgaaccacgatccagcaaaacggcccacagccacagaactgctcaagagtgagctgctgcccccaccccagatggaggagtcagagctgcatgaagtgctgcaccacacgctgaccaacgtggatgggaaggcctaccgcaccatgatggcccagatcttctcgcagcgcatctcccctgccatcgattacacctatgacagcgacatactgaagggcaacttctcaatccgtacagccaagatgcagcagcatgtgtgtgaaaccatcatccgcatctttaaaagacatggagctgttcagttgtgtactccactactgcttccccgaaacagacaaatatatgagcacaacgaagctgccctattcatggaccacagcgggatgctggtgatgcttccttttgacctgcggatcccttttgcaagatatgtggcaagaaataatatattgaatttaaaacgatactgcatagaacgtgtgttcaggccgcgcaagttagatcgatttcatcccaaagaacttctggagtgtgcatttgatattgtcacttctaccaccaacagctttctgcccactgctgaaattatctacactatctatgaaatcatccaagagtttccagcacttcaggaaagaaattacagtatttatttgaaccataccatgttattgaaagcaatactcttacactgtgggatcccagaagataaactcagtcaagtctacattattctgtatgatgctgtgacagagaagctgacgaggagagaagtggaagctaaattttgtaatctgtctttgtcttctaatagtctgtgtcgactctacaagtttattgaacagaagggagatttgcaagatcttatgccaacaataaattcattaataaaacagaaaacaggtattgcacagttggtgaagtatggcttaaaagacctagaggaggttgttggactgttgaagaaactcggcatcaagttacaggtcttgatcaatttgggcttggtttacaaggtgcagcagcacaatggaatcatcttccagtttgtggctttcatcaaacgaaggcaaagggctgtacctgaaatcctcgcagctggaggcagatatgacctgctgattccccagtttagagggccacaagctctggggccagttcccactgccattggggtcagcatagctatagacaagatatctgctgctgtcctcaacatggaggaatctgttacaataagctcttgtgacctcctggttgtaagtgttggccagatgtctatgtccagggccatcaacctaacccagaaactctggacagcaggcatcacagcagaaatcatgtacgactggtcacagtcccaagaggaattacaagagtactgcagacatcatgaaatcacctatgtggcccttgtctcggataaagaaggaagccatgtcaaggttaagtctttcgagaaggaaaggcagacagagaagcgtgtgctggagactgaacttgtggaccatgtactgcagaaactgaggactaaagtcactgatgaaaggaatggcagagaagcttccgataatcttgcagtgcaaaatctgaaggggtcattttctaatgcttcaggtttgtttgaaatccatggagcaacagtggttcccattgtgagtgtgctagccccggagaagctgtcagccagcactaggaggcgctatgaaactcaggtacaaactcgacttcagacctcccttgccaacttacatcagaaaagcagtgaaattgaaattctggctgtggatctacccaaagaaacaatattacagtttttatcattagagtgggatgctgatgaacaggcatttaacacaactgtgaagcagctgctgtcacgcctgccaaagcaaagatacctcaaattagtctgtgatgaaatttataacatcaaagtagaaaaaaaggtgtctgtgctatttctgtacagctatagagatgactactacagaatcttattttaaccctaaagaactgtcgttaacctcattcaaacagacagaggcttatactggaataatggaatgttgtacattcatcataatttaaaattaaattctaagaagaggctgggtgcagtggctcacacctttaatcccagcactttgggaagccaaggcaggaagactgcttgaaaccaggagtttgagaccagcctgagcaacaaagcaagaccccatctctataaaaactaaaaaaattagttgggcatggtggcacatgcctgtagtcccagctactccagaggctgagatggatcatctgagcctcaggaggttgaggctgcagtgagctgtgactgcgccactgcactccagtctgggacaacagagcaagaccctgtcttaaaaaaaaaaagaaaaaaaaaatttttttctaagaagctgtcctacaaagttgagctttgttagtttttcatgtgtaatatattataaatttatcttttgggatataataaatgctttcatataaaaaaaaaaaaaaaaaaaaaaaaaaaa

SEQ ID NO: 24592 - DNA, 3551 bp, Homo Sapiens
ggtaaaggctgatacttcccaggacgcggaggcacgtaaaaaaatttgaagaagggaatttcgcggcattcttggcctggcttcctggcgtagccagcaagttcggaggtgttaaccgctgctgtcatgtttcttttgctaaactgcatcgtcgctgtgtcccaaaacatgggcatcggcaagaacggggacctgcccaggccgccgctcaggaatgaattcaggtatttccagagaatgaccacaacttcttcagtagagggtaaacagaatctggtgattatgggtaggaagacctggttctccattcctgagaagaatcgacctttaaaggatagaattaatttagttctcagcagagaactcaaggaacctccacaaggagctcattttcttgccagaagtttggatgatgccttaaaacttactgaacgaccagaattagcaaataaagtagacatgatttggatagttggtggcagttctgtttataaggaagccatgaatcacctaggccatcttaaactatttgtgacaaggatcatgcaggactttgaaagtgacacgtttttttcagaaattgacttggagaaatataaacttctgcctgaatacccaggtgttctctctgatgtccaggaggggaaacacatcaagtacaaatttgaagtatgtgagaaggatgattaatatgaaggtgttttctggtttaagttgttccccctccctctgagaaaagtatgcatttttacattagaaaagggacttttgttgacttcagatctatggataattatttctaagcaacgtgtttttattcctcactaatcttggctatatcagataccatttatgaaacattcttgctataactgtctctccaagaccccgactgagtccccagcacctgctacagtgagctgccattccacacccatcacatgtggcactcttgccactccttgacattgtcaggcttttctaatgttggtagtatttattaaagatgaagatgcacatacccttcagctgagcagtttcactagtaggaaataccaaaagcttcgtacatgtatatccagaggtttgtagacaaatgttgcagccttttttgtaacagtgaaaaactgaaaacaacctggaagtccagtgatgggaaaatgaatatatttctgtcttagattggggaacccaaagcagattccaagactgaaatttaagtgaaagcagtttatttgctaggtcataccagaagtcatcaatcgaagtatggagaaatggaactgagaaggtaaaaaccagttcaaaatcagtgaggaggttctcaatggtaacgagctccatactgctgagatacagggaaacggaggggagaaagctagagtatttaacccccactccttggttgtcagctccctgtcctgtgtgtgggcagaacgtactccacctactcaatagcaagttccaggtgtttgctgaaagaagctgctgtaatgtacgggaacggtgaatgccaaacacttaaagcaattccatgtttaagtatgtaaactcttcatactttttttttttttctttttaagacagaatttcactcttgttgcccaggcggagtgcaatggaacaaccttggctcacggcaacttcagccttcccaggttcaagcaattctcctgcctcaggctcctgggtggctgggactacaggcgcgtgccaccacgccaggctaattttgtatttttggtggggacattccatgttggtcaggctagtctcgaactcctgacctcaggtgatcctcctgcctcggccttcaggggtgctgggattacaggcatcagccactgcacttggcagatcttcattcttttagtaaaaagtataaagccacacatggtttatttgaaatattttataatttaaaaaagtacagaagcaggaaaaccaattctaggttcaagtgagggatgatggtagtttgaaccaaaggattgcatgtggtaagaaattgtgatttaagatatattttaaagttggaagtagcaggatattctgatggagtttgactttggttttgggcccactgagtttgagatgcctttgagaaatgaaagaagtagagagagaattaaaaactggccaggagtggtggctcacgcctgtggtcccagcactttggggggctgaggtgggtggatcacctgagaccagcttgggcaacatggtggagccctgtctctacagaagatacaaaaattggctgggcattgtggcacacacctgtagtctcgtctactcacggggctgagatggaggattcaattgagcccatgagttcaaggctgcagtgagtcgtgattttgccactgcactcctgcctgggtgacagaagagaccctgtctcaaaaaagaatctgaaaacaacggaaccatgccttcagaattctataaagttattttcaactgataaatctatattcaggcaaagaatcaagggtgaaggtaaaataatacatttttagacaagcaaagactcaggggttacatgtaccctttcttgggaagctatcggagaaaatactccagcaaaatgaaggcgtacacaaaccagagaatgacgtggatccagcaaatagtatccaacacaggcaatattccagctatggagctagctttaaaaagaaacagtaaaaatactaatagattagctgggtgggatggcccatgcttgtagtcccagctactcaggaggctaagcaaaaggatggcttgagcccaagagttcagagcagcctggccaccatagtgagatcccttctcttaaaaataataggttattgccagatttggggcatttggaaagaagtgcattgaagataaagcaaaagtaaaaaaaaaaaaaaaacaaaaaaaaacaagggggaagggttggttaggcaataattaattctagggcaggaagaagtacaggataggaagtaagagcatcatacgctgtttttctcaacaatgggcaatatgtacatagtcataatgatgtggtgactgactgcttagcccctaaatctggtaactactttgggacaatatggggggaaaagtgaagatagtgatggtgtaagagctaaatcctcatctgtcatatcaagaaatcactatataatgtataacataatcaagaaatgactaagtagttatgtgaagaaaagaatggaacattgctagaagagttagaagtcattgctccagagaattaggagggatggggcaggggactgttaggatgcattataaactgaagaggcttttaaagattacatgtattaatatatgtattcacttgaaaaactaaaaaaatagtaattttttaaaacccatggaggtaactaccagaaggaaaaactaagagaatgaaaagtgctttcctctggaaagaacaagtcgcaggactgttttcattgtaagacttttggagccatttgattttacttaaccattttcatatatttctttaataaaaataattctatcttaaaaaaaaaaaaaaaaaa

SEQ ID NO: 24593 - DNA, 1390 bp, Homo Sapiens
catatatccaaatgtctacttcttgccttcagtataccttacaaacctctcaagtttgacgtgcctagaactggactctggattttaccttttgcccgtatcaacaagttcctctcttagtcttccaatcacagaaagggctccaccatcaagatggacacgagcctaaaacccaagaattcttgtttcctgccttcctttccttctctcacattcagtctcctggtagacttgttcatttacttccaccatttctatctacttcttttcatctccagtgccaacattcttgtccaagccatcactctctctccccaaaccactccaatagcatcctaactggttttccctacccttatctcacctcaatccattctctgcatattagctggagtgatcctttcaagaagtgaatacaaaccttaaatctttcaacagccctcactgcatccagaataaaatccaagcacctataactgcctaatatggcttctgtccacatctaacctcaaatcttaccttctgcccttgctgtgctcaagcctttctggcctttcatttccttaaacacaccaagcctttccagcatcagagactttacaattcttcctggaatgctcttccactaatttctttaggtcatagtttgtggtcatttgaaaacatgtccacaaattcttttctatcctaaaaaaagggggaatccaattcccctcctcttgaacatggactagcctcagtggcttgctactaatgaattaaatggtatagaagtgactgtaacttcttagactaggtgaccaaagatggcacagcctccacctggttctctgtcttgtgaggctcacccttggaacccagccatcatgctgtgacaaagccatgtaccacatgcaggtgtttcggggaacagacctgtcagaggtccttgccaacagccaacatcagtcagcatcaaccactagacatgtaagtgaggaagcctccagatgattccagtttccaccttcagctgatgttaggtggagcagagacatgctgtccccacctgcctaaactgcagattcatgagtaatgtaatttctgtcattgttttaagccattaagttttggggcagtttgtcacacagcaatagacaactggaacacagctcatatgccccttctcagaactgccctccctgatcatcctaagtgcccattggcattatccataacctgaaaattattatgattgatcctaaagtccagcctggtgcctggcacgtaggagatgctcagtgaatatttgtggaatgattgaataaggaaatgaatcctcttgtcacatttgaagttatcagtcatcaataaaatggggatttgttaaaaaaaaaaaaaaaaaaaaaaa

SEQ ID NO: 24594 - DNA, 3202 bp, Homo Sapiens
ggccattgagactcggtcttgtcccacgcttcgcccggaactttcccatgcccaggcctcactcagcgtgcacgcacgttggggagaagtcggcccttgggatctttctcttgagtcattttatttttatcatggactagtgcgtgctccgtgtccaccccaataaaagggtctttcctacttgacctcgcgtctttgctccacacaccttggctgcagaggacggagcccctgggagtcatccctgttgtcaccaagaggagtgagaagggccccccacgccaggggccccaggaccggctggattctctcgtgggcttgctgaggccaccatgttcaaggccaagacctgcctggaccatcccctctgcctctcctgtcaaggtgaccccaaggacaggtcattcctgagagacggtccatggtgccaaggatggagcggggtcagccccctgcctgggataccgccaagcagggcagcgcacctgtcagacaccgcagagatggccggcctcatccgggggcctggggtctctggcctctgctgctcccctgaggcatggtgacagtacagacggcatctggccggtcttgctgtcctaggtggtggcctcacccttgctgggtcatagaggagctgtacagaaggttggcacctggcagttggcatgtgccatggccgctcatggggacccctcttccgccagctgggctgggtttggggctgagcttgggtatgtaggggtgttcgggctctgggcagaaggtttgtggccctgaccactgagcctggggctgggggaacaccgcttctccccttattgcccccactggtggtggtggggatctcagttttcttttgttttgttttgtttgtttgtttgagttggggtcttgtactctttcccaggctggagtgcagtggcgtaatcacagctcactgcagcctcgacctcaagccttcctcccacctcagccttccaagccgctgggaccacaggcacccaccaccatgcctggctaattttttttttttttttgagatggagtctcgctgtgtctcccaggctggagtgcagtggcaagatctcagctcactacaacctccgcctcccaggttcaagtgattctcctacctcagcctcctgagtagctgggattacacgcgtgcgcccctacacccagctaatttttctatttttagtggagacggcgttttgtcatgttggccaggctggtctcgaactcctgacctcaggtgcttcgcctgcctcggcctcccaaagtgctgtgaccgcacctggctgcctggctaatattttaaaaattttttgtagagacagggtttcaccatgttgcccaggctggtctcaaactcctgggctcaagtcatccaccttcctcagcctcccaaagtgctggggttacagacgtgaaccaccgtgcctggcagaggtctctgttttgagagctgagtctgagggcgttgggatggtgtagggttgggccacagagctagcagacactccgggctatggagggtccgcctgccccagattccactgtggagggccctgcctgtgtcagaccctcgggcctaggcggcccatctctcccaaggacggagagtgccagggtgggctcccgtcctacacaaggagtggctgaccaggcccaggcacagcacagccaccctgctgtacctcccagctcccggcagtgtctacaccacagtgatggtgctacaggggccatgtggtcacaggacaggtggtcaggaaatgcacacttgactgcggtcgatggtgccgggtccggctgaatgccctggaggctcccaggccagctggggagtcccagtccccagggttggtgtgacctgggcaggcctgcggtgtccatctgtgaatgactgagatggtgggacttcagcttccaaggccaggggccagagtgggagcagggggcactcccgcctttcccctcggcctgtctagacctctctggctcccagtttctgctttgagtggctgggggctgtctcctgcctgtgctgtctgcccgtcgctctgcagggctgctgggcgggcacctccttcccctcccctacctcagctccctcctttggggtctgagggctgtgcccccagcttgcctccctgtggcctccccctagaacccctgggtctgtcgggacatgccccacctggcacacacaccctgtgtagctcccactgcctgtgggaggacgctgggcccctgagccggcctctgtctacccctcctgcctttggggtcccctttaccccactgttcccccaaactgccttccaccttctccgcctttgcacaggctgttctcctgcctccagtgaactctgacttctccacagcctcccaaagggccccttgctcacactggcccagccctgcagcatggccatgttggtctctgagccttaagcctttggatgtggacacatttgtcctcttcctgaaaaatgtgagggtctgagaggccacgttcctgttcctgagtcatacgacagagtcccagtgacttgggtctgatgtctgtcccacagtgggacatccctgctgcatcccaatgccaccccgtgtcctggggacacccaaatgtgccattctctcagtatcacaagtcggggactgcaggaggctcaggtgccaggtgccttctgatgttcatgccacaagctcttcccactgtctctggctccccagacgatgttccaggaggcgggtgtgccagaaggggccacgtcttgcaaaccaccgcgctgtcctctttgagaaggagtcttactcaggactggggcctgtgcacacattgtcgcctcttttcagcacttagagattccttcctttgtctagtggctgaagccagggctgaagttggcctccaaatctgggccgtctcagaggcggcgcagcctggagttttccatctgtggccaagacccagtttttgggaggaggccctcatgggtcaagccagcctgtaccaggatggggggagggggttcccaacctaggccccagccacccagactcccccacccccactcccttttccactgctctgacctcgggcactgttgaaatatagtttttattgcatttctgccgttttacaaaaatatgacaaaataaattaaaaacaaataaaaaaaaaaaaaaa

SEQ ID NO: 24595 - DNA, 3140 bp, Homo Sapiens
acagcactggacttgctctgtttgcacatatgaaaactgggccaaggctaaaagatgtgttgtttgtgatcatcccagacctaataacattgaagcaatagaattggcagagactgaagaggcttcttcaataataaatgagcaagacagagctcgatggaggggaagttgcagtagtggtaatagccaaaggagatcacctcctgctacgaagcgggactctgaagtgaaaatggattttcagaggattgaattggctggtgctgtgggaagcaaggaggaacttgaagtagactttaaaaaactaaagcaaattaaaaacaggatgaaaaagactgattggctcttcctcaatgcttgtgtgggggttgtagaaggtgatttagctgccatagaagcatacaagtcatcaggaggagacattgcacgtcagctcaccgcagatgaagtacgcttgctgaatcgtccttctgcctttgatgttggctatactcttgtacacttggctatacgttttcagaggcaggatatgctagcaatattgcttacagaggtgtctcaacaagcagcaaagtgtattccagcaatggtgtgtcctgaactgacagaacaaatccggagagagatagctgcctctcttcatcagagaaagggggattttgcttgctattttctgactgaccttgtaacatttacattgccagcagatattgaagatttgcccccaacagtccaagaaaaattatttgatgaggtgcttgatagagacgttcaaaaagaattagaagaagaatctccaattattaactggtccttggaattggctacacgtttggacagtcgactgtatgcactttggaaccggactgcaggagactgcctacttgattcagttctacaagctacctggggcatctatgacaaggactcagtgcttcggaaagccctgcatgacagcctgcatgactgttcacattggttttacacacgctggaaagattgggaatcatggtattctcagagctttggtttacatttttccttgagagaagaacagtggcaagaagactgggcatttatactctctcttgctagtcagcctggagcaagcttggagcagacgcacatttttgtactggcacatattcttagacgaccaattatagtttatggagtaaaatattacaagagtttccggggagaaactttaggatatactcggtttcaaggtgtttatctgcctttgttgtgggaacagagtttttgttggaaaagtccgattgctctgggttatacgaggggccacttctctgctttggttgccatggaaaatgatggctatggcaaccgaggtgctggtgctaatctcaataccgatgatgatgtcaccatcacatttttgcctctggttgacagtgaaaggaagctactccatgtgcacttcctttctgctcaggagctaggtaatgaggaacagcaagaaaaactgctcagggagtggctggactgctgtgtgacggaggggggagttctggttgccatgcagaagagttctcggcggcgaaatcaccccctggtcactcagatggtagaaaaatggcttgaccgctaccgacagatccggccgtgtacatccctgtctgatggagaggaagatgaggatgatgaagatgaatgaaaaaaaaaatcaaacagcagaagaccaaggcatcagatctgtaatgaccctaaagttagtgtggtgctccaagcagagtcgacatcatggaatgaaccaaatctggcaggatctgctcggggaagtgttttcctggaccacacacaccttatggagataatgcctctgctgcgtgaggagacagagaactttagttggactacagtttgtaaaaaaaactaattttattaagacagaactttttttccttccaaattgtaaatctgtctataaatgtaacgcatgtggttgtgtaagacattgtttaataggaaaagttgtaccagcatcttcatattattgagaaaattttttccagcatgggcacttagaaaaagcacatggcaaatggctctttgttcctttcagatattatttcagtagaacctggcattctcctttcaccttaaaagatccatctaagtctcagatctggaaacgttttgtaccgattatccacagcaaaacaaaaataagcttttattttattaacaatttcgttcctcttgtgcccaatcaaatcttttaggaacaaactgcaagaaaagctaagaatgttttagagtgaactaaatacagacattgcttacttgttttgaagagggttttggttttggttattgtgtcttttaagttttctgatatgccccctttcaatatttagatatttatttgttgggaagaataccttaaaatgagggttcttattccagattctgggcagtggtctgtgagtagtttttttcctggatgaaaagggagcaagcccacttgtcactaaatgaattgtgtgaaatgtgctcacttggactccatcaacaatgtgctgctcccagattgccatgccagagggtcttcggattcttccatcacctctgctctaagcaaatcttgttagaagggcatgcctttgcttaggcagattgggaataccaattcactacagaataaagattttaaaaatgcaataaggtggcaaatgcattgtatgaagaatttctcagtgtttagtctgagaatttttgcatgttggttaattgtggccattctttaatttaaagttaaaactataatcttaggtagaacaacttttttataagaagtattatttgaccacttcaggtatacattcaatactgggtaaaaatttcagacctatctcaggaacacagaaatatttggtgtcctgataagcactttctagactattgatgtggccaggaatttggaaagacgacacacgcacgcacacacacacacacacacacacacacacagttttttccttccctgtgatgaaaaaggctgtgaaaaccttaaagtatttgcttgcttcttgttttgtttagttgataatgaaatgtgtacaacctcaaatttgctgccagaatactaaaaatagaaaatacccaaaaaaaaaaaa

SEQ ID NO: 24596 - DNA, 2323 bp, Homo Sapiens
ggaataaattatttttgttaaggcaagcattggtgtgttctttaacttgctacttggagacctagtgtccagtctggacagaatgcacagagaccagcctcacctggaatgcagccagactcgatgtccctcagcacacacagctcctggccacagactgcccatagaactgtctgcacccaaaccccatggccttttcatgcacggagacaggcctctggatgtgcagccttgccaccccctgccccaatcctccctgagagctcctgcctcagtgccctgggctggtgagggagaagcctgtctgcacctgcctaattccagctcctccaggaagcaagggcttgtttgtcagagctgcagggttggccactcggtggggaggagtcagccaggattagagagcctgcccctaatccggcctgctgggttttacaaggatcagagctgctgataatgaacctcattaagggggagcaggagcctcaatccgatttggttttctctttgacatcttcactctgctcagatggcctgggtgctatgtggagcaggtgggatgccaaggccactcctgctatggggcagctggggctggggagggatggcagtctccctgcatgtttccctcgacctctttagctgcagcgccttgctgggctcctgggttggactccctctctgtgcccctgctccaggcacccattggctccatcctcctggttgtgctctgcaccccctgctcccttgggctggccctggctgggggcctgagagacagacaggaacccacaatcaggaggcaaccctggcctgcaagaggaagacagaggctcccagggccggtgccctgtgtgcccactgcaccaaggccgctgaataagcctgcccttcaccccctaagggctccttgcccaatgccaagtgctggggatttctgtcagcaagccctgtggctccagtgacggtatttctaaagccaaacttagttacctagaattagcgccatgttggaaacactgtcgcagcagcccgggctgcacagtgtgtagcccagcctccaggtccacggagtggtgtggacctcccacctcacagctgcctctggcagccaagcctcttttcgcccggccccagcccctctggttgataaacgggtgggcctcctcagcagcgtggctgcctttcaccttgatttccccagggctctcggcaacatcgataaaccagcctcgcccaccagctgggccctcccccacccagtctgccaggctgggagctggagcttgctgagtcttgaatgcccttctagatggcttctctagaggctctcctggcaagagagggtcccaaggggagccctgcaaagcaaaggctccttgtctggggcgggatagagaatctcgcctctgtctggtgtgttacctactgggggcacaggaacaatttcctcaaggagacagtggcatggagctttgaaagacgagtaggtgttagcaaggaaataaggaggaacgggggttacgggcagaggagaaagcacatgccaagtcagcaaagaaaagtagaattcgaaaactttttaaaaatattactaaggattttcacaatgctgcactgggctagaaactgaagctaaaacagatacgtggtccctgctgctatggggcttccgttctagaggcaaggacaggttgtgatgagggttctgaaggatagagaccaagcagggagggtgttgaggaggcttctgcgagacctgaaggatgggaagccaggaagtgggagggggtgggggtccaggctggaggggcccaatgtaggtgtagagggactacagccctgaggggctgctccatgcggcattcttggaggtccaagaggggcagcgccaccttgggccaggctcctctccagcagccttggtatggggtgggggtgggaagacccctgatgcagcctgtcctctgggtgtgggggtggaggagagggctccaggggacccagccagccttgaccctggaggaaagtcaggtgggctcagagagagccctcaaatctgggccctgggtcagggtggggtcaagtccagccttgaagagaatggactctggaatctgacgtctgggtttgaatccagcttccaacactcactggctgtgtgactttgggcaagataacttatccccttgtccccatgtgtcattggagataaactacccacctaccagattgttgtaccatgctgggcaaacactaagtgcttaataatggtagcccactgctcaaaaaaaaaaaaaaaaaaaaaaaaaaaaaaaaaaaa

SEQ ID NO: 24597 - DNA, 3898 bp, Homo Sapiens
ccttgtcattattcgatgtccctttttggttctttcagctaccataaataacccaaatcttctcaccaagtggctgcaatcagtaaaacagtactggaaacaggcagacaagattatggaagagaaatgtatttctgaaaaacaggctgacaaatgtctcaactttctccaagaccattcatataaaaatcaatcatatgaagttagacttgtgctctgtggagagagatacaatgatttagagaagcatatatgttcagtaaaacatgatgatgtttattttgatcattttcatccctgtgctgcgctaacgacagatattattgaaaagtatggattcccacctgatcttaccctcacccctcaagaaagcatccagctttatgataccatggctcaagtctgggaaacttggcccagggctcaggaattgtgtccagaggaattcattctttttaagaataagatagtcattaagaagttggatgctagaaaatatgaagaaaacttaaaggcagaattgacaaattggattaaaaatggccaagtgaagaaggtcaaaagagtactgaagaaccttagtccggattcattgtctagttcaaaagatatggtgaaaatgtttcctcttcttgttgaaaagttaagacaaatggataagttgcctgcaatattttttttgtttaagaatgatgatgtgggaaaaagagctggaagtgtgtgcacttttctggagaagacagagacaaaaagccatccccacactgaatgtcatagttatgtctttgcaatagatgaagtacttgaaaaagtgaggaagacacagaaaaggatcactaaaaaaaacccaaagaaggctgaaaaactggaaagaaaaaaagtgtatagagctgaatatattaatttcctggagaatctgaagattctggaaatttctgaggactgcacgtatgctgatgtcaaagccctacacactgaaattaccaggaataaagactcaactttggatagggtattaccgcgagtgcgatttacaagacacggcaaagaactgaaggctttagcacaaagggggattggatatcatcacagcagcatgtattttaaagaaaaagagtttgttgagatactctttgtaaaagggcttattagggtagtgacagctactgaaacacttgccttagggatccacatgccatgcaaatctgttgtttttgcccaagactcagtctatctggatgctttaaattacagacagatgtctggtcgtgctggaagaagaggtcaagacctgcttggaaatgtgtatttctttgatatcccattgcccaaaataaaaagactccttgcatccagtgttcctgagctgagaggacagttccctctcagcataaccctggtcctgcgactcatgctgctggcttccaagggagatgacccagaggatgccaaggcaaaggtgttgtcagtgctaaagcattcattgctgtcttttaagagacgaagagccatggagactttgaaactttactttttgttttccttgcagctccttatcaaagaggactatttaaataaaaagggtaatccaaagaaatttgcaggacttgcatcatatttgcatggtcatgaaccttcaaatcttgtttttgtaaattttctcaagagaggccttttccataatctctgtaagccagcctggaaaggctcacaacaattttcccaagatgtgatggaaaagctcgtgttagtattggcaaatttgtttggaagaaaatatattccagcaaaattccaaaatgctgatttaagtttttctcagtcaaaggtgatccttgccgaactcccggaggattttaaagctgctttatatgagtataacctggcagtaatgaaggattttgcctccttcctgctgattgcttccaagtcggtgaacatgaaaaaagagcatcaactccctttgtcaagaatcaaattcacaggtaaagaatgtgaagactcccaactcgtgtctcacttgatgagctgcaagaaaggaagagtagccatttcaccatttgtttgtctttcggggaacacagataatgatttgcttcgaccagagactatcaaccaggtcatcctgcgcacagtcggtgttagtggcactcaggctcctctgctgtggccatggaaattagataaccgaggaaggagaatgccactaaatgcatatgtgctcaatttctataaacacaactgcttgacaagattagaccaaaaaaatgggatgcgtgtgggacagcttttaaagtgtttgaaagattttgcattcaacattcaggctatcagtgactccttgagtgaactatgtgaaaataagcgtgacaatgtagtcctggcatttaaacaattgagtcaaaccttttatgagaaacttcaagaaatgcaaattcaaatgagtcaaaatcatttagaataacaccatggaaaactttcaagtctgattatgtggtatttatccctttgcaaggagagatataattaagcttacacaatgaaatggaaaaaatgtttgtcttggagtcaaacagaattaaactcagataccagctctgctattttctaactgaatgactttaagttatgtaatatatctgagctttaacttcatttttggcaaaaccagagtaaaaatgaatacctctagttgttttgaggattaaatgagataatgtaagaaaagtgattgggattgggtggtgacttaatgaacggtagtggttttttaagtagttaatgtatagcaaaattagtttcacattgtcaagttttcaatacatccccaagttaattgaattttaaattaatgatcaataaatcacaaaggacccaaatcaattctgaacaacaatttagttatgtaagaagacttctgagattacaagaaactcactgctgtggactggatgtttgtgccctcccctccaaaatttttatattgaaattctaaccctcaatgtgatggtattaggagatgataggtcatgagggtggagctccttggatgtaattagtgcctttaacagagagacaagagagcttgttctccaatctctgctcactaccactggatgatacaatgggaagatggccatctgcagaccaagaagcaagccctcaacagaactgaatctacttacaccatgatcttgaactttccagcctccaggattgtgagaaatacatgtttgttgtttagccatctagtctgtggttttctgttgaagcagtctgaattgactaaaacagtcacttggagtagttataaaccactttcctgttgaaagcagaacatgctgattcaactgttttgttcaatagcaatgatagattttgtttaagtcccctacactttcttatttctaaatgatcaagagtacacttcctggcagtgattaaggagtgtgtatctaacagaaaaaatatatataccctgtgaacccgaatatggaattcagattgtttctgccctcagtatcatacttaaaaaacaagcatacaaacaaacataagggaacaaacagcaaccataacaaaaacaaacctttaaaggtgggtttttgctgtgataaatgaatacggtactctgaaggagaaaaaagtttctcaaatgagcttaaactgcaagtgatttaaaaattagagaatataattcttaaagctattgaaagtttcaaccagaaaacctcaagtgaattttgtatgtaaatgaaatcttgaatgtaagttctgtgattctttaagcaaacaattagctgaaaacttggtattgttgtagtttatgtagtaagtgacttggcacccatcagaaaataaagggcattaaattgaaaaaaaaaaaaaaaaaaaaaaa

SEQ ID NO: 24598 - DNA, 2888 bp, Homo Sapiens
atcacttctgctcccatcccattggccagacctatgcggtggccacaccaaactgcacaggaggctgaggaacatgttctccagccggacggccagcttaggagctgctaacatgtgtctcttcttctctttccaggggaggacccgcagatcctgtagactatctgccagcagcacctcgggggctctacaaggaaagggagcttccctattatccaggggctcatcctatgcaccctcccaaagggagctatccccgccccacagagctcagggtggcagatctccggtatcctcagcactacccacccccgccagctccccagcacaaaggaccctttcgacaagacgttccgccttcccctccccagcaccaaagaatgccagcctatcaggaaacaggcagaccagggccccgtgggggcagcccagaccagtacccttaccgaacccaggattcccggcagaagaaccccatgactgcagccgtatagctgagtgccaccgaggccagcccggtccagaaaggaaggtgtctactctacctttgccctttctaaacctgaagacctccttggtgttaggaattctccatgttactgataagctttttctcactgacattgtaacgcatgactgctaatcagagagaaaaagaaggggaagggaattggggaggaaaaaaaatcagaaggaagacgaaagatggggctataaaaacaaaactacctgatagttgaaacgctttcagagttgttcaaatcagtgagagtggcaacggaacacacaaacaactaattatggaactctactctggggatcctctctggctagataacctgtgctgatgtgcagacacgtggacatccccctctgagactggtggtccagaggcagtctctgccaggcagcattacccgctccgaggtggagcctcagcccccttcttagagctgttaagtctaaggtgtggcagagcagacagagatagaggcatctgaagtgagtataggttttttgactaagaaaaaaaacaacagcaaacatgactagtgatcttgaaatattttgtaccgagagaaagactgcatttatttgtagaatttatcaggtttctgataccactcattggatgtaaacatttcatgtttcctcacttttgatatgaaagtcggtaaaatgcagtattagtcccgggaggatgtgcacagctggtcagagcttccagaaggaatatcttccgaggactaaggtgatcaggttaagagggttcaacatcccacggccctcaccttcctccctcccacattccaggcatggagatatctggtttcagagtcagccccaaatctcctgcctataattactttaactggggtctctaaggttcccacttgagggctaaaatgtagttgggaaagagggcctactggggaggtctcacaggaggcagtgccctgggaaatgccaagtccagactcagtgccaagcagtaaccatctgcactcggggacagcgaggagctgaccgtggcctctgatgaccagcaggtattagatggaagtgaatgagagagagagagagagagtatgtgtgtgtgtgtgtatgtgtgtgttcgaacacatatgattgccagtatggagaatgaaagattaataatgctttctggagagtttgatgcaaaagtgggggaaacggagaaaaggcgctaaggctaaatccatctgcatttgctatatttcattagctaaagtcaggtcagggcagggccaaggcctccaattggcaaaggacagtgttatggctttaaaaagctgaaaccccaacctctaagtagatcacaatgttttctgagctttgcagtaattttctatggaaactaaaacctctaaaacatacaagctggcccaaatgagaacacaagcaaaagatgtggaagacagcaaaacctgagcactggtttgaaccaggcactgacatttgaaatgctttaagccttttcacattccttctttattccctccaaaaaaaaaagtcttgagtttaatttaggtctattttggctgagattagcatacctctgactcacaggatttaataaattatagtattattgaatacataggacatccctctaccccagcttactcttatctttttaatttaaaatagtattctgctaccaagaaggatgcaactgctagttttagatgtaaatagtgttatttactggactttgtgatattattttcttaactacactttactatggccctgttgaaaacagactatcaagttttttgtctctgttctgtcatctctcttaagccaggcacctttagagtgtttgcaatttgttcgaagtggttgaggatctcaggccctgctcacgtgaggtggagtgcaggggagctaccggtttccctgctgacctgctgaatgctaccttcccctcgagttgaatacaccttaaggaaaatgataacacgagggacgtgtaacttgttttgaagcattaaaaaccagcagctcttcactatgttccatattttaaccaaactactgtagactactaaacatagccaagccagaacattccttctggattaagcctaggccacttgaggggcagccaggggtgatggtgtcaggtgagaatcctgtgtcttgaaggagtggcctttacaggaagagtgcccatgttttcacctgcagcgttgccaccagagtgtgcaatacctcctgcacacaggctcagggtaaactgctccaaagctgggttttgtgttgcatacaaagtcaataaaatagttgctaatcctgaatggcagccagtgatgtgaaggtactattaaagtgaacaaaaactagaaaaaaaaaaaaaaaaa

SEQ ID NO: 24599 - DNA, 2806 bp, Homo Sapiens
tctgtttgccagtattgccatctcctgtaaattcaaaggcacatacaccaccaggaaatgccgaggtcaccaccaacatcccaaagatggaagcagccaccaaccaagaccaagatgggcggacaacaaacgacatttcctttgggacatctgctgtgacacctgacatacctctcagagccacatatcctcgcacagatttcgcacttccaaatcaggaggcaaagaaagagaagaaagatccaacaggtcgaaaaacaaacttggattttcagcaatatgtatttattaatcaaatgtgttaccatctggcccttccgtggtattctaagtactttccatacctagctcttatacatactattattctcatggtcagtagcaacttttggttcaaatatcccaaaacatgctcaaaagtagaacattttgtttcaatattaggaaagtgctttgaatccccttggacgacaaaagcgttgtctgagacagcatgcgaagactcagaggaaaacaagcagagaataacaggtgcccagactctaccaaagcatgtttctaccagcagtgatgaagggagccccagtgccagtacaccaatgatcaataaaactggctttaaattttcagctgagaagcctgtgattgaagttcccagcatgacaatcctggataaaaaggatggagagcaggccaaagccctgtttgagaaagtgaggaagttccgtgcccatgtggaagatagtgacttgatctataaactctatgtggtccaaacagttatcaaaacagccaagttcatttttattctctgctatacagcgaactttgtcaacgcaatcagctttgaacacgtctgcaagcccaaagttgagcatctgattggttatgaggtatttgagtgcacccacaatatggcttacatgttgaaaaagcttctcatcagttacatatccattatttgtgtttatggctttatctgcctctacactctcttctggttattcaggatacctttgaaggaatattctttcgaaaaagtcagagaagagagcagttttagtgacattccagatgtcaaaaacgattttgcgttccttcttcacatggtagaccagtatgaccagctatattccaagcgttttggtgtgttcttgtcagaagttagtgaaaataaacttagggaaattagtttgaaccatgagtggacatttgaaaaactcaggcagcacatttcacgcaacgcccaggacaagcaggagttgcatctgttcatgctgtcgggggtgcccgatgctgtctttgacctcacagacctggatgtgctaaagcttgaactaattccagaagctaaaattcctgctaagatttctcaaatgactaacctccaagagctccacctctgccactgccctgcaaaagttgaacagactgcttttagctttcttcgcgatcacttgagatgccttcacgtgaagttcactgatgtggctgaaattcctgcctgggtgtatttgctcaaaaaccttcgagagttgtacttaataggcaatttgaactctgaaaacaataagatgataggacttgaatctctccgagagttgcggcaccttaagattctccacgtgaagagcaatttgaccaaagttccctccaacattacagatgtggctccacatcttacaaagttagtcattcataatgacggcactaaactcttggtactgaacagccttaagaaaatgatgaatgtcgctgagctggaactccagaactgtgagctagagagaatcccacatgctattttcagcctctctaatttacaggaactggatttaaagtccaataacattcgcacaattgaggaaatcatcagtttccagcatttaaaacgactgacttgtttaaaattatggcataacaaaattgttactattcctccctctattacccatgtcaaaaacttggagtcactttatttctctaacaacaagctcgaatccttaccagtggcagtatttagtttacagaaactcagatgcttagatgtgagctacaacaacatttcaatgattccaatagaaataggattgcttcagaacctgcagcatttgcatatcactgggaacaaagtggacattctgccaaaacaattgtttaaatgcataaagttgaggactttgaatctgggacagaactgcatcacctcactcccagagaaagttggtcagctctcccagctcactcagctggagctgaaggggaactgcttggaccgcctgccagcccagctgggccagtgtcggatgctcaagaaaagcgggcttgttgtggaagatcacctttttgataccctgccactcgaagtcaaagaggcattgaatcaagacataaatattccctttgcaaatgggatttaaactaagataatatatgcacagtgatgtgcaggaacaacttcctagattgcaagtgctcacgtacaagttattacaagataatgcattttaggagtagatacatcttttaaaataaaacagagaggatgcatagaaggctgatagaagacataactgaatgttcaatgtttgtagggttttaagtcattcatttccaaatcatttttttttttcttttggggaaagggaaggaaaaattataatcactaatcttggttctttttaaattgtttgtaacttggatgctgccgctactgaatgtttacaaattgcttgcctgctaaagtaaatgattaaattgacattttcttactataaaaaaaaaaaaaaaaaaaaaaaaaaaaaaa

SEQ ID NO: 24600 - DNA, 4431 bp, Homo Sapiens
gcgcggctgctgtcgcccagcgccgccccgtcgtcgtctgccttcgcttcacggcgccgagccgcggtccgaagtcttgctgtgtcgcccaggctgccaggctggagtggagtggcatgatctcggctgactgcaacctctgcctcccagaatatgacagatacctagcatctagcaaaataatggcagctgcttaccttgaccccaacttgaatcacacaccaaattcgagtactaagactcacctgggtactggtatggaacgttctcctggtgcaatggagcgagtattaaaggtctttcattattttgaaagcaatagtgagccaaccacctgggccagtattatcaggcatggagatgctactgatgtcaggggcatcattcagaagatagtggacagtcacaaagtaaagcatgtggcctgctatggattccgcctcagtcacctgcggtcagaggaggttcactggcttcacgtggatatgggcgtctccagtgtgagggagaagtatgagcttgctcacccaccagaggagtggaaatatgaattgagaattcgttatttgccaaaaggatttctaaaccagtttactgaagataagccaactttgaatttcttctatcaacaggtgaagagcgattatatgttagagatagctgatcaagtggaccaggaaattgctttgaagttgggttgtctagaaatacggcgatcatactgggagatgcggggcaatgcactagaaaagaagtctaactatgaagtattagaaaaagatgttggtttaaagcgattttttcctaagagtttactggattctgtcaaggccaaaacactaagaaaactgatccaacaaacatttagacaatttgccaaccttaatagagaagaaagtattctgaaattctttgagatcctgtctccagtctacagatttgataaggaatgcttcaagtgtgctcttggttcaagctggattatttcagtggaactggcaatcggcccagaagaaggaatcagttacctaacggacaagggctgcaatcccacacatcttgctgacttcactcaagtgcaaaccattcagtattcaaacagtgaagacaaggacagaaaaggaatgctacaactaaaaatagcaggtgcacccgagcctctgacagtgacggcaccatccctaaccattgcggagaatatggctgacctaatagatgggtactgccggctggtgaatggaacctcgcagtcatttatcatcagacctcagaaagaaggtgaacgggctttgccatcaataccaaagttggccaacagcgaaaagcaaggcatgcggacacacgccgtctctgtgtcagaaacagatgattatgctgagattatagatgaagaagatacttacaccatgccctcaaccagggattatgagattcaaagagaaagaatagaacttggacgatgtattggagaaggccaatttggagatgtacatcaaggcatttatatgagtccagagaatccagctttggcggttgcaattaaaacatgtaaaaactgtacttcggacagcgtgagagagaaatttcttcaagaagccttaacaatgcgtcagtttgaccatcctcatattgtgaagctgattggagtcatcacagagaatcctgtctggataatcatggagctgtgcacacttggagagctgaggtcatttttgcaagtaaggaaatacagtttggatctagcatctttgatcctgtatgcctatcagcttagtacagctcttgcatatctagagagcaaaagatttgtacacagggacattgctgctcggaatgttctggtgtcctcaaatgattgtgtaaaattaggagactttggattatcccgatatatggaagatagtacttactacaaagcttccaaaggaaaattgcctattaaatggatggctccagagtcaatcaattttcgacgttttacctcagctagtgacgtatggatgtttggtgtgtgtatgtgggagatactgatgcatggtgtgaagccttttcaaggagtgaagaacaatgatgtaatcggtcgaattgaaaatggggaaagattaccaatgcctccaaattgtcctcctaccctctacagccttatgacgaaatgctgggcctatgaccccagcaggcggcccaggtttactgaacttaaagctcagctcagcacaatcctggaggaagagaaggctcagcaagaagagcgcatgaggatggagtccagaagacaggccacagtgtcctgggactccggagggtctgatgaagcaccgcccaagcccagcagaccgggttatcccagtccgaggtccagcgaaggattttatcccagcccacagcacatggtacaaaccaatcattaccaggtttctggctaccctggttcacatggaatcacagccatggctggcagcatctatccaggtcaggcatctcttttggaccaaacagattcatggaatcatagacctcaggagatagcaatgtggcagcccaatgtggaggactctacagtattggacctgcgagggattgggcaagtgttgccaacccatctgatggaagagcgtctaatccgacagcaacaggaaatggaagaagatcagcgctggctggaaaaagaggaaagatttctgaaacctgatgtgagactctctcgaggcagtattgacagggaggatggaagtcttcagggtccgattggaaaccaacatatatatcagcctgtgggtaaaccagatcctgcagctccaccaaagaaaccgcctcgccctggagctcccggtcatctgggaagccttgccagcctcagcagccctgctgacagctacaacgagggtgtcaagcttcagccccaggaaatcagcccccctcctactgccaacctggaccggtcgaatgataaggtgtacgagaatgtgacgggcctggtgaaagctgtcatcgagatgtccagtaaaatccagccagccccaccagaggagtatgtccctatggtgaaggaagtcggcttggccctgaggacattattggccactgtggatgagaccattcccctcctaccagccagcacccaccgagagattgagatggcacagaagctattgaactctgacctgggtgagctcatcaacaagatgaaactggcccagcagtatgtcatgaccagcctccagcaagagtacaaaaagcaaatgctgactgctgctcacgccctggctgtggatgccaaaaacttactcgatgtcattgaccaagcaagactgaaaatgcttgggcagacgagaccacactgagcctcccctaggagcacgtcttgctaccctcttttgaagatgttctctagccttccaccagcagcgaggaattaaccctgtgtcctcagtcgccagcacttacagctccaacttttttgaatgaccatctggttgaaaaatctttctcatataagtttaaccacactttgatttgggttcattttttgttttgtttttttcaatcatgatattcagaaaaatccaggatccaaaatgtggcgtttttctaagaatgaaaattatatgtaagcttttaagcatcatgaagaacaatttatgttcacattaagatacgttctaaagggggatggccaaggggtgacatcttaattcctaaactaccttagctgcatagtggaagaggagagcatgaagcaaagaattccaggaaacccaagaggctgagaattcttttgtctaccatagaattattatccagactggaatttttgtttgttagaacacccttcagttgcaatatgctaatcccactttacaaagaatataaaagctatattttgaagacttgagttatttcagaaaaaactacagccctttttgtcttacctgccttttactttcgtgtggatatgtgaagcattgggtcgggaactagctgtagaacacaactaaaaactcatgtcttttttcacagaataatgtgccagttttttgtagcaatgatatttctcttggaagcagaaatgctttgtaccagagcacctccaaactgcattgaggagaagttccagaaccatcccctttttccatttttatataatttataaagaaagattaaagccatgttgactattttacagccactggagttaactaacccttccttgtatctgtcttcccaggagagaatgaagcaaaacaggaatttggttttcttttgatgtccagttacaccatccattctgttaattttgaaaaaatataccctccctttagtttgttgggggatataaattattctcaggaagaatataatgaactgtacagttactttgacctattaaaaaggtgttaccagtaaaaaaaaaaaaaaaaaaaaaaaaaaaaa

SEQ ID NO: 24601 - DNA, 3613 bp, Homo Sapiens
gcgggtggcgggggtggcaagaggaaggagaagctggagaacatgaagaaggagatggagattaacgaccaccagctgtcagtggcggagctggaacagaaataccagaccagtgccaccaagggcctctctgcgagcctggctgctgagctgctgctgcgggatgggcccaacgcactgcggccaccacggggcaccccagagtacgtcaagttcgcgaggcagctggccgggggcctgcagtgcctcatgtgggttgccgccgccatctgcctcatcgcctttgccatccaggctagtgagggggacctcaccaccgacgacaatctgtacctggcaatcgctctcattgctgtggttgtcgtcaccggctgctttggctactaccaggaattcaagagcaccaacatcatcgccagctttaagaaccttgtgccacagcaagccactgtcatccgcgatggagacaaattccagatcaacgctgaccaactggtggtgggcgacctggtggagatgaaaggtggggacagagtgcccgccgacatccgcatcctggcggcccagggctgcaaggtggacaactcctcgctgacaggggagtctgagccacagacccgctcacccgagtgcacgcacgagagccctctggagacccgcaacatcgccttcttctccaccatgtgccttgagggcaccgcgcagggcctggtggtgaacacgggcgaccgcaccatcattgggcgcatcgcatcgctggcgtcgggggtggaaaacgagaagacacccatcgctatcgagatcgagcattttgtggacatcatcgcgggcctggccattctcttcggtgccacattttttattgtggccatgtgcattggctacaccttcctgcgggccatggtcttcttcatggccatcgtggtggcctatgtgcctgaggggctgctggccactgtcacagtctgcctgtccctgacagccaagcgcctggccagtaagaactgcgtggtcaagaacctggaggcggtggagacattgggctccacttcggtgatctgctcggacaagacagggactctcactcagaaccgcatgactgtgtcccatctgtggtttgacaaccacatccacacagctgacaccacggaagaccagtcagggcagacgtttgaccagtcctcggagacgtggcgggcgctgtgccgggtgctcaccctgtgcaaccgcgccgccttcaagtccggccaggatgcagtgcctgtgcccaagcgcatcgtgattggagacgcatcggagacggcgctgctcaagttctcggagctgacgctgggcaacgccatgggctaccgggaccgcttcccaaaagtctgcgagatacccttcaactccaccaacaagttccagctgtccatccatacgctggaggacccgcgggacccgcgacacttgctggtgatgaagggcgcccccgagcgcgtgctggagcgctgcagctccatccttatcaagggccaggagctgccgctggacgagcagtggcgcgaggccttccagaccgcctacctcagcctgggaggcctgggcgaacgcgtgctcggcttctgccagctctacctgaatgagaaggactacccgcctggctatgccttcgacgtagaggccatgaactttccatctagcggcctctgctttgcgggacttgtatccatgattgacccaccccgggccaccgtccctgatgctgtgctcaagtgtcgcaccgcaggcatccgggtgatcatggtaacgggtgaccaccccatcaccgccaaggccattgcagccagtgtgggcatcatctcggaaggcagcgagacagtggaggacatcgctgcccgcctccgtgtgcccgtagaccaggttaatcgcaaggatgcccgtgcctgtgtgatcaatggcatgcagctgaaggacatggacccatcggaactggtcgaggccctgcgcacccaccccgagatggtgtttgcgcgcaccagcccccagcagaagctggtgatcgtggagagctgccagcggctgggtgcgattgtggccgtcacgggggatggtgtgaatgactccccagctctgaagaaggcagacatcggagtagccatgggcatcgctggctcagatgctgccaaaaatgcagctgacatgatcctgctggatgacaactttgcctccattgtgacaggcgtggagcagggtcgactgatcttcgacaacctgaagaagtctattgcctacacattgaccaagaacatcccagagctgacaccctacctcatctacatcaccgtcagcgtgcccctgccctcgggtgcatcaccatcctcttcatcgaactctgcactgacattttcccatctgtgtccctggcatatgaaaaggccgagagtgacatcatgcacctgcgtccacgcaacccaaagcgtgacagattggtcaacgagcccctggctgcctactcctacttccagattggtgccattcagtcctttgctggcttcactgactacttcacggcaatggcccaggagggctggttcccactgctgtgcgtggggctgcgggcgcagtgggaggaccaccacctacaagatctgcaggacagctacggccaggagtggacattcgggcagcgcctgtaccagcagtacacctgctacaccgtgttcttcatcagcattgaggtgtgccagatcgccgatgtcctcatccgcaagacgcgccgtctctctgccttccagcaaggcttcttcaggaataagatcctggtgatcgccatcgtgttccaggtctgcatcggctgcttcctgtgctactgccccggcatgcccaacatcttcaacttcatgcccattcggttccagtggtggctggtccccctgccctacggcatcctcatcttcgtctatgatgagatccggaagcttggagttcgctgttgcccagggagctggtgggaccaggaactctactattagagggacgactgccttcaagcatccctgcaactgccacagcaggtgggggcagggctcgtgggaccctctggacagccaccaagatatctgagcaaccaagagtcccagccccaccagtatctgcttctgtagcccacggcaccccaaacttggagggacctgcccactcccctcccccattcccaaggttcgcacctcctggagcagcagcgcctgggcagtcctctgggctggcctcgggaaagccgccacctgtggtggcggtggggctctgacagggagtacagctgaccgcttctggagggtgtttctgttcttaggactccagtccaggctggacggctgcctgagggcccttcgttaaagacacgcttgtgtcctgggcgatggtaataaaaccagctcatgctgactgtgctgtatctggtgccaggcactgtcctcagcgtctctcattagtgcttgtgatctcccacagtcctgtacatgggggctgtttatccagggctgcacctccagtgcctagtacacagcctggcacatagtaggtcctcaataaacctgccttggggaaaaaaaaaaaaaaaaaaaaaaaaaaa

SEQ ID NO: 24602 - DNA, 2590 bp, Homo Sapiens
cggacgcgtggggcggacgcgtgggatcacagataggagtcccaagtcctatgagaagttcctggaataggtgtagattcagtagatctttacaagaccatatctgcagggcaaggtaccagaggacagaggcggggacagggacacttccattccagacctagcagcccagcactcagcaccatgcatgggagcaaatggctggactcctgggtggggtgggggtctcagagcaggctcccagagggcttggaggtgactccaccaggtggggacggcagctcccaggtagggtgtcatcagagtagacagcattgcttgctagggacccctggggaggctgacagggtcagtgggtttcagttggggggctcccctgctgagaacccagtaaagccggccttccattcgtctcccgtgtgcccagagcctggtctgagggccgccctgtgcatgccggcccttccaacgtggcagagctcagggggaagaacacccaggctctcaggagactctcaggccaatgtctccatccctgggtcagccctttcctgccatgaattcaggaaggcagaggcagctcagcagatggggactagaggccgcactgctatccacagcctctcttctcacccccaggcatgtcgggccccaggcctgtggtgctgagcgggccttcgggagctgggaagagcaccctgctgaagaggctgctccaggagcacagcggcatctttggcttcagcgtgtcccgtgagtccagggctctcgtggaggggtgcgtagacctcaaggctgctgagtagtcctagcaccgtgagcaggccaggagcccaaacccaacaggcacacccaccctgcagactgtccgaactcttgcacactcccccccacacagaacctgaggttatcacactcctgctgtcctgcgtgcctgtgtctcccttccctgggtctgttgagtactgataactgggccacagtgtttctttctgggagaaccctcgccttgtaggctcctgcgccttcccagtggtgtgcttcactggctgcctgcatcctggggctcaagtgctgtcgggactgcaagggaaacgctgggtggggcattgggctccgagcagcccccgatgggtgacaggtctctctgctagataccacgaggaacccgaggcccggcgaggagaacggcaaaggtgagtggggtggggccctatggctggagcacccccagtgtgggcagggctgctgggccctgcagctgtgttggctgtgctgcccgtctcctgcccccatcaatccctaatctgtgagatgggtccttgcctccaagggccggtgaactcaatcagggtgtcagcgccacagcgtggtgtcgccttccttgggtacagtgtgagaggccggccaaggcctggggctgtcttcctcccaccttggaggcggccacagtgctgctgtccccagccctgtcctggactcggcacttatcagcacttttgagctgtcttctggggtcctggtaaaaagggctactctgcctgcctgattcaagacaagggacccccttcccaacagcacccccgccccttgccgtgcaacccagtggtctccagtcaccccaccacatcgtcccctctgtaacctgacggtctccagttcccccaccaccttcccccagaacctgttggtctccagtccccaccccatcaccaccaactcccaactccccactggaacccagcagtctcgtatctccatcagtgaggacagtgtgagaaatggtgtctggctcaggcacttggcagcacttgaggggtcctcagatgtctcctgcccagcaaggctgactaaagcagtcatgggtgtgggaggggcctgcaggcatgcctgggttgggggcagctggccctgggcaccctggtgcaggtccagtctgccctctggatggcccctcctcttccccagattactactttgtaaccagggaggtgatgcagcgtgacatagcagccggcgacttcatcgagcatgccgagttctcggggaacctgtatggcacgagcaaggtggcggtgcaggccgtgcaggccatgaaccgcatctgtgtgctggacgtggacctgcagggtgtgcggaacatcaaggccaccgatctgcggcccatctacatctctgtgcagccgccttcactgcacgtgctggagcagcggctgcggcagcgcaacactgaaaccgaggagagcctggtgaagcggctggctgctgcccaggccgacatggagagcagaaatcaagaaagttcaaaggaccggcgcctgaggcttgctgtctgttctcggcaccccgggcccatacaggaccagggcagcagcattgagccacccccttggcaggcgatacggcagctctgtgcccttggccagcatgtggagtggaggagatgctgcccctgtggttggaacatcctggggtgacccccgacccagcctcgctgggctgtcccctgtccctatctctcactctggacccagggctgacatcctaataaaataactgttggattagaaactccaaaaaaaaaaaaaaa

SEQ ID NO: 24603 - DNA, 4191 bp, Homo Sapiens
gctgttggtacctttctcaccagtctggcagtcagtgatccctgttgcatgggggccatggtagtagttttggctacttctgtttgttaaccataggtacaacacaaagcatttgtaaataatgaactccaatcattgccgtttctgcctgcagcctggaattgtctcgccatttaaacgagtattcctaaaaggtgaaaagagtagagataagaaagcccatgagaaggtgacagagaggcgccctctgcacactgtggtgttgtcattgcctgagcgcatcgagccagacagactgctgagcgactatattgagaaggaggtaaaggtaagtcgtcatgggccacaggacgtgcctgccaaacgacagtgacggtcatgcttgtatccaccagacactcttgagtttataagacacagccacacaaacaccttagtagttgattatcccacccattgtcttgtctatgctgataaatttaataattggataactgaaaacccagattctgtctgctgaccccagtttatttttttctgtagtagcaatgccaccttctttctctcgaagacttggctgtgtgagtagtatgtgctgctccaccagaagagggttaaagagctgggagaaaactcacatctcctgtagtttgcagttgaaaagagttacctggtcaaggccatgaccttgcaggtctaacagtcaccgcctagaattcagaccatgtgtttgaggctcatcattgggtctcaaaggcctgaggccaaaatactgtgcataaaccatgtgacgtgcataagttgatttttaatccctcccctaaaatgaaaatatatgaataaaaaggtataaagccatgaggtcagagagaataggaaaggagacaacagtggatgaggtggtccgtaaacatggaagaaggaaaccgctgagggtgagatgagttagagctaatgcagccagacccgagttcctgcagaggacccagagtccagggggctcaggaggggcatggggcagttcgaatgtccatgggagggatttccactctcacctggctcagccagatgattaactcatccccacccactggaagatggggctttggacgtgcagaaacctggtacaggggcaggtggggagagaccaagacagaagataaggaagtcaagtcaaagcctgtatgtggaatggagagaattcccaattcctttttctttcaagcttctagaatgcctgcaaccaggcctttcccacaaaggaattcttggaagggtgctcattggggaagttaagcagcccctactggcccttggggttacccaaccaaccagcctgaataaactccaacagtcaggactcccgccaggcatccgacgtctgtcagctttttggagcctcatttcaaacacaggcagctgagtataagtacacatttgaggacaactttcaacctaaaggcagagctcaagacaaatacacaaacatgaataaacagcaacaatgcagaaaataggggaagaaatgtaaaagtatataatattttcagaaagataagaggaaatattgttgacagtgacaacaggattctacttttaaataaaaaggtgagaggaagagcttctggaattaaaactgttaattaggccaggtgcggtggctcacacctgtaatcccagcactttgggaggccaaggtgtgcggatcacttgaggtcaggagttcgagagcagcctggccaacatggagaaaccccgtctctactaaaaatacaaaaattagccgggcgtggtggcaggcgcctgtaatcccagctacttgggaggctgaggcaggagaattgcttgaacccgggaggtggaggttgcagtgagccaagatcacaccactgcactccagcttgggtgaaagagtgagactgtatgtcaaaagaaaacaaaacaaaacaactatgttatttatatatctttaaaaaattcaatagaggtgttgaaagataaaagtaaaaaaaaaggccaggtgctgtggctcatgcctgtaatcccagcactttgggaggccaatcacgaggtcaggagattgagaccatcctggctaacacagtgaaaccctgtctctactaaaaatacaaaaaattgggcgggcgcggtggcgggcacctgtggtcccagctgctcgggaggctgacataggagaatggcgtgaacccaggaggtggagcttgcagtgatcccagattgtgccacttcagcctgggcaatagagcgagactccgtctcaaaaaaaaaaagtaaaaaaaagtcccagaaagaatattcaaaaaacaaagaaggttaataaacaaaagatgagaaagagaaatgaaattagatgaccaattcaggaagttcaacatctgactcccaagaaaaaagaatgaagggaagagtgagaagaagttattaagacagtaaaggaagaacattttgaataattgactgatggacatgactccccccattgaaaggatcctgtcatgatgactagacaggtctctaaaacctcaactcacagaagcctgttcttagaagttactggaggatgtgctgcatcaaaacataaggggaggccgggcatggtggctcacgcctgtaatcccagcactttgggaggccaaggggggcagatcagatgaggccaggagtttgagatcagcctggccaacatggcgaaaccctgtctctattaaaaatgccagaaaaattagccgggtgtagtggcacgcgcctgtagttccagctacttgggaggctgaggcacgagaatagcttgaacccgggaggcggaggttgcagtgagccgagatcgcacccctgcactccagcctaggcgacagcgtgagacgcggtcttcaaaaacaaaacaaaacacaagggcaaaccaagaataggaagacacggattcatagcccaaggggtctgccagggaaaggaacaaagataattcccaggatgacaggaaagtgaagtcccaggaaattaatctaagaaacaggccacagaagctctgggataagtaagtatagactatatgtttgggtagaataatgtattgagaagttgctgaagaaatagaatagtacatagaaacaaagcaaatagaggtgtggaggaattgataataaatcattaaaaatgaaaacttaaatgttggaaactcctgtttctgggaagatgaagtagacattcttttccctattcttctagttaagtgcatctaaaatctaaaatccttggacactatatgcaataacgtaagaacactctgaaaggtaaagagaacgcagaccacccaggacccagaaaatgacccagtagtgatttcttcaggttgtctttttgcctcatgtagcccagactatgagccgaagaaactggcagcccagaaacaccaacaggtacagacagaaccccctgccaaagccagctccttctgaccaaaggaccaggaaaggggcagcctagcacaaaacagagaatatttagacaactgctcagtgcaaaccaaacatgatagaaaggactgtggtcctacctctgtgcctgctaccagaggctaagtgagggccacttattcctccagagaaagttgaatagggaccatggacttttatccctgttgggcagtaacaaacccctaaggaaccttgtgtggttctggagtgttagtggagaccacattgggtggggcagtaatgaggccctcctattccttccaaccagggaagaatcagtggaagccacatggggaaccagaactcttatcatacccagcagtaacgaggaaggagccctccacgcaggaggccaagtagggaatctgacctttgacccctacttggtggtaaaggtggtgttgtcgagcgccgtggcccatgcctgtaatcccggtactttgggagactgaggcggacggatcacgaggtcaggagttcaagaccagcctgaccaacatggtgaaaccccatctctactagaaatacaaagattggccagttgtggtggcacacgcctgtaatctcaggaggctgaggcaggagtattgcttgactctggaagatggagattgcagtgagctgagatctcaccactgcactccggcctgggtagcagagcgagattccatctcaaaaaaaaaaaaaaaaaaaaaaa

SEQ ID NO: 24604 - DNA, 3085 bp, Homo Sapiens
gatgattttgatgatgctgaccagctgaggataggaaatgatgggattttcatgttaacttttttcatggcattcctctttaactggattgggtttttcctgtctttttgcctgaccacttcagctgcaggaaggtatggggccatttcaggatttggtctctctctaattaaatggatcctgattgtcaggttttccacctatttccctggatattttgatggtcagtactggctctggtgggtgttccttgttttaggctttctcctgtttctcagaggatttatcaattatgcaaaagttcggaagatgccagaaactttctcaaatctccccaggaccagagttctctttatttattaaagatgttttctggcaaaggccttcctgcatttatgaattctctctcaagaagcaagagaacacctgcaggaagtgaatcaagatgcagaacacagaggaataatcacctgctttaaaaaaataaagtactgttgaaaagatcatttctctctatttgttcctaggtgtaaaattttaatagttaatgcagaattctgtaatcattgaatcattagtggttaatgtttgaaaaagctcttgcaatcaagtctgtgatgtattaataatgccttatatattgtttgtagtcattttaagtagcatgagccatgtccctgtagtcggtagggggcagtcttgctttattcatcctccatctcaaaatgaacttggaattaaatattgtaagatatgtataatgctggccattttaaaggggttttctcaaaagttaaacttttgttatgactgtgtttttgcacataatccatatttgctgttcaagttaatctagaaatttattcaattctgtatgaacacctggaagcaaaatcatagtgcaaaaatacatttaaggtgtggtcaaaaataagtctttaattggtaaataataagcattaattttttatagcctgtattcacaattctgcggtaccttattgtacctaagggattctaaaggtgttgtcactgtataaaacagaaagcactaggatacaaatgaagcttaattactaaaatgtaattcttgacactctttctataattagcgttcttcacccccacccccacccccaccccccttattttccttttgtctcctggtgattaggccaaagtctgggagtaaggagaggattaggtacttaggagcaaagaaagaagtagcttggaacttttgagatgatccctaacatactgtactacttgcttttacaatgtgttagcagaaaccagtgggttataatgtagaatgatgtgctttctgcccaagtggtaattcatcttggtttgctatgttaaaactgtaaatacaacagaacattaataaatatctcttgtgtagcaccttttactgtagattagtgcttaatttcttggcttgcatttgttgattgctaaggcaattttttctaatcttagggaatcattcagtagatgcgattaaaaaactaatgttgggtcaatttttttcttcattttcagcacaagaagtcctcttatatcctactaaatacattcctaaaaatgtatttgaacattggttctgtaaaagataatggactaaaaaagtagagaggagttgtagagatcttaaatcattctggaattcctaattatgcttcaatttttagacataattttagataatttatttccagtgttttctgcatgttctcatttgttctttttctcagttgaatgcaccaactggtttgagtcctgtgagcattcagtcagttgaaattaaagattcctcatttctcctgatttctattcttgtctcaatcttaaatttagagaccagttgtttttatgatatcagccatttgatttttttcattttctatttaagaaatatgaagaaaaaatacaccaagatggtcaaattactacacaaatcagcaccagcacagtctgatagctgcaaatgtccattcatctgctgtgtatgtatatccagaatcagcataggaagtcgttcaggatatcagtatataatgcacagaagtgtgggttgtttgaaagccaaacaggaaaattaggagcctcctggattgacatttcaatgatccctctaaccagtttatggattattatgaataatagtgtagtgtgttctttttcagaagttatatttgataatagagaagggagttttatggaagtttctttgaagatttttttttttccatttcgaatcagattatagcaacaatggagtttggaagtttgtatggcctataatgttctaagttccagaatgaaaagatctgtaacaatctgaatagatgtggacacatatagcagagagaactatgtaaattatcttgcagaacaaaatagaagggtcctaaatcacgttaactcaaacattgtagactagctttgtgtttattcttcaggtccttgcgccttatttggttttgtatattcaacgaactgaaatatttggaattcctatttctacgtatttggtggtccataagactttgtcaaatgtaaacctacagtttgatacgctttaaaatacctagttaagaggatgatttctctttaatcgtttaaatgttctgaaaattaaaatcttttgaggcacatgaagtgggcaccatatatcatctagagtccttactggtattcaggatgaaaatgttcacgctgcattaattgtcatttttctctcccatgttctttctcactttgatacgttaatactgataatggataaagagtgagtttttataataaatggttttggaaaggtattcataggaaccgcggttatttacttaaggttatggagtaaactagcttggaccttgggctgcaggacgactaggattcacccataacgacacagtgccctatgtttcttaacttcttgttgccatttgaaactctgtactcttatgtttaaagggttctgtatagccattttttttttcagaaagttacattgctttgtatagaaataaaaggcattattaaaatttgcttgttaaaaaaaaaaaaaaaaaaa

SEQ ID NO: 24605 - DNA, 2901 bp, Homo Sapiens
gccgatccgagacgtggctccctgggcggcagaaccatgttggacttcgcgatcttcgccgttaccttcttgctggcgttggtgggagccgtgctctacctctatccggcttccagacaagctgcaggaattccagggattactccaactgaagaaaatggacccttttgaaaccatgctgaagtcattattaaggtatcaatctggtggtggcagtgtgagtgaaaaccacatgaggaaaaaattgtatgaaaatggtgtgactgattctctgaagagtaactttgccctcctcctaaagctttcagaagaattattagataaatggctctcctacccagagacccagcacgtgcccctcagccagcatatgcttggttttgctatgaagtctgttacacagatggtaatgggtagtacatttgaagatgatcaggaagtcattcgcttccagaagaatcatggcacagtttggtctgagattggaaaaggctttctagatgggtcacttgataaaaacatgactcggaaaaaacaatatgaagatgccctcatgcaactggagtctgttttaaggaacatcataaaagaacgaaaaggaaggaacttcagtcaacatattttcattgactccttagtacaagggaaccttaatgaccaacagatcctagaagacagtatgatattttctctggccagttgcataataactgcaaaattgtgtacctgggcaatctgttttttaaccacctctgaagaagttcaaaaaaaattatatgaagagataaaccaagtttttggaaatggtcctgttactccagagaaaattgagcagctcagatattgtcagcatgtgctttgtgaaactgttcgaactgccaaactgacttcagtttctgcccagtttcaagatattgaaggaaaaattgaccgatttattattcctagagagaccctcgtcctttatgcccttggtgtggtacttcaggatcctaatacttggccatctccacacaagtttgatccagatcggtttgatgatgaattagtaatgaaaactttttcctcacttggattctcaggcacacaggagtgtccagagttgaggtttgcatatatggtgaccacagtacttcttagtgtattggtgaagagactgcacctactttctgtggagggacaggttattgaaacaaagtatgaactggtaacatcatcaagggaagaagcttggatcactgtctcaaagagatattaaaattttatacatttaaaatcattgttaaattgattgaggaaaacaaccatttaaaaaaaatctatgttgaatccttttataaaccagtatcactttgtaatataaacacctatttgtacttaattttgtaaatttggatttttatatatcatattttcttaattcattgtacacatttgacttactgcacagtatattgatcattttaatgggaaactttagctttctactttttatttttgttttttcactttctatgccattatttttgtattctttttcttagtgtgagctctaaaatcaatgttcttgaaaaagaaattattttgcagaagttggggaatcatgtttgttgaatatgtataaaatagaaacataggctgggcgcggtggctcacacctgtagtccctacactttgggaggctgaggcaggtggatcacctgaggtccagagtttgagaccagtctggccaacatgatgaaaccccatctctactaaaaatacaaaacattggccgggagtggtggctcatgcctgtaatcccagcactttgggatgctgaggcgggtggatcacctgaggtcaggagtttgcgaccagcctggccaacatgatgaaaccctgtctctactaaaaatacaaaaaaattggctgggtgtggtggcccacgcctgtaatcccagcactttgggaggtcgaggcgggtggatcacctgaggtccgaagttcgaggccagcctggccaacaggatgaaaccctgtctctattaaaaatacagaaaattggccgggtgcggtggctcacccctgtaatcccagtactttgggaggctgaggcgggtggagcacctgaggtcaggaattcgagatcagcctggccaacatggtgaaaccccatctctactgaaaaacacacacaaaaaaattagctgggcatggtggcacatgcctgtaatcccagctactcaggaggctgaggcaggagaatcatttgaacctgggaggcggagcttgcagtgagccgagattgcacccctgcactccagcctgggccacagagcaagactctgtctcaagaaaaacaaaaaaaaagataaatggacaaaagacatgaacaaacagcttttataggatagtatggctaacaaacttttagaaaagtgtttagtctcactagtaagtaacaaaatattggggcagggcacagtggctcatgcgtataatcctagaactttggaaggccaaagctggtggattgcttgagcccaggagtttgagaccagcccaggcaacattgggagaccctgcctctacaaatatacaaaaaaattactgggcatggtgacacacgcctgtagtcccagctgttctgaaggctgaggtgggaggatcacttgagaccaggagaggtcaaggctgcagtgatctgtgatcacaccactgcactccagcctgggcaacagagcaaaaccctgcctttaaaaaaacaaaaaacaaaaaaggccgggctcggtggctcatgcctataatactttgggaggccgaggcaggtggatcaattgaggtcaggtgttcgagaccagccaggccaacttggtgaaaccccgtctctactaaaaatacaaaaaaaaaaaaaaaaaa

SEQ ID NO: 24606 - DNA, 7101 bp, Homo Sapiens
aacaaagcaaacctctggtatggtgctaaaactttttccaattttattagactaatttctgaggtttaacttttatgttaaggcatttgcatgccatttgtctattcttattattcatacgacttttaaataagagttttctaggaagcctttttacatacttagaaaaataattcaagtattataaaattatgacttgaaaataatcttattcctgtggtaaatgttttgattcattctctcatcttacagatatcttgcaatactcttttttgggcaaatgactactttgaacattggatgaaagctatgtaccttctcagacacatgtttataccctaaaaatgcctatcctgtttagagattaactgacccccttcaatttcttcctcccctgccaagcccactggtggatatcagtggggcaggaggaatctatgaacttcaggttaagaaacccttgtcagttatatataatatatacataagtagatatatatgataaaaaaataagtttatgtatcctttcttaggtgccacaacagaagcagattgggttcctctcgagctgtgctttggaattccactgttcagttccgaattaaaccggaaagtttgtaggaaaattgctgcacatggcctttgcagaaaagagaggtgagggtttatattcgctgtcatattttcatatcaatttttaagctgtcagcaaatagttaccatatcttacttttattccacacatgagcacagtaattgttctgtatatatttgttgattgaatagagatcgctagtttaagggttttgctgtatttttcaaaattaaatttcactagatcagaaattagtcacaggcaaacattttgggcacatgttttgattatatttatttagtaatctaggtgaggtgagggtgtggtgaaatgggcatgctgatatggagtatgaacctagattttaaaaaatgtatgtctacagaaaatttctctgcatttctctcactcctaacatacacacactcatgttatattctgttaatagtgattggtttttgtggtggaattatgatgactttgcaaaattttcttcactttctacattttctaaaatggatatgtattactccttaaagatgacatgtaggttttatcttatataccagctctgatccattgtgagtagctgctaagaggcaatgttgtaaaggttctgagacaaactgggttagcaggaaagagtataattgaatctaattgtcatgataggtggcttggagaggtgaaatccacaagtcaagatcttcttattttagaaaatgaagttggacaataattcatttaaatggtgtaatgtagcttttatcagaaaatgaagagtactcagttgacaatttcaacatctattctctaaaaacaaagtaatatacatgagtaaaaaatagaaatactatagaactttaaagattaccactataatttttactgacttacatatttgaaaaatatttaggtaggttggtgtgtgtttaatctgttatcaggttgtcttttgcaattactttggttgtttaaaggttgtgtcatagttgtcattcctcagagtgcctaaatcttcatttgaaaagttttctttcatttaacatttatgtttatagtagttgaatttttttaaaacaataactttgattttagttacacgatgtattttatttcaaaatggacttttaatgcatgactactccctattattaaaacaagcaaaaatttcattgatgagaaacactgaaattgttttttaagatgttttgtgattggccaggatatatagatgcatttaaattgctaaaattaaactcttatgagaaactcattcttgcctttatgtttgttttaaactgtttctcgcctttttttttttcagccttcaaaacctcttacattccagtagaaaactctctctgcaagtccttaactttgttcactcattccaggtaacaaaaaccaaaaagtccaaatggtacttgtactgagctttaagtatgcacaacacttctgtgtttgtttttgagtcaccacagcagcaagatatgaaataaacattaattttattgtacaaatgaagacattgagattcaagaagttaatggacttgcacatttcactcgccaggtcttcggagaccaaagcttgatctctttgttctgtgccagtgctttattcaacagaaatgtgttaagtgtcttttatgggctgtgtgccatgctaggtgttagtttttggttatagcgcacttcccaataactaaagcgattctccactgctgggatgggctgtctgttgtggcagcgaaggccagtgctctggacttcttgtttttcccccatccccaaggaaagaaagaatattctagacttgatttataggtaaacttttaaaatagaatatttctgttcagaatatctaattcaacgttatgaaatcaatattttggagttttacttcattcattcagttggtaaatgcttgaccctgacctatgccagattctttgctgagtgctgtggaaacagtgatgtgtaagatactaatggaacttagagaatgttgtgggagacaataatcagataaatattaagatatataagttctaaaagattttaaaaagtactttgaagaagccaactatgatgaaatctgcaggtagacctaatttcaataggtgcaggataatataagctgaagccaaaaagttggaaaagaatattccggcagagcttaggtctgtacttcctgtgtctgggaaatgtccagtgaacaaagaaacaaatgaagcccagtgtggcagaaacttcatgaaagaggggtagaagcaagaggtaaggttgaagaagagggccggagcacggtgtgcagggccttctggcatatgttagagaactagtattttacgttgagtgcaaagagaaatgattaaagacttttaaacaggggagagaggttatttctgaaggactattttataaaaataggcaaaaatggaaattttataaggatgcaataaatggaaaaatttcaaaattctgtcaatactggcctgtctgttgtggcagtgaaggccttggccatagtgaattaataaattaaactaatttgggatatattttggagataggttgataaaacttgatgatgaattaaatgtgaggaaaagattagggctgtggagggaagggaggggagggatcatgaatgattcttatgttttttgattagctggatgtgtgaaatagagaagactggggaggaagaggggagggaaaatttgagagttcaatgatgggcatactgagtatagagtgcatggggaagcatctgaaatgaagtgtcagataggtggatgtttgagcatggagtcctggggggaggtctgtgcggaatatatgaatctgagaagcgtggagtaggtggattattctggtgcttagtgttttgtaaggttttttttgtttgtttgttttgttttttccccgagatggagtctggctgtgttgcccaggctggagtgcagtggcacgatctcggctcactgcaacctttgcctcctgggttcaagccattctcctgcctcagcctcttgagtaactggtatcacaggcatgtgccaccacacccagctaatttttttgtatttttagtaggaagaggtttcaccatgttggccaggctcgttttgaactcctgatctcaagtgattcacccgcctcagcctcccagagtgctgggattacaggcgcacaagccactgcacctggcctttgtaagttttttttttttttagagatttttcttctgttaggtaatactttggggttaggttaggtcttgtaaaaatgaacttttgcttttcccacagtctcgtagcctcttatttctatttaaaaggacttactacagtttaacgttgttagtcatttttgcacatattaatacctgtcattgattgctttgggctcacagtgtagatctttgcatctcctgtactgctttgcaatccataaacacttctcaggtaatcaaggtctctctttctcattagttatattaagtggttttggtaaagtgttgaatatcatttctcttgtttcttgatcttttaggaaggtgcttcaatattggatattcacacagagcccagtttttcaagtttgctttcacagtcatcgtatgctgacatgggtgttccacttcctgcaaaaaacttaatatttaaagatggtgtcttatcagaatggagtggacggtcaccttcctcacttcttattgctaatctccatttgcaataatttggttacaccatttgttgctcacactttctgccttttttctttcttaacgttagctttatagtgtcagccactaaaaagcatcctgctgctgcagtgcaattcttgcttaactaatattaaaagttggggaacatattcatgttttctgaagttttgctcattattgcacatcttattgcgacaaagtgctttttagcagccagcactgtattttttaccttgagacaatctgcatttcttttataaaactaagtatatactttataggctttatgatgactgttatgtttataagcagtcactatgaaaattgcaatggtaattttatatgttagtttatcaaacataaatcttgtttaattttatattttgttacctatactttgggggatcaagggaagagatggaactcttcctctgaaaaggcttcttggtacttaaagtagtaaaactataaaacaataaacatccagtattgagagatgatatgatagggcattatgaattcctatgggtgtctgtaaattatgtatgtcagttggacattgtagaaggtatgtaaatcagcatagttgtgtataacttaaccttgatttataaggtcttaagattatgactattcattgacatctcatgagaagctttagaagactttctatttttaaacaccatttatatgtggacttctgttgtcactgactttgggctttatattttcatagagtctttatggaaaaaatagaatttattttccactcttgtagctatagctgctgcacactttcaccctgatttatttttttgtttcttagctttgatgttttcaaaccaaggattgtgattttaggttagaattacatattagaagcattaagactatgtctttggatcagaatgctttagtgataaacctactttgaagacatactcttaagcaatctggatcttaaatttatgtgaatacttttttagaaaatgataaagaaaaatggaattacttcaaagtgtttcttgagtcattgattcttttagcatctcaaatgttaattagaataattggaatcactttttagacttttcaagttaccttccttgggaagtttgtgcagtgttatagtttagtttagctcctcttacagggtaatggtttgctagtttaaaactgtaaccaaacgaactggtcagacaacatatatctaaaacacttaaaatgttaggaagtttgggaatgttataacctaaacgtttttgctggtaactttttgttatttatagatatttgtgtatttaacatacatacttcaggaaatatatgcctttcctaaaacttaaccatgcattcaataccatggcctatctatagaattgaatattttggaccatgttatctgtggcacagtcagtgctgtgtttgaggtaaatgcagtaacggttagttttctactttgtcttatagaaggtagaaaccatgtgtatgttatgtttgtctataaaagaaaaaatactaatattaaataatttcttacgactctgagtcactcacttatttttccaataattgatattgtacattcctagtgccattaggtatgtatgtatgtaacttttacagtttttcagctgaaagttgtaagtattttttttttttgatcggggctctttaatctcattttaatttcctttgtttgaactgtagttattttatttattcctatattaaccatctaaaccaactgtaatgacatgtacactaatacagaattgaacatttgtagttgttggcagtgaacccagttgttggtgaatttaaagcttaaaatatgggaatgatttgctgctatatttcctttgagagagaaaggaggaagaaatagaacctaatagtgatcatgaattttagggaaagtaccgaagaaccatggggtcccctctggtttcttgtgttgaatgaggcaagggtaatcatctgattccgagctgaagacctctggtcctcttaaggagggagagtgcatttttagagcttttagcaaaatgtgaaaagctgatgtttgcgccttgctttgtgaatttggctttgttttacttatacattaactcatgtaatctcttaaatcttacaagcattgatccatttcaacaaaaaggtaaatttaaaatgcagactttgttatttgccaaagaagattcatgaaaaatttacgtccaattattttgcaaatagttaatttcatttggctttttaccatgttccttcctttctttttcccgcttccttaatgtaatttaaaccctggcaaacattctttagaaaccaagaggaaagaaagaacaaatatcaaaaaagacatagaatttaatattgatacaatttcacctctaaaatggatttgaagaaatgcaactttatatcaaaaaatgtcatctgatttcctttgtttcttttttaaattatgtaatcagatgattttatgtttttttttcaggggagcggaatattggtttcttttacttgttgttttcagttttctctgccattcatgtttcttttttgtgttcagtgtttcaaatacaatttgtatttaaggattttaaaataccaaactgtaactgagtacagtggatcgttttctgttaggatgttaatattatacaatgaaatctataaagtgttgtcaatttgattattgacacatataacatgtttacaaataaactgtggtattgatcaagttaaaaaaaaaaaaaaaaaaa

SEQ ID NO: 24607 - DNA, 3730 bp, Homo Sapiens
catactgacatcatacattatgaaaatattccaaaatttgaattagttcggcaaaatatcctaagcctccctctgggcagccagattatcgcagtccctgtgaactcatccctgtcttggcacataaacaagctgagagaaactggaaaggaagcctacaatgttagctatgcctggaagatggtacaagacacttcctttattctgtgtattgtggtgatacaaccagaaatacctgtgaaacaactgaagaacctcaacactgttcccagcagcaagctgctgtaccaccggctggatctccttggccagcccagtgcttgcctccacttcaaacagctggcaaccctagaaagtcccaccatcatgctgtctgctggcagcttttcctccccctatgagcacctcagccagccagagacaaagcgcatggtagagcactacaccgcctatctcagcgacaacacccgcctcattgctaacccgggcctcaaattctctgtcagaaatgaagtaatggctaccagccacgtcacagatgaatggatgacacaaatggaaatgagtagcctgaacacttacattgtccgccgttacatagcaacacccaatggcgtcctcagaatttatcctggttccctcatggacaaagcatttgatcccactaggagacaatggtatctccatgcagtagctaatccagggttgatttctttgactggtccttacttagatgttggaggagctggttatgttgtgacaatcagtcacacaattcattcatccagtacacagctgtcttctgggcacactgtggctgtgatgggcattgacttcacactcagatacttctacaaagttctgatggacctattacctgtctgtaaccaagatggtggcaacaaaataaggtgcttcataatggaggacaggggttatctggtggcgcacccgactctcatcgaccccaaaggacatgcacctgtggagcagcagcacatcacccacaaggagcccctggtagcaaatgatatcctcaaccaccccaactttgtaaagaaaaacctgtgcaacagcttcagtgacagaacggtccagaggttttataaattcaacaccagccttgcgggggatttgacgaaccttgtgcatggcagccactgttccaaatacagattagcaaggatcccaggaaccaacgcgtttgttggcattgtcaacgaaacctgcgactctcttgccttctgtgcctgcagcatggtggaccgactctgtctcaactgtcaccgaatggaacaaaatgaatgtgaatgtccttgtgagtgccctctagaggtcaatgagtgcactggcaacctcaccaatgcagagaaccgaaaccccagctgcgaggtccaccaggagccggtgacatacacagctattgaccctggcctgcaagatgctcttcaccagtgtgtcaacagcaggtgcagtcagaggctggaaagtggggactgttttggggtgctggattgtgaatggtgcatggtggacagtgatggaaagactcacctggacaaaccctactgtgccccccagaaagaatgcttcggggggattgtgggagccaaaagtccctacgttgatgacatgggagcaataggtgatgaggtgatcacattaaacatgattaaaagcgcccctgtgggtcctgtggctggagggatcatgggatgcatcatggtcttggtcctggcggtgtatgcctaccgccaccagattcatcgccggagccatcagcatatgtctcctcttgctgcccaagaaatgtcagtgcgtatgtccaacctggagaatgacagagatgaaagggacgacgacagccacgaagacagaggcatcatcagcaacactcggtttatagctgcggtcatcgaacgacatgcacacagtccagaaagaaggcgccgctactggggtcgatcaggaacagaaagtgatcatggttacagcaccatgagcccacaggaggacagtgaaaatcctccatgcaacaatgaccccttgtcagccggggtcgatgtgggaaaccatgatgaggacttagacctggataccccccctcagactgctgccctactaagtcacaagttccaccactaccggtcacaccaccctacacttcatcatagccaccacttacaggcggccgtcacggtacacactgtcgatgcagaatgctaacaatctcctcacctccacgccaagatgagatctgggagctacagaatgttctggaaagaaaaagaaccggcttaaaacccacagcaagagacctcccttgtgtttgtgctttgtgcagagttgtttgagtcatttcctgcctgtcgacatggttaaaaacgagagaaacaacaacacagtcacatttgtgaagatgtgaggctggttctgaaatggaggggaaataagcctgatgaacagacctgccataacactaatggaaggtaacagaaggcgaacctccaaacacagagacggaacctgcaagtgaagctgagccagaggaatgttccaaagagccagaagcattcagctctccttaactggaagagagaaaaatctgctcacccagagactggaatgtggcacatgcagatacaaatgtgtgcattgaagatttcgctttgtttcttagcggtacctggataccacagttgctgtatggaactcatgttatgctctaaacgatgcatctcagaatttctaagtaaaggattatttttctactatttattgaactttcaaacattctcaaactttggggaaaaggaaaggaaacacaggagaagttttcagcagttgccccgagctgttttgtgtgtaatgaagtggttctttgattaaggagctctatttcttatttaactgatatcccactgccccactccacaaaataggaaaatgaagaaatctttctctctgacttgtttacatcatttcacggaaacacatctttgtttgtaatgcagtattctttctctgtgtttgacagagatggggaggggcagaggaatttaagaggttttaaaagaaatgttatgtttcttatgacttgtttccactcctcgtacaatgctattcttaggtttctacgaaacctaatgttagaaccgcatcctttcagctaagggagggttggatttattttccttgttttagagactacaaatttttaaatatcccattttgactgagaatattgacatataagggaagaagttttctaaattgtgaaagtctggttcttaattaaagaattttttttttaatatcacggttaaaagctgctgccagttagccaagacattatccaccaaattgctttgtgatttatacagggattaatcaaatctggctactataacatggggcattgtaactttaaagtagtgttttaattacagtgatgtattttagactcacattttgtgattcaaatatgttataaaggcattcttgcaccatggtaaagaatgtgtgtggtaaatctccgtttatatgtagttggaaaaaattcactgaataatgttttaatgatagggtattatgatacaatgtaaaaaacaattggttcttcagcagtacagaaagtaaactatatatgtgctatcaggaaaccccttcatactgtgtataaaattgcaatctagtgaaataaactgtatgcaatgaaaaaaaaaaaaaa

SEQ ID NO: 24608 - DNA, 4763 bp, Homo Sapiens
cattttccccggagcctttgactggtttctggaggtgagtaacctagacaggtgctttcagggggtgaggagcagcacaagactagaggcaggaaatatccactgggagagagtgtactaatctggttgggaaatgatggtggcttcagctacatagtggctttggggatcaagagaagtggatgcaaatcctgtaaatcccatagagcttggaatttagaaataatttggccttttcacgtaataggtgatgaaaccaagaatgagaatttaaatggcttgcccagaatcacacagctagctgtggagcagcaccagatatcatttctctatctaactctttcctttatgtcactgttgaatgtgctgatttgggagaacagggcattgtgggcattttggagccagcaacaggacctgaatcctggtgtccattgcagagggaggagtccaccctgctttgggggctggattcctggtaaggttatggggcaggtcacagaaatgagggagttggaaggaaaaaccaggtgtgagaagatgatggattcagtttttggtttgttgatttggagattcaggaccaccatctgtaggtggagagagatcagatggaaactggtccttgagattggaattggggatgcaggattgggtggaattggtcaaaacttttctataccctttctttaaatttctccagtgaaagggactcagcaactgtttttgagtccattgtgtcatgtaccttagaattaagagatttttccagtgtttagccctgaatgatttttgctgcaatttgaattctgtgcaaccacagagatttaataaaaataaaataggttaatacttaaaaattagtaaattaaaataaattaagtaaagataaaagttatatggccctcccttgcatattttaccctgtgctgcaggtcttctcaggagcctctctggctctggttggtctcttggtccaggctgtggcctctgtctcttgggttttcatactgtaagatttctccaactgagtttgggaggctgaagccccaaacagaacttgatggcttgtgctggaaaaggggaaatgggttctgcttgctacaacgtgttaaattctgtttttaaaatgtcagtttggcatcaaacacttttttagacatgtttacatcctaaaagtttttggtttcagaagttttttgtccttcacaattaacttggttgcagtgattaaagtatagcctatttcctgggaaataggagacaatttcagagccactatagaccatattgacattagagattgtaggataccatagacagggaggtcaatagacaggcaacgtggtatcatagttgttttatctctccctggtcactgtccttctacctaatgttgtttcaccgtggaatttgagcttacaggtgaaaaagactttcagtgaatactgcaccaagtataatttaaaaattttaaatcctatatagatatggggcatgactaatagagtaatgacttccataaaccacacatgaaaactgctttaattataattatcattacttttattctccagaaagggaaataaggttaaaacaagagagcccattcattctaagttgaccagttaaatttcttgttctcccttccctttgtcctttgatttgataaaaataagatttttgtgtgctaaattgtgagtattcatttacattaatcagtatccctataagacaaagcccctgaaaacataaactgagtgcagcacgatttaaaacagagagggaggagacagtcttggtcctgttcttggtgccctgctcattactaacgtctcagttgtactgtccactataaacagtcatgattttttcccccattcttcagatcaagtcagtttcctctaatgagacagtctacctggttttataggcatttctctgtaatgttttccaaacgaagaaagcaaacagcaagcattttgttgggagaaatctgcaagtgtctgttctgtggctgtgaactaatgatctttcagaggtctagtttaaaagcactgagtttcttcatgacccatgaggatatgtaatccacctttatagcaggtaagtgttgaggttcacacaggattaacactctctttaacactgttctctacaccgttctcttgcaaagggatactcttcccaaccctgaaaggcatgcttggagaggtggagtgtcactcccagattcttattttagagaagggagtgtcatgtaattttctccctaccttatttattcattctctcccctctcccccttgctgacctgcttttcttccttcagccaggtcttcgctttaaggagtcagctgagcttcagccactgatgctgggggcacatagtggcccaagccaccctgtagctgtacccttttggggagggtggctttcgtgtttttgtaaagtttttgaagaacctcttacatgatacagtttgaactgattagcaaacagagccaaagaaactagtacctgatgaaaactgactgacatggtaggcaaatggaaagtttggtttccaaaaagtgtgtgttgtggcaagttgaagtcagaaaaatgaatttttgactttgattctgagtgatcactcctctacgcactcccctttctctttctctccttgtcctctccatttcactccctctccattctctctccgcctcttttccctcctcctgctccgttctgtgtatatgtttgtatgtataacacttcagcatttatgtagtggttgataattgaatacattctatttgcagtactacctaatgtgatttaaccacaggaaacttgcttctctcattatttatgattttaaattttagtttttggtaattaagtctccatgaggagcgtcctcatttggaaggagagttagcatcatgctgtggctaaagaaactcagtttttatgcctaccaataatgtgaaaatcacctcactcctgtttggctgattgggttgaatttctcttaataccatactgaatgtaacttgacgagttagtagggaactggtaacaacttatttcacagagtatttctagttattgatgtagtttgggtgtttgtcccctccaaatctcatgtgaaaatttcatccccagtgtttgaggtggggcctactcggaggtgtttgggtcatggagacgaatccctcatgagtgacttggtgccatctcatggtaaagagttcaatgtgagatctggttgtgtaaaagagcctggcatctctctcttgctcttctttgtcttgcttcctctctcaccatgtgacactcttggtcccccttcacctttcacagtgagtaaaagcttcctgaggccccaccagaagcagatgctggcactgtgctgcttgtgcagtctgcagaactgtgagctaaaataaacctctttataaattaccctgtctcagatattcctttatagcaacaccaaacggactaatacagttacaatatatttagtgtaagatttattcattataattagcttatttccaaaatgaccattttaacaaacttcaaatattttgagtgttagatttttaaactcggtgtactccaagtttcatttaactgctaaaggacaagtttagtcatacactgcataaccatattttggtcagtgatgaactgcctatataatggtggtcccataagattataatggaactgaaaaattcctcttgcctggtgaagtaggggtcatcttaatgtcctagggcagtgtattacttatgtgtttgtggagatgttggtgtaaacctactgcactgctaattctataaaagtatcacacatacaattacgtaccatatacagtgcttgatagggataataaacaactatgttactggtttttgtatttactgtactttttatcatttaaaaaatttttatttatttattttggagatggggtctcgctctgtcattcatgctggagtgcagtggtgtaatcacagctcactgcaggcttgatttcctgggctcatgcagtcctcccacctcagcttccaagtagctgggaccgcgggtatgtgccaccatgcctggctttttaaattttttgttgagatggggtcccgctgtgttgcccgggcagatcttcaactcctgggctccagcagtccttccgcctcggtctcccaaaatgttggtattacaggcatgagccactgcctgtcattattttaaagagtactcctacttaaccaaaaaataaagttaattgtgaaacagcttccggcaggtctttcaggaggtattcctgaagaaaacattgttatcacatgttattgcccctgaaggccttccagtgggacaagatgtagaagggaagacagtgatattgaagatcctgagtaggcctaggctaatgtgtgtgtttctgtcttagtgtttaagggaaaaaaaagttttaaaagaaaaattaatagaaaaaagcttacagaatgagtataaagaaaataatttttatgcagctgtacaatgtatttgtgttgtgttaattacaaaagagtcaaaagttaaaatgtaaaagtctgtaaaactcatgaacagtggcatgcacctgtggtcccagctactcgggaggctgaggaggcaggatcacttgaggtcaggagttcgaggctgcagtgagctatgattacacctgtggatagccccactgggcaacatagactctgtccctaaaaaaaaaaaaaaaa

SEQ ID NO: 24609 - DNA, 1455 bp, Homo Sapiens
ctcacagctttctctctcattctcttggaacccagtcaccatgtaaagaagcctgttgtagcctccttaaagatgacggattactggagagagaagcccagctatctctctcagcgcagctcagcattgggaccaccagtcagttgaatgcagccacctgggttagtcaggcaagaccagccaaagcttcccagacaacctatagattcatgataaatatcacattgtgattattggaacccagtgagtttagggtggtttaatatgcagtgatagtaaactgacacaagtcctgtgagtttgtgaccgcggagtcatgggcagctgtcttgggatggggctgagctgtctgcatgaatagaaaggtatggaagagtctcactatagtatagtgcagcatggagactagcctctcagttttcagaatcttcttggaaagaaaacaactcgtaactgagattctaagaaatttgggaaacaaaatttatggctaatggctgaggcaaacaagaaaggtggctcaaatattggaatggaaagcaggaaaccctaggttttagttctggcatcgacattgcctggctgatgatactggtctctggacctgagcatgcccactaccaccatcttccactgtctctggtggaagaaatggggctgatccacctccaaggatgagggtcgttcaatgggtgcttactgagggctgcagaagtaaatcattctctccttccacagtgaccagtggggcatcatgccaactcctttctgggagagagtgattttaaaggaggaagtaaacaaatgctgagaaagaagtcagggaatgccccaccagggacataacatgctgcagtaatttccccaaattagaaactactaggtaaatgccttctttagaccacaaagattgaaagattgaaagaaagctaggagggctgggatgattactgcaatgatggaacccaaccttggagttctctctgcctaagtggtccccacccctaaaaaataactaactgctcagtagcctcataaataaaactaatttttctcgtccttccgtcttaacacacacgctcatgcatttccaagttatttctggtgacctaaaagacgcacgcatgccaaacgcctgcagattctgccagagtcaaccttcttctcctgtcttagtggccagagaacagtccctggaattcaaaggataaacaaggcctgcgtccagacagagttgtttctctgaaacattgctggcttcttctgagtttgattcagctgttctctgatgaaattcagggaaaacttgccttcagagatatctctcaaattttactaatcttcagctttagttggtcaacattcattccacaaatatcaattgaactcctactgtgggcctggtggtggtctgagtgctgaagatacagtgatttaaaaatattaaaaaaaaaa

SEQ ID NO: 24610 - DNA, 1672 bp, Homo Sapiens
gggcagtctccctataaaacaaaaaccccaccttctgtgccttctgctttagagcagagctccccctcccatttcctcagtcttccctgcaaaatctgtccaccggggaaggcagcaggaaccctgggcagcgggtgttctgggaaggctagtgacagcagatgtcatccaggaacagccacacacggttctccaggccgccgtcagcagctcaaggtggggtatgagtgagaagctgaggatctcgcagcttgttgctgagcaaggtgcaaccgggctcatgctgtcatcagcacaagacgggatggcaagggctttcagacgcatttccaagagtccagcaagccagggggaagatgatccctttgccgaagtgtaccctctagccaacttttgggagcgcttctgtttgcaaagcgctggggatgtgcctgtctctgtgtgacccacgaacgggaagggagagcactggagtaatgacacttctgctgctgctttgattctcaaggctgatctttaaaaccctcgccttgctgacaggtgctttaaaggcagtctgcatcttttcttcccttggtgtgggagaggtaaacactttgatttgctgaaagctgtatggagtatatttgaacagctagtagttagctttgaaagtggaagtgtgaacagacactacttgtgtcgctttgggtccttcactttacccccacagaagtctagaggcgtctgttataaagcgttacggggcgcctgcatgcaggaggaaggacctgtattagctggaaatcatcaggaacccagcttgcctccatctctctgagatgtgctgggtacagcctgcccctcctagttctgtccaccgggaagagccggctggcggcagatccccaggggcagagcccctgctggatcctgggagctcatctttacctgtgccggagtgggaactgtgattccagccgggcaggtcagagtggagcagtgctaagaggctgttgcaggagaactagacgggcggggcctgctgcatctggatcatgtttctgtgctctgccccgcgctagggactcagggtctgggcttctgccaggtgaggagcagagagactgttcccttgggtggagaggtgtgggcatgagagccacccattgccaagcagcaagaatgttcgtgcttttttccagagaggggaaccccactggtttttgtggaaacaatggaaacttacagatgcctgcctgggatgatgaggcacattcagaacaaatgctttttttttttgagacagagtctcgctctgacgcccaggctggagtgcagtggcgcgatctcggctcactgcagactttgcctcccgggttcaggtgattctcctacctcagcctcccgagtagctgggattacaccaccatgcccagcaaatttttgtgtttttagtagagacggagtttcaccatgttggccaggctggtctcgaactcctgacctcaggtgatccatccgccttggcctcccaaagtgctgggattacaggcgggagccaccatgcctggccagaacaaatgcctttttaaaccttttaagaacatttttaaaatgtctttttctatgtcaaatgtaacgtttatttttttaaacaataaaattgatttgcctaaaaaaaaaaaaaaaa

SEQ ID NO: 24611 - DNA, 3385 bp, Homo Sapiens
aaccgttacccaggcaatactcaagaaggagaatccatttagcacctcctcagcctggctcagtgattcatatgtggctttgggaatacttgggttttttctgtttgtactcttgggaatcacttctttgccatctgttagcaatgcagtcaactggagagagttccgatttgtccagtccaaactgggttatttgaccctgatcttgtgtacagcccacaccctggtgtacggtgggaagagattcctcagcccttcaaatctcagatggtatcttcctgcagcctacgtgttagggcttatcattccttgcactgtgctggtgatcaagtttgtcctaatcatgccatgtgtagacaacacccttacaaggatccgccagggctgggaaaggaactcaaaacactagaaaaagcattgaatggaaaatcaatatttaaaacaaagttcaatttagctggatttctgaactatggttttgaatgtttaaagaagaatgatgggtacagttaggaaagtttttttcttacaccgtgactgagggaaacattgcttgtctttgagaaattgactgacatactggaagagaacaccattttatctcaggttagtgaagaatcagtgcaggtccctgactcttattttcccagaggccatggagctgagattgagactagccttgtggtttcacactaaagagtttccttgttatgggcaacatgcatgacctaatgtcttgcaaaatccaatagaagtattgcagcttccttctctggctcaagggctgagttaagtgaaaggaaaaacagcacaatggtgaccactgataaaggctttattaggtatatctgaggaagtgggtcacatgaaatgtaaaaagggaatgaggtttttgttgttttttggaagtaaaggcaaacataaatattaccatgatgaattctagtgaaatgaccccttgactttgcttttcttaatacagatatttactgagaggaactatttttataacacaagaaaaatttacaattgattaaaagtatccatgtcttggatacatacgtatctatagagctggcatgtaattcttcctctataaagaataggtataggaaagactgaataaaaatggagggatatccccttggatttcacttgcattgtgcaataagcaaagaagggttgataaaagttcttgatcaaaaagttcaaagaaaccagaattttagacagcaagctaaataaatattgtaaaattgcactatattaggttaagtattatttaggtattataatatgctttgtaaattttatattccaaatattgctcaatatttttcatctattaaattaatttctagtgtaaataagtagcttctatatctgtcttagtctattataattgtaaggagtaaaattaaatgaatagtctgcaggtataaatttgaacaatgcatagatgatcgaaaattacggaaaatcatagggcagagaggtgtgaagattcatcattatgtgaaatttggatctttctcaaatccttgctgaaatttaggatggttctcactgtttttctgtgctgatagtaccctttccaaggtgaccttcaggggggattaaccttcctagctcaagcaatgagctaaaaggagccttatgcatgatcttcccacatatcaaaataactaaaaggcactgagtttggcatttttctgcctgctctgctaagaccttttttttttttactttcattataacatattatacatgacattatacaaaaatgattaaaatatattaaaacaacatcaacaatccaggatatttttctataaaactttttaaaaataattgtatctatatattcaattttacatcctttttcaaaggctttgtttttctaaaggctttgttttcctttttattatttttttcttttttatttttttgagacagtcttgctctgtcgctcaggctggagtgcagtggcacgatctcagctcactgcaacctcctcctcccaggttcaagtgattcttgttcatcagcctcccgagtagctgggactacaggcatgtgccactatgcccagctaatttttgtacttttagtagagacagggtttcaccacattggtcaggctggtcttgaaatgctggcgtcaagtgatctgcctgcctccgcctcacaaagcactgggattacaggcatgaatctggccttacgtaatatattttcttaatggctgcataatatcacatcaaataggcatttttcaaacctctttccttattaaacatgtagactatatccattttttactaaaataaataacatttcagataatatctttgcactgataatgttgccaagccatttctaaagtgaccttatcaatttaattaccattggatgagggtgttgctttcatcgcaccattgtagattgtcttttttatttcaatttgcgtttatttataactggttgcaaaggtacacagaacacacgctccttcaacttatctttgataaacccaagcaaggatacaaaaagttggacgacattgagtagagtcatggtatacggtgctgaccctacagtatcagtggaaaagataaggaaaatgtcactactcacctatgttatgcaaaacagttaggtgtgctggggctggatactgctcttttacttgagcattggttgattaaagtttaggtaccatccaggctggtctagagaagtctttggagttaaccatgctctttttgttaaagaagagagtaatgtgtttatcctggctcatagtccgtcaccgaaaatagaaaatgccatccataggtaaaatgctgacctatagaaaaaaatgaactctacttttatagcctagtaaaaatgctctacctgagtagttaaaagcaattcatgaagcctgaagctaaagagcactctgatggttttggcataatagctgcatttccagacctgacctttggccccaaccacaagtgctccaagccccaccagctgaccaaagaaagcccaagttctccttctgtccttcccacaacctccctgctcccaaaactatgaaattaatttgaccatattaacacagctgactcctccagtttacttaaggtagaaagaatgagtttacaacagatgaaaataagtgctttgggcgaactgtattccttttaacagatccaaactattttacatttaaaaaaaaagttaaactaaacttctttactgctgatatgtttcctgtattctagaaaaatttttacactttcacattatttttgtacactttccccatgttaagggatgatggcttttataaatgtgtattcattaaatgttactttaaaaataaaaaaaa

SEQ ID NO: 24612 - DNA, 2698 bp, Homo Sapiens
atttagagaaaatgacttcttgaaatgggataatcagcaacattacagtcttgaatttcctccaggctctaggctatctacacactaaagaagaactgctggaatcagagcttgatgttttgaagtccttgaacttccgaattaatctgcccactcccctggcatatgtggagacgctcctagaggttttaggatacaatggctgtttggttccagccatgaggctgcatgcaacctgcctgacactgctcgacctggtctatcttctgcatgaacccatatatgagagcctgttgagggcttcaattgagaactccactcccagtcagctgcaaggggaaaagtttacttcagtgaaggaagacttcatgctgttggcagtaggaatcattgcagcaagtgctttcatccaaaaccatgagtgttggagccaggttgtggggcatttgcagagcatcactggtattgccttggcaagcattgctgagttctcttatgcaatcctgactcacggagtgggagccaacactccggggagacagcagtctattcctccccacctggcagccagagctctgaagactgttgcttcctctaacacatgagggaggctgaatccaccaaatataaacagccatccgtcactgcactcatgcctccctctgtttactttcatactaagggtacaaaaattccaagtctcttttgaactgtattttgtatgccaatttcatgcttatttttcctttatcagagagagttaaggtggacgagcatgccctttttgtcatatcagcctgaaaatgttaaaaagctaggtggagacagattagttgtttcatttttgtttaacaaggtatttatacttttagcttaatttcattaagaggaacatcaggcattgcaatcagtattaatcaggggctcaaatacagactatctgggtgaccttgactaagcatcaaggaggtagcctttatttccccttaaaattagtttaacatctctgttccattattcagatctacacaaacaaggcttcctcaacagctatctatttttactagagtctttttttaaaactaaaactaactctaaagaagtttcaacagaatttccacatacctgcattcattagaacttgattctcccagaatacaaagtactctattttaaagaaaaacccaacagtgcacccctgggcagttttcagactgcagcaaatcttttattacaaataattaaatctctccataatgtctcaaacagtatcaaacaccatttcatatctctaacacagagcagagtcggcattcagtataagaaccaagtgaaaagtgttaaatttcaagcatctgatcacatcacatggtgaccaggtaaagcttagatgtcattttcccacattatccaactgtgcatctcaaacatatcctcatctcagtaaagacaaaagtttctatttcatattgttaagtgcaggaagttgagagagataaaaatccagtgaaaacacatcaatctcaattcaactcagttaaaaaaaagaaaagcaaatttaaattagtttttttcagagaagaaagggaaaggagtccatggggttaagaatcaaaactgaccagggctggcaactatagatggcatgttgtagctctggaaagtatctgtcacatgatattttaaaataaagtggcttttgtggattttttcttttttggtattgtaaacatgtactgtttaatattacccgaatttaatttaaaacatgtttgcaaacaaaacaaaattaaaagcctttaaggcaaacctccccctaaggaaaaaagtcatttgttataaaattgtgaggacacccaagcaagaccccacttaagattcgtcagcatgaacttgagagcttttgtccactgctcctcagagttaaactgggttttgatggaataggagccgccactgcctcctgtgtcttcaatcttgcctttctccacatccatcctgcagatggacagagcaaaactcattagtaactgagatctgagttaagtaagttcggggcagggacttgatcatgggaccattcacgtcattttatctattaaagaacacttggtgaggaatgatagtgtattttggatttgcttgaaagccaaaaatcaagaagactgtcacaagagcctcattgtcattgcagagtacagggacaggacacacacccaaagagaagagaagcctggagtaggggtgagtgagggttacagtacttcttgctgttttcctaggcatccctgaacttggcgggggagaaaggaggcagaagaaaagaaatgctttgttttggggtgatagaagcagccttactctaagtaaaaactagagtttccatccatcaatgggatcctagaaaaatcaaaagaagcattcctgtgtatttccaagggcttcagggaaaaaccttcttgaaactggagaggaggcttgagctctatgccaagaaaaccccctaaaccatctaaggcaacattcttctactccaaggactaggtggtcacattctgtcctgcttgcagtactgggtcagtctctgcccatcaatgtcatgtgattctgtgccatttttttgctttcccaccatttatactgttttgcctccattaaaaaaaaaaaaaaaaaaaaaaaaaaaaaaaaaaaaaaaaaa

SEQ ID NO: 24613 - DNA, 3193 bp, Homo Sapiens
cgggtccctctcctcccctctgggccgtggttttaggcctttacccggggaccttctggcctcgaggtgtaggggcggcgatggtttttcggcggtagcctgctccatgttttcccgtgtggggtcagacagtttgggccttgggtcagatcgaagccagggcgtacagtctgcatttttgccttttcccggagtgtctctggctgctgctttctcttctctcgctcttcctccttttttttctcctgctcagtgtctcggtcttgcctaaaacgaagagagcaatccctgcaccttgtcctagtgaagcccagcgctgcatattcttagttgtttttgacggctgttgaagcatcggaacaattaagagatctcagaatatcccttgagcctccaaaccctctgcatcttaaaagctgaggctgttgctttgttctgattgttgggtggggagttctcttcctaccctccatcccgtctgaaggagtgtgggtcttccattgttgtcgctatttattttgctaaggcttctaaagaatgtaaaattgttttaagagtggagacggaaccgtcctctccacaggtaaaacctacaggactgtaagtttacacacacatcctggcaactagaatcttttctcgttaatcatattggtatatgttttaatttattttctctaagtgccattttagtgagcacttatttctcaagttttgaacattttgtttaatatttttgtaatatcgaaacagtgtagaactgaggagagaagaaagcccaaagatgatagggaacgctttgttctttgtatgattggcatttcaggtagtgggcacatcccccccacctcgtgtgtgtacttttcaaatgggatgtgaacgtataatattggcattcaatccagtatataattatagaatttggaagacttaggacattttagtcagtgaatctatatttagacttttcaaagacatggcacgtaaggacacgtggagaaaatgtcccacacagataacaggatttgtgattttggctttgctgttttatgattagcaaatattgtttgtatagagtgtctgggtgccctaaaaacacatgaaaataggtcaactaaatctcgttttaaagagaaaaccggaagagtgaacaccactctaaaaatagattttggatgtgtttgttttggtgccttgtatatcttaaagtggaggatgttgttcagcccaatctttcatttagaatttatgtctcaaatgagccagtgtatcatgtgggcagactggaaatacatttaaatattttttttcttcgctggttgttcagaacttggtagaattataattatcaggaaaactctctccaaatagctggtcttttagacaagagaagaaaaaagaaataacttcttttaaaaggagatgtcaacttacaaagtgttttgtttcagtctccaccaacctaacttgtcagaggaaaggaacagactttttttttaaaggatccaaaacgatattttgagtcaaaagaagaaaaggatattaaatcttttgttttcacaatatcgatctttttaaagaatattattttatatgttaaccatatactaccaggaaacatctaacagcactgacagttgggaattcgaatgcgtatttttctcccgtgttagtaatagaaggtactgagccttttccattctcttggttgccttgtgcctgaggaatctgaatttgtgaaacaacatctttgtggatatagaaactaatttatgtaacacttggctacaaccacctgtgcttacttacggactatctttagttttcatggcgtgttaccttttgggttaattcaaatccaaaatgttgttaacggactgctaattaaagtatttagaacttagaattacagaattatagagtaggatgagataacaaaagactgggggttatgacttgaccaaggtcacacagataatttgccaaagagctttcttatttatgaaatggttgctggctaagaaacatctgtgtgtgatatgattaaaagacaatattcgttcacttttacatctcatgttttgaaataaaatgcaaagctcacttttttgttgttttgagaaaaattaaagggtttaatgggctagtataaagattgtgaaggcagtaagtagactgccacatagtaacgtcttaaagggaaataattctttaaagtatcagaccccatttagttgaaatgagttttgtctgaagtttccaagtatgacctatgctttttcttagctaatttttagcaggagatgatgagggctaaaaattgagacattagggcatttagttacatctctcaatttgtgactggtttataaaaaatactaagatgtgtctgctaactcacacctgatttatctactccttttatgtatatataattgtttttgagttgtgtaccaaaagttggaacatttcaagtattttttctttctgtcactgagtgatttcatgtagaacatttactgttttgtgtattttgaataaatggcaaaaatcttattaaacattagctgttaataattagaaaaatacagtaagtcttcaaatatttataattgatatttgtctttgtttttatatgtatttatattgatgttatatgctcatctttttctttgattaaagataatcgcttgcttgaatctattacctgaaaaaaactcttgactttgatcttgtgactgacttgaaaagtgggagtatgagtattttgagttgttacaaattataaatggtacaatattacttcatttttagttgtatttatttttcacttatttgaatgggtcaagatttaaattcattgataatccctaaacccctttgtgtatttttaagttttacctgtcactgtttttttcctccagaattgttaggggcaaagtatctaatttggttttagactttttcttttttttatgttaccttcttcatacatcatcatattaagtttggtgtaaaatttacaggtcattcattccagtaggaattatgtatgtttgagttatttatgtttggcaaattaattctggcctgtagttgaaatcatactgttctgttttacatccccctattggttaaaataaaagcatcccttctcctccaactttaaaaaaaaaaaaaaaaaaaaaaaaaa

SEQ ID NO: 24614 - DNA, 6656 bp, Homo Sapiens
cggaacacttggttttgtgtctcatttcagcctagtagagggacaaagcaagaagtttaatgccaacatcagaagagccacttgagcagacacaagcatttgcctgtgtacagcatataccttgtgccgggcacgcttttctattacttcatttaacctatctatgcctagtgttccattatcggaacgccaagcttgtggggagttatttatatcctactgctcaaggtcatcaccaaggtctgatttttcacaaaaatttgcaacctccggcataaatgggttaattctcaacaccatcctcaggataggtactgtcatcattcccactctacaggtgagggattgggctatagtaacttgtttgagatcaaaaagccaggaattggcagagccaggatccaaactgcctgaccccagagctcatacctttatctttctcatcaaaaaccactggttggatgagtacctctctgggaagaaagggctgcatgaccctgtgtgctattacccacctgttggccgccaaggctgatacctggcaggaagccctcattcacagggcagaaggctcagtgaaataaacaggcacccaagggctaagtggagaggactggctcgctccaggagctctgtgcagatcttgagcacattggctcagtatgttattgaaatgatggagctcggggcggagtgatgattaatagtgcctttggcagcccccaaaaccaccaggaactgtggatagtgagaggcccaccatccggtgtcaccacaatggtgctggtgtccaatgaacgtgtgcttccatatactgttctgaagggcagtagtgagtggttccagcccgcctcatcttccctgtagctgctgaaggtatgtctgtcctccttccttccttctttcctctctctctctttttctttttctctttctttttttttttttttttgagatggattctcgctctgtctccaagctggagtgcagtggcacgatcttggctcactgcaacctccaactccctggtccaggcgattctcctgcctcagcctcctaagtagctgggattacaggcacccgccacaacgcctggcaaattttttgtatttttagtagagatgggtttcactatgttggccagcatggtctcgatctcctgaccaggtgatccacccacctcggcctcccaaagtgctgggattgcaggcgtgtgccatggcatgtgttttcaagatctcctttgacccaggtctgtggctttggtcctttgccatggactagagttcttcataggcaagtagtccatgtggcgcttgagctcttcactagattaaagccagtaggggtaacagcgcagcccctctggctagggaagaggggtgccgctagcatcattccatctggggcttcaactcatctttgcataccagccctgcctgctgctgctcctgtcgcaggcgtggaagacctggctggaaccctattcctgccatggccttgaggctgttcggtaacctctgagagcctgattttcccacccaccttatgaagttcttacagagcgcctagctctcattcaggtgcgtgggagatgctcagtgacttcgagttccctcctcatgcctcttcatgtggctctggggcttgtattagagcttccctttcttttagagtacagccagctgtctattgcagcttgtatatgaaacggtctctctctgtggtaactttgcacaaaagatggttttgtggtcagcctctgaataatgcagtgaagcccctgccccccaactcacacacagggagctgtggtcacagtcagaccacttggcagccatcataagacttgaaatggggggtttgaagccattgcttgtgaattagcatgtttttctctcttttgcctttgtgaaaaccaacttcctgtgcagccgcttgtgttttaaaaccctgaaaaaggggggccagctctcagcccttgtccaccgctggttcctaggaccgttatgaattaaagattacagccgttaaaaagagatcgtctttaaacaagcgcagttctctctcctcatgccccctgagtggagaagtttttgtgtatagcgagtccaaaacaaacagagatgttcttgagagacgtggggagcaggggccgagacagcaggagagcgagggcagcagagggacagtgggggagagccggggaactgtagttttgaattgttggcctcctgtctgcatgctcagagaagcagggccgcgtggagtgcccagcggaacctgctcatgctgatttgctgcgtcaccttgggaaaacgttggctttgctcctccgcagcacgcacacaggcacaggcacacacacgttcccatcccagctggtgcccgcgtgtgggtgttaggcacagactctttggacaaagctctggagatgaattgggaaagaagtgtggtagaaacatcaccaggaagctttgtgttacgggccttgtcactgcatgtgaagatagaccagacgccccgcagagacagccctcttgaaactctcacctaaaggagatgctaccaaggtgagggacctccgggcagcagaacaagaacatcgaacaaccactacggtttaacaggagcaagaaacgatctttccgaactttcctctgtggatgcaaagatgttgaagagcagttcctgcctttggcagggaactcggggtgcacacggggagacagacaagaagggatgagtccagggcacttgtatgtctgtaccttctcttagcctcataacatctctatgagggagcgaagaacatcacagctttggccgggcgcagtggctcacgcctataatcccagcactttgggaggccaaggcgggtggatcacgagatcaggagttcaagaccagcctggccaagatggtgaaaccctgtctctactattagtggggcgtggtggcaggcacctgtaatcccagctactcaggaggcggaggcagagaattgcttgaacctgggaggcagaagttgcagtgagctgagatcgcaccactgcactccagcctgggcgacagagcgatcgagactccatctccaaaaaaaaaaaaggaacaccacaactgacttgccctgtgttggagatggctgtgcagatttagtcttgctcaagggctttaccaagggttgtgctcagggcacaactggggctaaattccaaggcctgctgcctttgggtccgtaaatcttcattgcagatgttgatgtagtttccaggactgcatcatcttggagtttattttaggcagatgattgccttctaggtcattctcaaccatttaagtatccttggcaggagaacttatctgaatgggccaaggctctttgagttgggagcaaggcgtattttcccacccaatctccatgcacccgggtcctgtggtttcattggcacttcatttggaaagttgttggcttttgggaggagaaaggaaggagaagtttggcagcatcctgttccaaggcctagagttttaatgtgtggtcagactgtttattgattaattggttttcaagagggaaacatgttctttcaggacatagggtctctaggacaaaaataactttaaaagaagaggtggagatgttagagaacactctaataactcctatcacttcacagctgggaaacctgaacccccaaaggggtaagagattttagaaagtttcaccaaattccccatttctctggacagaattggactctagatggaggactagacattttcccctagagccgtgtttccccagggcattgagaggtgttaggagatgcaagggctccatggccgtacatgtggcaactcctaaattaaacattccctaaatgcaggacttctcagagcatttactctgctaacaagtggtctgcttttctaagagctggttaaggtaggtaatgattccttatttggccaatgaacttattttaaggagactaaattatctttagtctttaaattattttaaaattatttttctcctagaagactctatgtcttgaggaatatgtttccctcttagaaaccaattaataaatattgggaagtcaggccgggcacgataattcatgactatagtcccagcagctggggaggctgaggcaggaggatcacttgagtccaggagtttgagaccagcctgggcaacatagcaaaactctatctctacaaataaaataaaatcaaataaaataaaattaactaggcatggtactgtatgccggtagtcttagctactcgggtggctgaagtgggaggatcacttgagtccaggagttcaagaatgcagtgagttatgattgggctcctgcactccagcctaggagacaacgtgagacctcgtctttaaaagaagaaataaaataaaataaaataaaactaagaagtcagatgaattctgactcaataaattgaagtcagatagatatatttttatcaactgggcatatacatatataaaaatagatatcagataccatattgcatatatataagtacatattttaataaactatattagcctgacatatatataccttttttttttttttttggggatggagtctcgctctgtcgcccaggctggagtgcagtggcgcgatcttggctcattgcaagctccgcctcccgggatcacgccattctcttgcctcagcctcccgagtagctgggactacgggcgcccaccaccacgcctggctaattttttgtatttttagtagagacggggtttcactgtgttggacaggatggtctcgatctcttgacctcgtgatccacccgccttggcctcccaaagtgctgggattgtaggcgtgagccaccgtgcccggccacatatttttaatatatgtgtgtgtatacatattttaatctctcaatggccatcagagatttaggtcacagtgttaccatgctttagtcagaaggaaagaactctgggtcactgtgcaatttctggttggcttttggaagctgacagcctcattgctgatatcttcttcaggagcacaaagtctctgactgggaactgctggctacatggatggagagcccctctccagctctaatactctctgtgttccatgcctctgggttatcagcaagaagcccagctgctcggcccataactcagatcagttagcatataaactccagaaaataattgccctcttaattgctactgataccatgtctcgaaccaggctttgttcaaggtgggacacaggtgggacacaggcttggttcacaggtgggagggtgccctgtgcaggccgtgggaggataatttgagaattcccttgcctgtccctgctccgcggttgctgggcacctggcgagagcgttgggttgtttgctttgggtaactatggcagatccttttaattgccaccaaataacttcagctcaacctcgtcagtggttgttttgctgcgtcgctcggaagaatgcctccctctttgtaagagctggatggatgggagcttggcagaggcaggccaatgctctttaatgttttccttcccatttaataagtgttgagtaaaacttgagtttagggtgtttatgtggcacaaaaggtaaaccatttgtggtgttttggaacctgggctaagtgtttctcacacacatcctcatgacatggtaatgactacctttgtgttaaacttgggtcactgtcaactttcttctgaagtgctccctgctttattttgggggcaggggtgggaaaggaatgaggtgagagaaggtgaggtgaacatgggatgccgcacgggggcattgtcctcagtcggactttctagaaaaaggcatcacgcggcctggagacaggaagggagagattttaatcatctgctgtggcttttgctcttctgacatcagaatggtaggaggccctgaacttttgacctctggctccaggtccataaatgtcccgaggttcccaggaaaaggaagacttgttagatgggaaccctgatgtttgattagagcagcttttagtcactactgtcatgtgtttgtttattcaggcaccagttgcatctgagtagtggtaggtcctggagacaggaggcacagcctttactcatggcctcatggtaaggtagagtcatgcagaacatttaacgaaagtatggcttggccgggtgtggtggtgactcacgcctctaatcctagcactttaggaggctgaggcaggaggattgtttgagcccaggaattcaagaccagcctgggcaacatagcaagacttcatctctacaaaaaattaaaaaattagccgggcacggtggctcacacctgtaatctcagcactttggaaggctgaggcgggcagatcacctgaggtcaggagttcgagaccagcctggccgacattgtgaaaccccgtctctactaaaaatgtaaaaattagctgggcgtgatgacaggcacctgtaatctcagctactcgggaggctgagacaggagaattgcctgaacccggggggtggaggttgcagtgagccaagatcatgccactgcactccagcctgggcaacagaacggaactctgtctcaaataaataaataaaaaaaaaaaaaaaaaaaaa

SEQ ID NO: 24615 - DNA, 6671 bp, Homo Sapiens
aacaacagtttttaattgcctcttaaaataaactttattagaaatatttacctagatatttttgttttcttgggttagattagtttattatgaaatattcactttcatttggaatggttaggaagtttataagataccattcttcttgactgagcatccatagctctatttgtttacttgctcaggcttaacgaacatttgaagaaaaaattaatccaaaacaaagattcttaaatttttaactttgaatattaatagagtaagttattctattttttcttttcttcttaatttttttaagagaaattggtaaatacttgaataaacttgtatgaatgaattcaaatttcttaaattccctattggctatgctagaattgctacttggaaagttttctttttttttttttgtctttttttttttgtaagttgttttcttttaaacacattaacttttcttatgcttaaatatggcatttctcttcatacaagtatttttgaatttcttagtccatattgaaaatcgaatttgaagttcacttcacatacattaaattacccacatgtattcatctataaattgactcagtgctgagaaatgtatcttttagtttctaggtaaagttaaaattgaaagataactggatgccagttttctggtttaaattagaaagcagtgggagtttctgctttatcctggagtaaggacacatctcatttaaacagtatctcattccatcctctttattggattttctttttgtatgttttaatacatttttgatagtgtatttaggatttttatgagagtatacttaaaattataatattcccatactgaggttggaacttactaggtattgaatgttttaaaaaattgtattttaaagcatcttgcagttaaatatattttattatgagaagtgggatgattttgtttctatcttttagaaaggaatgtatacttttgagaaatataacttttgaacttaaaagctgtgtgaaacttaccagagaatctttactaggaactgtcacatccattttgcaagtatttcagactaacgtttaaagtaaactgggaagggaagtaggccaggaagataaattgtattttactcaaagggtggggttttacagcttttctcattgagttgaaatttctgttaggagaaggggttgtgctagcgtttattcttttggtagttcctcacagctctgtacatacaggtaagttcacgctgttcgtaaagcttttaactggcagtagtgaatagttgggatatgaggagaattacatttgagacaagctcagaatatgcactacataagaataagcattttaattgtgccaagacctttggtttgaaaatcaagaaggagttatcgttgtccagcaacctgtgagtcttgtacattggttagtgtagaagttaatcccagtgcctctagagcacctttctgaagagttttctttttcttctttttaacataatggacaatcaacgaagtatgtaagaaccattactgtttgctagcctcctttaaagggaattctttattgagggctacaataaatatgcttattcaccttgggctgcttttaagctgtagatttaatattataaacgatctttaaggtgggtaatttctcagttgttcactgggtatgcatcaagagttttaactaaattttctattttccttaaattctagaaagcgaaattattattgacgatggacaatttggaatccacaatggtgttgaaactctggattctggatggctgacatgtcagactgaaataagattacgtttgcattattctgaaaaacctcctgtgtcaataaccaagaaaaaattaaaaaaatctagatttagggtgaagctgacactagaaggcctggaggaagatgacgatgatagggtatctcccactgtactccacaaaatgtccaatagcttggagatatccttaataagcgacaatgagttcaagtgcaggcattcacagccggagtgtggttatggcttgcagcctgatcgttggacagagtacagcatacagacgatggaaccagataacctggaactaatctttgattttttcgaagaagatctcagtgagcacgtagttcagggtgatgcccttcctggacatgtgggtacagcttgtctcttatcatccaccattgctgagagtggaaagagtgctggaattcttactcttcccatcatgagcagaaattcccggaaaacaataggcaaagtgagagttgaccatataattattaagccattaccaggatacagttgtgacatgaaatcttcattttccaagtattggaagccaagaataccattggatgttggccatcgaggtgcaggaaactctacaacaactgcccagctggctaaagttcaagaaaatactattgcttctttaagaaatgctgctagtcatggtgcagcctttgtagaatttgacgtacacctttcaaaggactttgtgcccgtggtatatcatgatcttacctgttgtttgactatgaaaaagaaatttgatgctgatccagttgaattatttgaaattccagtaaaagaattaacatttgaccaactccagttgttaaagctcactcatgtgactgcactgaaatctaaggatcggaaagaatctgtggttcaggaggaaaattccttttcagaaaatcagccatttccttctcttaagatggttttagagtctttgccagaagatgtagggtttaacattgaaataaaatggatctgccagcaaagggatggaatgtgggatggtaacttatcaacatattttgacatgaatctgtttttggatataattttaaaaactgttttagaaaattctgggaagaggagaatagtgttttcttcatttgatgcagatatttgcacaatggttcggcaaaagcagaacaaatatccgatactatttttaactcaaggaaaatctgagatttatcctgaactcatggacctcagatctcggacaacccccattgcaatgagctttgcacagtttgaaaatctactggggataaatgtacatactgaagacttgctcagaaacccatcctatattcaagaggcaaaagctaagggactagtcatattctgctggggtgatgataccaatgatcctgaaaacagaaggaaattgaaggaacttggagttaatggtctaatttatgataggatatatgattggatgcctgaacaaccaaatatattccaagtggagcaattggaacgcctgaagcaggaattgccagagcttaagagctgtttgtgtcccactgttagccgccttgttccctcatctttgtgtggggagtctgatatccatgtggatgccaacggcattgataacgtggagaatgcttagtttttattgcacagaggtcattttgggggcgtgcaccgctgttctgggtattcatttttcatcactgagcattgttgatctatgccttttgggcttctcagttcaatgaagcaataatgaagtatttaactctttcactacagttcttgcaagtatgctatttaaattacttggccaggtataattgccagtcagtctctttatagtgagaaaatttattggttagtaatataaatattttaaactaaatatataaatctataatgttaaacatatgctcattaaaagcatagcactttgaaattaactatataaatagctcatatttacacttacagcttttcatttgatcaggtctgaaatctttagcacttaaggaaaatgactatgcataattatacctgaccatgaaaaaaataagtacctcaaatgcatgcatttgcactggtgattccaactgcgcaaatctttgtgccatcttgtatataggtattttttacatgggttgacatgcacacaacaccattttcattcagtatgaaccttgaggctgctgccatttttccacttaaccaaaccagcctgaaggtgaacctcgaaacttgtttcataaatctttcaaaagttgttttacatcaatgttaaaatttcaaaatgctgcagggtaatttaatgtataaaatattagtaagaaaaagtatgtattgcatacttagtagaatagatcacaacatacaaattcaattcagtgcatgctttaggtgttaagcatgagattgtacatgtttactgttaggtccttgcatctgtggtgctaggtgagtatgagaagatgtcgaggactggacgtattttgttgcctaaaaaaaaaaggctgtttgtaggcgttttaaatatgcttattttgtgtgtctctcactacctattacacactgttgctttgtgggtttgttttgtatgtgcgtgtgttatacagtagttaaatttccatgcagaaaaataaatgtcctgaattctcatattagtattctttattgtatatcatgcatgtaatttatttagaaatgtaggtcttactaaatgtatatgcatgtatttcagattatactaggatttcttggattagaagctgattgtgttaactgtaacttaaagaatgaatggtaaataaaatgatacagatttattttcttcattacaaaatgaaatttcaagaaggtgttacttttgtagaatggttttataatatgacaagaaattttaatatagtgtctaccctaaagggatggcttatttgcatctaccttttactgcatgtttttcacaaggcagtttattcatatattgacatattttggtagtagctgagaacctaagacttgaaattatacattgtgtagtattttttaagctaagcaatgcaattttggtcagatcttatttgtgtgaagataggctctgaaatcctatggtattgcgtttgtaacgttgatattaatgcaaaatagtttaggaaatggagtcttctgcaagggttctgtatacttttcccacattgtatgagattttccaaaattttggtgtgaattgggcacttttggaaaactcctgaaaaagaattagtttccttcatctgcagacctttgtccaatacggttaccatttctttatagtaactcgattagccatatatgtttgtttctagtcctgctcctttgctcctctcctatgccttcccagtgctggctccattttgaagactcaaggacagaggggaagcagatcataaagagaaaaaggagacagaagaaaggatgaaggaaggaggtcatggggagtgtggcttctgagcagtttagttgctggggagagcagacagtcactgcctacaatacagacagaaccttcctgctcactttctgtcctatctcttcctgaccttatgaaccagtgttagtagatgattaaaacatgacaagcaatggctccttattttcacaggactaagtccgggccttcgtatcactagctgttgccttttacaccctgcttcagccaccctgtccctgtcattggccctggacttcctctctgtgcccgtgtgtcctctgcctgggagccctctcctcccatagtcactttctctctgccaaactcatttcttcttgtgcccaagacctctctcctgagcccctgtggaaactccaggaaggatgaatccgtctttgtgctccacggctcgtaccttgatcaggctgtgcatcacagtaattccgttctaggtaggcagagttgatctttgtctcatctgccaggctgcgggctcttcaagggcagggaccttgtcatagtcatttttattttcacagtgcttggaacatggtggaaaatgaatgttggaattattggagtaatataatttgtatcaaatgtccttttgaattaagagatttagttatgtttactaagaatgtaaactttgaattggtttgcattttaacaattaggatggtttattgatgtgaattttgaaatgtagaggtataatgttaaattattttatactttatggaaatcaagtgaaatgtttgaaaaaatgccgccattatcctctggtattttctactctctggaattatgtgctgtaaatgatcggctgtaaatgtgaggcacaccacccacccctgtgtggaaagtgttgtggcgcttcctgccacccacccacctctctgccgttgctccttgtgacacttgtctgtcgtctcccatccaaactccaagcttacagctacctcagtactgctttgcttgtctgaaacacctcctttgccttccttcagtgtcccgctcaggtgcagcctcctccctaaagctcatctcagcttttgatctgaatgatgatggaaacatgcagacagcctctcagtcttactatttaatgttgtagctgggaaaaaacccagagaggttaactgatatactgggttgggactaggatgtgggttttgtgactctgaatcccatgttctcaaactacgctgccttccgaagtctggcatttgttagctcatgcttccttgtagtccagcttcttatgtgcctgttatattctccagtaagattgtaagccccttaagggcagggacgtctttgcatctctagcactgctatagtgttctatccttagttatgaactagataaataaatggtggtggcaacaataaaaaaaaaaaaaaaaaaaa

SEQ ID NO: 24616 - DNA, 4954 bp, Homo Sapiens
cggagggcggaggccctgagcccggcgagcaggagaggaggtcttccgggccgcggcctccgagcgcgcgggatttgcagttggccttggcagaattgtatgaagatgaagtgaagtgcaaatcttccaagtctaatagacctaaagccacagtcttcaagagcccacggacaccacctcaacggttttactcaagtgaacatgaatacagtggattaaatatagttcgaccttcaactgggaaaattgtgaatgaacttttcaaagaggcaagggaacatggggctgtccctctgaatgaagccacaagagcttcaggtgatgataaatctaagtcatttacaggtggaggatacagattgggtagttctttttgtaagcggtctgaatatatctatggagaaaatcagctgcaagatgttcagattttgcttaaactgtggagcaatggtttcagtttagatgatggagaattgagaccttacaatgaaccaacaaatgctcaatttctggagtctgttaagagaggagagattcccctggagcttcagcgccttgttcatggtggccaagtgaatttggatatggaggatcatcaggatcaagaatacataaaacctagattgaggttcaaggcttttagtggagaagggcaaaaacttggaagccttacacctgaaatagtcagtacaccttcctctccagaggaggaggataaatcaatacttaatgcagttgttcttattgatgattcagtgccaacaacaaaaattcaaatcaggttagcagatgggagtcgtttgatacaaagattcaatagtacacacaggatcctggatgtccggaactttattgtacagtctcgtcctgaatttgcggctcttgactttattcttgtgacttcatttccgaataaagagctaacagatgaaagcctgacactgctagaagcagatattcttaacactgtgttactccagcaactaaaataatattgttcctgtccatgcagtagcatgtgggaatagatgatgtgccgtattaataaggacaatacttcagcattaaaaacagccaaattatttttattatttttacagataaattttggttttattgttattctgtcttccaatctgaatatagacaaatttggattaggaatagaccttgagataagtatgtttgagtttttagttgaaggactggcttatgttgatagtttttggatttctaggcaaatgagttgttacatgcttagtgttaatgtaacaacatttgtttgcagagaaaaatgaacaaaacccctttttgataaatgcatttggtaaaatttgcactaaagtttcttgatgcagcattgaccaacagccattaagaaatcttttgatcaaataagttgaaaatttgtctataatatatactgaaacgtgtcttttgattttgaaattgtttgatcatacaataattatttctcctattaagattttacacatcctttttacttactgatttagatatattactagtatcagaaactacagttttgccttgtattttacagaattatgactgttgtgaacttaaacagaaacacataaaggtcagcaattcttttttttttttttttttgatatggagttttgctcttgttgcccaggctggagtgcaatggcataatttctgctcaccgcaacctccgcctcccaggttcaaaagattctcctgccttagcctcccaagtagctgggattacaggcatgcgccaccatgcctggctaatttttgtacttttgctagagacagcgtttctctgtgttgatcaggctggtctcgaactccgaacctcaggtgatccacccacctcagcctcccaaagtgctgggattacaggcatgagccaccacgcccagcctaaaggtcagcagttcttaagaagatatggtaaacagcaacaatattttaaaatcaagtaattacagttcctcccagagcttgcgttgatcacattcatttattcattcaacacatttttctaggaaactcactgtatacactaaacactattctgtgtgctcaacctagaatgtcttctccagaacaagactagtgtagaaatacaggaatgtaaattctgtcagacggactagatctaaagaattaccagcataaatgtttgcatttctgctgaagccagaagcttttccttcttcctagacaccatttcatccttaattattacttctggttagttttccattgccaccataacaagttacaaaatgtggcttaaaatagcacaaatttattatcttcacaattctgtaggttaggagtccaggttaagagtttcgcggtgccaagatcaatttgttggcagggttgcattctgttaggaggctctacaggagaatcatttccttgtcattccaccttctacaggacatcctcattccttggcttgtgacctccttcttccatcttaaaaaccagtgctgtttcatctctatgacccttctgttaccacatctctctgacaccagtgtggagaggttctctgcaggactcatgattaaatgaggcccaccggatatccaatctaggcttatctccttgtcttgaaatccatagtaaccttaattacatctgcaaaatctcttttaccatctaaggttacatacaggtttggagattaggacattaacattttacatggaacattattcttgcctactacagttcccacccaccccccaccccactcctgtgttaaagattcagattcatcacaaataaatttacatcactcataggtgctcaaaagtcacaatccattattacagcatcaactctaaatccaaaatcttatctgagtctcaccaactcaaaagtctcaaatctcacattgaagccatctaaattaagtttgggagaggatctgtgtgtgatttctgggacataattccaactgtgcacttgtgaacctagaaaacaagttatctgttcccaagtatgatggcatgacaggcagacaataatagttacacacgttcctgttcaaaaagcagaaacagatggaaaaaggagccatcagcaccaatcaatttacaaaaccagcgaggcacccttctttaagtttcaaggcctgggagtaatcttcagctcactgctgttctctgggcttgttgactgtctcagagtcatctttactttttcacaaaaggtagcacacgtttgcagctgagtatcaacttatcagtttgttcttcttttatattctctaaagctttctgttaaaaatggtggtgcttctgctgctatagcgttgtcaagaaacttgtgggtcttttacatatgtcacagggatgcactcatttagataggaggctcctcacgtatctttcctggaaaatcctgtctctgtttttggctttttctgaaatagctgagaggatctatgattcacacccttaatatcttcaaagagtcttgtgtgtgacctgatattcagaccttttgatgtttctgaagtattagcaaaaggttatacagccatatcttcatcactttctctagagtaaaggctgtcctgacggtgaatcttagttttagtggcttttgccatttgaataggccgcgaatttcccaaatcatcaagtcctggtttctttatatttaacaggtcttccctcaatctacctctttccacattttactataatcagcaagaagacagcaggctgtaccttccacagcttgcttggaaatatcctcagctaaatattgaagtcatcacttaaaagttctgctttacacataacggcaggacacaactcagcttagcttttcgccactatgtaacaaggactcctttcctccacttctccagtaacatattcctcattttttaccaacagtctattcatgatgatttagatattctatggcaatcgaggtattctctattatgctcctttcttcaaggccgccctagcattaacattccatatttctactaacagtctgtttaaggcagtttagcttcttttctggcatgctcctcagaattcttccagcctccacctactgcccaattccagagccacttttctacttttaggtatttgttacagcagcacctcaagtacctagaaaactcttttatgcctgcttctctgccagatgacttgaatatggtactagatttggaattcacctttctccagggtcactgtttatttcaaagaggtgaatttacctgtgctagggttttcacactgggagtgctaccagaactaccacaggatgaaagtggtgagcccaccactgcagagaagttttctcagtgccgtaatatagaggaattctcaaaataagccctactccttttcacttactgaaaacaacttggataatgtgtaacagccagccccatttcaaaaagattaccaggggtaaaacaactttttcatgggtcaaaatcatcttccgaagaaaatgatttcttaaaagaattgaacattgtaaatcaaagggcattgtcctgttttggattaacaaaacaggaaaaataaccaatccttgtaaaattatttgaaattttcttgtttttatcagttgagtgcctatagatgcacatacaaaaacaactgccatttttgtatataatagtcttccaagatagagatttacactaggagagaattaaacatccaggagggatgaacagtatttcatgtgtgctatgtagtgttttgcttcattgagagtcattttcatgaattatttttactactgcagtcatcttaaatttataatcatctcaaaaaagatgtcacaatgaacagacaaccatctgtgaggtcagtcattttgcatgatgtatgtaatcaaaaagtttgaaatgtctgcttactaataaagaatgttttcactcgaaaaaaaaaaaaaaaaa

SEQ ID NO: 24617 - DNA, 5342 bp, Homo Sapiens
ggaaggaaaaaaggaagtgtttggacgacagcgagcgggagaagcggggtcaaagggagcactatgtctgcggaagtccccgaggcagcctccgcggaggagcagaaggaaatggaagataaagtgactagtccagagaaagcagaagaagcaaaattaaaagcaagatatcctcatctgggacaaaagcctggaggttcagatttcttaaggaaacggttgcagaaagggcaaaaatattttgattctggggattacaacatggctaaagcaaaaatgaagaacaagcaacttcctactgcagctccggataagacggaggtcactggtgaccacattcccactccgcaagaccttcctcaacggaagccgtcccttgttgctagcaagctggctggctgattaagaggctgaactgcatgaatctgctaaatctcattatttctccttaatatgttacttatctactttttatttcctttcattcactagtcatttgagactgacagctttgcaggtagcagtagtgtgtgctgctattgtggaatatacgtgtgtagagtttttgattagtttaacagtgcactggtgaagaggacatgttagagcaacataagtaaactacttgaaaatagttgtatatattacctaacttctagtgtagtactggttctaacaagtaacaagcaagttttaaaattttaatgttttggctttcattacttcatcttaattatagctttgtatgttactcttatttaatataatctctattgtattgatttcttctgtatttaccttttggattttgtaaaacagaagtttaagaccacaagttagaagaaaggtcacatatttcaaacacaactagatggggctctgaaagatttgtatctctgtgcttgaacttgaatggccttaaacctgtttcagctttaacagtagaattttacttgggcaatatttgcccattctggtgtaacttatgtgactctagtgcttaacagctgccgttgaagctaatattcagttctgtagagttggaataccttttgttgttgaagatgtgaatgaagtatgcatgtgcattaactgttgaattcacttttgtgccatttttgtaaatacagtagttttgcacaacctctcacaaatgtctgtattaatttcacatacttaaaaagtagataatgtgccaaccagaagcacaagagttcctacacaaaactctgtaaatcattatagcttttgtataataagagtagtttacaatctcgggcttatagaataccaaactgaaatcttagttcaatctgccatagacttaagcttttcatttgttactaatatccatgacattcagtggccttgtgcaaatacgatatgttgcttaggcatatcttttgtcctatgcagaacctttcattttgatttttatgaaagttgcaattcatgtgatttatataaactttttaaatgtagaaactttttacttccacactcagttttggagaccctagaataaaaggcttcaatactctgcattccatgccctctgccacctgcttttttttcccctttgttctttgactcaaatggtattgagctgtttgttgtatatggaagcataggtgtctatatccttactcttttatataacacaataatggcgttttccttctaatttctcagttgttaacttctttctcttttttttttaggatagggccttgctctgtcacctgagctctagtgcagtagtgcaatcacagctcactgcaaccttactcctaggctcaagttaactattcttgatcctttattattactaatattctacaattgtttaaataaaaggaactttataatgaaacggttcggaatactggctcaagaacctatgtcaagatgagctgaattttggtaaattattttaggaattatgacaagctaattgaattaggcttgtgacaattagagtaatttacatgacaggtaaaactcctattaaaaatgtttagatgtttgcttctgtagatgtcactttagtaaaataccaatttagttttacttgtggcttatctagttagaacttagcagactttactgggacaagtttactgctcttgtaggagctcctctcacaagtagttgtaatgctgtagcatgatactcaggatcagtagcttgagatgttactatttttctcttcatctttgacttgcagagagcctcccgtttttggatccaggcatcttttctgaatcctggttccatcagtatacctgctctcctatgaccccaaatcatagtcaatggtgcctcaaacatagcaccttaagttaaaggctgcctagtgctctgaggaaagcttgctgattatcttcctgatctactcaccccaaaaggcagaaaagcaacacagtcactgctgtggtcatttgtaatgtaaagatcagttatatatatatatttgtaatgagagcaagtatatactcattatagaatcaatttaagaagtttaaaataacccagagtagaatttctatatctagtcttggtttttttcatgaatatttgcaagtaattaccattaaattcacacatgaaagattaatctgaaagatcagagaccatgttattcctgaccacgatagaactgctcctgtggtttgggacaagtaataaaacaactgcttgagttttgtttgtaaaatacataattaatatttgacctacctcaaaatgtattgaggatctgtgaaatgctaagtgcccaaaataaaatattgctgattgtctttttattaaaagtaaatttcctcattaagccaacctgccttctgtaagtcacagtgcttaaatctcaggatttttcattaggagagacctgtcgttaaggatttgtagatataattgcttagcctccattattggtgcttgggatagagaggttttagatttttgttttttttttgttctgcctcaaagctcagtttattgaagacatttgtaagctattggatcatcacttgaatcaagattttgactagtgagcttaattgtccatttcttacaatttcaaagttacagtctcagaaatggttaattttaataactgtcctatcataaattaatgttggaataaattgaagttgttgataaatacttcatgaaaactaaagtctgaaataaattacttgttttatgtccaatagctactacatttgatagaacagttttgaggaacatttcattcttgaacgcagcatctgacatggttctcagcaagttggaatagtaaggattattggcttgtttcgatgagtggaagcggcatgtttgtagcatacaagttattcaataatcttgtgctgatgacctaaaaatatgtcttaactattcatcaaggaaagcctggtgaagcctttacttgttactacttcaacagttggaattagttgctctttttacttgatgaaacaaaactatacctctgaatatttatggatactttttactaaatcaggcttgtgtccttaatccaaattagtaaagttttatggaagctgaaatgtaatacagtagtctccccttatctgtaagagatacattccaagacccctagtggatgcctgaaacctcagatagtactgaaccctttatcaactatgttttttcagtctgacaaccaaggcggctactaagtgactaaggggcaggtagtatacagtgtggataagcaggacaaaggggtgattcacatcccaggcaggacagagcaggagatcatgagatttcatcactcaggatggcttgtgatttattttattttattctttttttttttttgagatggagtctcactcttgcccaggctggagtgcagtggtgcgatcttggctcactgcaacctctgcctcctgggttcaagcagttctcctgcctcagcctcccaagtagctgggattacaggcgtccgccaccatgcccagccaatttttgtacttttagtagagatggggtttcaccatgttggccaggctggtcttgaactcctgacctcaggtgatccactcgcctcggcctcccaaagtgctgggattataggcatgcgccaccatgcccggccggcttatgatttaaaacatgaattgtttatttctggaattttccacataatatttttggaccaaggttgcctcaggtaacaaactacagaaagtgaaattgcagataaaggggattactgctcctctgctctaaaattggtgtttgggtgatcagaagcaggtagccaatgggaagagcacttctgagtgataactaaagcagtttggtggccttttcacattctccaatgttcaaacatattttccactttccattttctctttcacctcattttgcctctctatcccccatccctgcttatttcttaagcccattgatggcactcattaaattgtatttagggctaatgagtcattgttccttaatatcgttttcaatatgccacaatttaggacacatttaaaattttctaaaaccatatcctaatcaatattgactaatttgagccacattcccaactctaactcagcacacactgccagtcttccccaatatctgtctcctctcaattccccaccacaccttataaaattgtaatcaaagatatctcactctgtcattgttaatctaagaataaaaacactgactttaatacggttttactaagtttcaaccttctaattaggtaggcctctaggtattctgcagatcactgctggtcttgatagccattaatatatgtttgtattatgttatttttcaactaaatcgcagttggaaaaaaacatatttaatattatgcccttggatctgttactgcatcactagcacttgtgatgcaatagaacacttcgcctgtactgaaagggccaagagtaaatgccttgttttgtttttttgttttgttttgttttgctttttgttaaaacatgtctatagagttggcagttaatgctgaatttgtcaaataccccttccaaaattatacttgtatttaaaaaataaatggatctacctaatttctattgatttaatttgcagttttgtcttattaaagtggtatgtttttcagtgtattttttctgaagttgatctctttacatttcagctattactgtatgcaggaagaaactgacttgtaatctttgattttttttttttttttgcatttgtaaaggctttgtacttaaggtaggattaaatgtttgcagattgtgaaaaaaaaaaaaaaaaaaaaaaaaaaaaaagaagaaaaaaaaaaaaaaaaa

SEQ ID NO: 24618 - DNA, 5841 bp, Homo Sapiens
caaagacaagctacaacacaagagccagccatgtggattactaaaagatgttggcttagtaaaagaggaagtagatgtggcagtcataactgccgcagaatgtttaaaagaagagggcaagacaagtgctttgacctgcagccttccgaaaaatgaagatttatgcttaaatgattcaaattcaagagatgaaaatttcaaattacctgacttttcctttcaggaagataagactgttataaaacaatctgcacaagaagactcaaaaagtttagaccttaaggataatgatgtaatccaagattcctcttcagctttacatgtttccagtaaagatgtgccgtcctcattgtcctgtcttcctgcgtctgggtctatgtgtggatcattaattgaaagtaaagcacggggtgattttttacctcagcatgaacataaagataatatacaagatgcagtgactatacatgaagaaatacagaacagtgttgttctaggtggggaaccattcaaagagaatgatcttttgaaacaggaaaaatgtaaaagcatactccttcagtcattaattgaagggatggaagacagaaagatagatcctgaccagacggtaatcagagctgagtctttggatggtggtgacaccagttctacagttgtagaatctcaagaggggctttctggcgctcatgtcccagagtcttctgattgttgtgaaggttttattaatactttttcaagcaatgatatggatgggcaagacttagattactttaatattgatgaaggcgcaaaaagtggcccactaattagtgatgctgaacttgatgcctttctgacagaacagtatcttcagaccactaacataaagtcttttgaagaaaatgtaaatgactctaaatcgcaaatgaatcagatagatatgaaaggcttagatgatggaaacatcaataatatatatttcaatgcagaagcaggagctattggggaaagtcatggtattaatataatttgtgaaacagttgataaacaaaatacaatagaaaatggcctttctttaggagaaaaaagcattattccagttcaacaagggttacctaccagtaagtctgagattacaaatcaattatcagtctctgatattaacagtcaatctgttggaggggccagacctaagcaattgtttagccttccatcaagaacaaggagttcaaaggacctgaataagccagatgttccagatacaatagaaagtgaacccagcacagcagataccgttgttccaatcacttgtgctatagattctacagctgatccacaggttagcttcaactctaattacattgatatagaaagtaattctgaaggtggatctagtttcgtaactgcaaatgaagattctgtacctgaaaacacttgcaaagaaggcttggttttgggccagaaacagcctacttgggttcctgattcagaagctccaaactgtatgaactgccaagtcaaatttacttttaccaaacggcgacaccattgccgagcatgcgggaaagtattttgtggtgtctgttgtaataggaagtgtaaactgcaatatctagaaaaggaagcaagagtatgtgtagtctgctatgaaactattagtaaagctcaggcatttgaaaggatgatgagtccaactggttctaatcttaagtctaatcattctgatgaatgtactactgtccagcctcctcaggagaaccaaacatccagtataccttcaccagcaactttgccagtctcagcacttaaacaaccaggtgttgaaggactatgttccaaagaacagaagagagtatggtttgcagatggtatattgcccaatggtgaagttgcagatacaacaaaattatcatctggaagtaaaagatgttctgaagactttagtcctctctcacctgatgtgcctatgacagtaaacacagtggatcattcccattctactacagtggaaaagccaaacaatgagacaggagatattacaagagatgagataattcagagtcctatttctcaggttccatcagtggaaaaattgtctatgaacacaggaaatgaggggttacctacttctggttcatttacactagatgatgatgtttttgcagaaactgaagaaccatctagtcctactggtgtcttagttaacagcaatttacctattgctagtatttcagattataggttactgtgtgatattaacaagtatgtctgcaataagattagtcttctacctaatgatgaggacagtttgcccccacttctggttgcatctggagaaaagggatcagtgcctgtagtagaagaacatccatctcatgagcagatcattttgcttcttgaaggtgaaggctttcatcctgttacatttgtcctaaatgctaatctactcgtgaatgtcaaattcatattttattcctcagacaaatattggtacttttcaaccaatggattgcatggcttgggacaggcagaaattattattctattgttatgtttgccaaatgaagatactattcctaaggacatcttcagactatttatcaccatatataaggatgctctaaaaggaaaatacatagaaaacttggacaatattacctttactgagagttttctcagtagcaaggatcacggaggattcctgtttattacacctacttttcagaaacttgatgatctctcattaccaagtaatccttttctttgtggaattcttatccagaagcttgagattccctgggcaaaggtttttcctatgcgtttaatgttgagattgggtgcagaatataaagcatatcctgctcctctaacaagcatcagaggccgaaaacctctttttggagaaataggacacactattatgaacttacttgttgaccttcgaaattaccagtataccttgcataatatagatcaactgttgattcatatggaaatgggaaaaagctgcataaaaataccacggaaaaagtacagtgatgtaatgaaagtactaaattcttccaatgagcatgtcattagcattggagcaagtttcagtacagaagcagattctcatctagtctgtatacagaatgatggaatttatgaaacacaggccaacagtgccactggccatcctagaaaagtgacaggtgcaagttttgtggtattcaatggagctctaaaaacatcttcaggatttcttgctaagtccagcatagttgaagatggcttaatggtacaaataactccagagaccatgaatggcttgcggctagctttacgagaacagaaagactttaaaattacatgtgggaaagttgatgcagtagacctgagagaatacgtggatatctgctgggtagatgctgaagaaaaaggaaacaaaggagttatcagttcagtggatggaatatcattacaaggatttccaagtgaaaaaataaaactggaagcagattttgaaaccgatgagaagattgtaaaatgtaccgaggtgttctactttctaaaggaccaggatttatctattttatcaacttcttatcagtttgcaaaagaaatagccatggcttgtagtgctgcgctgtgccctcacctgaaaactctaaaaagtaatgggatgaataaaattggactcagagtttccatagacactgatatggttgaatttcaggcaggatctgaaggccaacttctgcctcagcattatctaaatgatcttgatagtgctctgatacctgtgatccatggtgggacctccaactctagtttaccattagaaatagaattagtgtttttcattatagaacatcttttttagtgaaagaatgtgccatattacatattgcaacctaatttgttaaaactaactccagcactaaagctgaaatgccacaaacactaaaagtatgaatatgtctgatttttgaaacacataagctttgctctttaggcaggaatgatcttttcaaatcattagcacaatatttaaatatctaaaaatttaagagatccatactttctgtagctttacaattaatttaagtactaaaaagacaaggatttcttttaagaaatttatagcatttactgtgttatttaaatgctaagccaaagtatctgcacttaggtatacctctttatgccaataatgattttaatgaaggctcttttcagatgtaaccttatgaaggaaatatctgctttgtgtatatgccagttagaatactggtttctaaagtctgtcaaattgtatttcagtggcacaaaaaccagttttgaggtcttagacttataattctttgaataaaactgataacttatttgtataattggagtggagacctacctccataattagataaactctttttggattataatcagaattttgccttttttcttctcaaattattacatatgtatgtattatatatccacgtatatagttttccctgattaaatggatattaaaataattgcgggtgcttcaggactttttgcttctatatttaagtatattgtttttatagcaagaacatattctgaatgttttataaatctttaataatttatatgtaggtaatatttttgtatcacaatgcattatttttttcctcctttccttccaaactataccactgtatttaccacttctaagagtgactgacgacgggccagatgacccttgaagtagtcattatgtagcaataaatgaagcctgaaacaggtttttttacttccactttaatccttagaaatttcttggcaacttcgcatattttcattgacaccggtgtataagtataaatttaaatgaactaattacttttgcatattttaaattctttatatggtagttattttttataacaggatattaacataagttaaatcctatgtatttgaaattgttacagagctttcctctttacttcaaacagcaaaaaagtggggggcatattgtagtcctgtcatttaagttatgtaaaaaatctaatcattattttgatgctttaaacattctcatgtgtaatatatgtttttgtatcaaaaacactcatatatttcaagaaaaagaaattatgttaaatagccctgttttaagaaaaatatttatgaagcatctcaacttgaagatcaagacaaagttataactcaggatctgaggtctcaagctaggagagactgagaattttaatcagtttgggcatatagtttggactgaatcacatctgtagtacttagccaaagacaatttggaggagaatatcagccttctggaagtagctacttcctgaacaatgtaaagtgtcgcagatattcaataaaatggcaacctgttataatttgtgaaatttattgaaatggtgtaagatgaaaacaattgcatatcaaacccaatttatgttttctaaatatagtgtatgtattctgccatgtaagtaattgaacagtcttaaaataaccaaatggtagagggctgttccatgatgggacagctttggacttgttttcataaaatctctacattcaataaaaattggaattatgtgcctgaagtttggaggcacattttgaagtattctttgtagacatatagtatgtttctggatgtgtttgttacttatttggtcattggtacttaatttgaaattttaattttttaagagaagaaatagaatggttctttgtactcagtctgcaatgatctatttttggcttatgtcttttaatactactctctttctctgaattttgaaatatgaagtaaaatctagcccatttgttttatgcgaaaaaaaaaaaaaaaag

SEQ ID NO: 24619 - DNA, 4991 bp, Homo Sapiens
gactagttctagatcgcgagcgccgccctttttttttttttttttttaacagtcgctgtggaattttattaagccatcaaaatttccttcacactcaatactgttgaacaacaagataacacatcttcttgctcatcccacttgaactcaagtcatcagttttaggcacaaaggttttagttttctcgggaaatcaagttttaaccacttgaggttactactgcagcaagcagattttgttgacaaatgtgaacagctttcaccctctgttagtacaaattaatatcctttccttaaataaagttagttagctatttttggtttcaaaatcagtttccatcataaaataacagcaagacactgtacacctttacgttcaatactagaaatttcacccagtgcatcagcatctgtgcggcattccctcagcacgggctctgctggcgggcagcaggggtgctgagctctctctagtgcgccctgtgcagccacaccactgctgtcaccacatgtccctctgacggcagaggtggtataagcagcttcaccctggcccgactgaaggctgtcatagttgtttttcatattatgcacaataaactgtagcacaataatcatgatataacaactgtccagcaaaaataaaagtattttacatttgattatcatacaaaaatatgcacttttctatttttaaccattattaatagtacctaatatttttaaacttgtaaattaacaacaataaaatactacaagagttaaaataaaataaacgtgaaggaagaaaattacagagggaaaaatgctcaatccaaaacatttagtaataataaaaaagcagctaaatgaaaaagggagaattgtgattacactgtcaatggcaggatacgctgtggtgttataaggagattgggtctggtttctaatcaaggactgtaaaatgtttaataattctatttgtataaactgaaactagcccttattttctaggcaacaagttggcaaaaaccttgggtttacccataaagtgaatttcttaagatattttttaagaactcctgtcctgttatatccagagacattatcaaattttaaaaggcaaataattcaaaaagaaacagctattcagtacatataaaggtaaaatacagttatcttgaaaacacttgttttagaaaaggaaataagctaactagacactttactataaaaattttccatatcttaggatggcagtttaagaaacagtcaaatttgaaagtatccatgttttaagcggggaatgaggagtgtgggggaggtggtgccccgtttcactgctgtaagaagcttcagctttgaccgctacagtggtaggtaggctcttgtcacacagtttggaaatactttactttagagagattcagatcaagcaaacaactgtgtctgctcattctcctcaactttgctgtccaaagttgggggctgggggagcacttctgtcgctattcaaatggcagtgttttgagagaatccatttttttatttctcctctattcctaagcattaggaactatgagagaaggacatctgtgcaggtgcccaactcgtaacctcattagttatttccagggggaagtgccagcaatagtttaccacactggaaatactgatggccaagcccagcacgcctcccagcaagccttgtttgtttttgagggcgagttttggcatagatggcactctcctgtctacagcatacacctctgtggaatcagcaccccagaggccactccccagtggctttcagaggaacaagactctggggactcctggctatgaagcttagtatgaaaagcctatttcaaatatgcaatgggattttcccaccccaattttaaaaagtgaaattatattttcttctgtaatatttgtatcccaaagtcaaaggcacttctaagtttaattatctgcagcaaatgctttaaaattaacagtgcatatcattttaaagttgaccctatgaagttaaaagcaaactcatgatttcaaaacacagtgatctaaggttccaaagaaggtgatctaaaatcataaattctggccccagaacactgaaccttcatcaggtgagttcaattagagatgacagaaagtaaccagaaaaatacatgaatacttcctaaaacctgctggaggttttatcagatgctcctaaaaatgacacgaaacacaaatttcctaactttcctgttgtctgctgcctggggctgctaatgtgactgactatcagatagccttcaggaggtggtaggaaaaatggatggagacaaaaatgtagcagacaacatgaacagtttgatcacggttacaagagccagacctgtaatgacagaaagaggacaggaacaaaatttacatctctcttaaaataagtgtgaaagaagcatgattcaacatgtttttaaatattagtgcaaattccaactattattcttacatataaagttattagagattcaaacgcctaggttagcaatgttaattcagaggaaaaaagttgacagcttccctcaaaatgttcagaaaacaccctattttagtcttcatttgctaatgtctcagtagacaaccatattttggccccacttaaaaatttgcttaatggtgttcctaaaatgcttcgtctgcacagattccctacaggagaaaatggaaatgaggaggagagaaactccggtgtccccgaggtgtcggtgtggtgagggccgctggcgttgaagtacatcctgctctggcccagctccccatagcgggcctccagggggccactgcgctgttgccgcagcatcctgctcagtacgtcgacttcatcagccaggagggagagcttgtgaaaggctgtgatggagccacccaggctgatctgggcctcgggaacccagcggaagtagcacagtttccacagttttatgtgtgttccagagacacgtggcagaataacaccgtgcaggttggcgggtttggaaaaccattctctaaaatactgctccgtatcactgttctggctgtcggtttgctgagctggatctggctttggttttaatatcaatgaatttctccttggaagtaattcttggtcactgatgattccattctttaaggcagacggcattcctcttagtgtggagctgtagcttttctttgtccgtttaaaagacttcacggagccattctgtatacaaggtgtgctctttccaatgtagaaggggttatggaaaagggtgcgatcctttgctgtaaactggagagaccagtcccaaacagaggggaattttaagcccttctcatcacccaattggatgtttttgcttatagcaaattccgtgctttgcttcactcgctggtgaggggagttgaacaggaaggtgccaaacagtgagatccgggtgctgtcatacaacactgccaggtaggtttcggagaactcaaaagctgcaggatattgttctaacagctgccaggtggcatccaagaatagcaaaaataaaggagactctttctctgatctctttagatggttgcatctgtctagaaactgatatcctgccatgacccactccttctgtatcagactctgaaatccagtaattgtcctaaaatagggatccagcatcacttgaacaagagaagctacacaacagctcaagtctcttccttcctcctcttgtaggactacagagagatgtttgctttctagcatgtatacaagttctgctgaatgcttaaggaatgcccttacatattctaaccatcgagtattttccagtgaagataaccatttctcttcagtttcttcaaaaggctcattaacgcatagctgcttcagttttacaaatgctgcctgtacttcttgaatattaggcaaggtcttatccaaatctgatttgtaaacatcacttctctgtgggtgacttttagttattgcattacaaatcctctggtcaatcttcctctgctgcagcacgtctttgatgagggccattcgcacaagagcactgccgttagagtggctccagcaccagagtggcatccttctcccaacaaaagaatgggaaaagatctttagatcttggtctgctaaagaacttggcactacaatgtattctggaaggcaagtggatatcatgtaaccctcgttaatagaacaaactctccacccggaagcacctgtcctcttgatttctctgtcccaatccgagtaagtttcaaagagtggagttttctggctgctgccaccaccagctccattacctcctcctcctcctcctcctccatctcctgagggaattccattaattttgtttgctgaattgtggtattttttcccaacatattcaaatgcaaagagtagctggaggtctgttggctgggaataatgagctattgcaaggcatacctttttagcactttcgggacctgattcatcaaagcgaaatctgacaattctgaaatctttacaataaataattaactctgttggattaaatttcagtttctggttggggcctaggactttctgcttcctcttgtggtcgtttactgtgacaatttgttcaatacatgttaaagggacatcgtgttcaccaagaagaaggtttctgtaatggaatttctgtaatggcattgggtcatctgtaataaaggagattttgaagttactgcatatcagctttccccacaaatcgtactggcttgtgtctgttgcaatgcattttctcacaaaattgacttcatttacgacaatttctcctggcaaaaggactggctccagttttttaatcttcggttccgaattgatcttatcgtcagtctggggcggtggcaggaggtaggacctgaaggtgggtttgggcggcttgagggagaacatggtgccgccgccttttcgccccgttcccgtcgcgggccagtggcagcgccgacgcctccgggcgtaaagctctcag

SEQ ID NO: 24620 - DNA, 3327 bp, Homo Sapiens
ggcattcctttggcacaggatgaagaccagctcagctcttcagttgttgatcattgtctattgttctccaaacagtaaaccagtatttcacactgagattgtcggctgcgggtatattccaattccccgtctcctcatgaatatgaagtgaagggctctgaccctggaagtggttctaagcagggcaaaacggggtctcggaagtgtggaggctgcctaagttgtttgctgattccgcttgcactttggagtataatcgtgaacatattattgtatttcccgaatgggcaaacttcctatgcatccagcaataaactcaccaactacgtgtggtattttgaaggaatctgtttctcaggcatcatgatgcttatagtaacaacagttcttctggtactggagaataataacaactataaatgttgccagagtgaaaactgcagcaaaaaatatgtgacactgctgtcaattatcttttcttccctcggaattgctttttctggatactgcctggtcatctctgcctgggtcttgtccaagggccatattgccgcacccttgatggctgggagtatgcttttgaaggcactgctggacgtttccttacagattctagcatatggattcagtgcctggaacctgcacatgttgtggagtggaacatcattttattttccattctcataaccctcagtgggcttcaagtgatcatctgcctcatcagagtagtcatgcaactatccaagatactgtgtggaagctattcagtgatcttccagcctggaatcatttgaataaggacaaaatgttttccattatcaagacatggccatctatctaaatattatatcaactgtgtagacttgagggcaatattgaaatgatggtgctttctgcatttggtgtttatttgtaaaaaatttgcagtcctcactgcacatgcaagtataccacccttccatttagtatgttttttaagtaatatgcatcagaaacttcagaaatacttctgccctttgatcaaacaaatccatttccaagaatctgtactagggaagtaaataagaatatgagagaaacctttatgcaaatatgtatattgcaacattatttaatattctggaaaattggaaacaccccaaaattctaaactcagaggaaggattaagtaaagagtggtacatactgtaaatgttttctgatattaaaaaaaaaattaaataaaaaataaagagtactacatggttgtaaaattacagtcattacaaatgatgtttttaaaattatgaataatgctacatcaaaaagcaggttacaaattcatgtttactatataactatttaaggcaaatgaaacactaatagtcaaagtttaggatgaaaactaaatctaaaaggaaatataacaaaatgccaattatgcttggtttggggcattgatgacccttcttcccacttttctatattttccaagatttctttattgaatatgttttactataaatattttctaaactcatattttcactattaaaatttttttatttttccaaactttaaggcatatgctctttccacattcctcaacattatttgcaaacgtcatgaaatgacacttccatcaacattcaatgaggaaagtagtgatatagatgagccaaaaagagttttatataaacttatacaatctaaactcttgctcttcctttctgactcctgagggtgagtgtgatggactagaagaggtagccttaaaataagtgagcagctagggaacatgctcaatgggcaagagaaaatgaccactgaccagtcaatacctgtgtcagggggagttaccagtacctatatttatttttaaagtaattaaaaagtagaacacttacaaattttccacctatacatgccatgtcttcctcggggacagtagccacatcttatatatttcccaccatgcataggacccagcacacagtgaagccagtaggcactcagtgttgaatgctcataccaggttttctgcttcctgtagttaccctgctgagcactgcttccatcacaggtgcactgggcctcaacacttctgccatttccccatttgtctcctccatggacactgtcaacaatggtctgtcaacacctgctctgtgccaaagccagggagtaggctggggggatacggaagagaatatctttctccttgatgcctgctgtgccaacagccccctttaagccttgttcacagcctttgctgaaacaagcatcttgaaagcaagccatgttatacaccgcatgaccttcatgctctgggcccagctgactgaactggggcaggccccagagtcatgggcagcctattgtcttgctaatggcctctgacttagcctggagtaaaacactgtccaaacaagactggtggttattcaagcataagaatttgaactaggaagccaagaatgaagcaaccggaccattaccatcaaaaaatgattaaaggatgaagaaggaagccaacattcagagagtatctggttcatgttaataatggtatcatattaaaaggaagatacatgaacttctactccaaaagctcctaaaactgcctttgcccacaatgaacagtgtaccctaggcctggtttctgttcttggattcctagatagtctttcttctttgtcactgtgctgatcatttcagtaaaccccccactaaatcagtgcagctctgtttattgcaactaaaacgatccaaatgaagtctcccttttctagatgttgggttggagggatgctaagacaaagatgcttaggctccagagttttacagagcttcattcaataacactctactttccaaagaacttaaatatgaggtctgaaggacttggaccaagaggcaaacccaagctacagacaccatgttgcactcagagtgacctctcccctctgacagcccaggatttctctatcaagtccataagctagtcatatctaggaccatcttgttaaaaattctctcaaagtctcctcagccctcttgtaaacagacttctggaaggtccacttcatcagtttgttatatactttcagactgtctatctcttgtttagattcagcatggcaccgtacgttgaatggactgttaatagatgtttgctgaatgactccaccacagcattggacacatcaggggtacagccaaatgcagcatgatacctctatcaggaaaattaaattttaacacagccaccaaatattctatatttgaagagtatatgctaatcatgcaattttaagttaaaaaaaaaaaaaaaaaaaaaaaaaaaaa

SEQ ID NO: 24621 - DNA, 3020 bp, Homo Sapiens
ggcggaagtgagtcgacagacgaggcggctttcccggcagaatgctagcgcaggcgcaggggctcgagaggcctggacctgtggcgcatcctcagtgaggagggccgccctgcatccgtcgccggccccggtctccaggggcctcacccgagtcatgccccgctattgcgcagcgatttgttgtaagaaccgccggggacgaaacaataaagaccggaagctgagtttttatccatttcctctacatgacaaagaaagactggaaaagtggttaaagaatatgaagcgagattcatgggttcccagtaaataccagtttctatgtagtgaccattttactcctgactctcttgacatcagatggggtattcgatatttaaaacaaactgcagttccaacaatattttctttgcctgaagacaatcagggaaaagacccttctaaaaaaaaatcccagaagaaaaacttggaagatgagaaagaagtatgcccaaaagccaagtcagaagaatcatttgtattaaatgagacaaagaaaaatatagttaacacagatgtgccccatcaacatccagaattacttcattcatcttccttggtaaagccaccagctcccaaaacaggaagtatacaaaataacatgttaactcttaatctagttaaacaacatactgggaaaccagaatctaccttggaaacatcagttaaccaagatacaggtagaggtggttttcacacatgttttgagaatctaaattctacaactattactttgacaacttcaaattcagaaagtattcatcaatctttggaaactcaagaagttcttgaagtaactaccagtcatcttgctaatccaaactttacaagtaattccatggaaataaagtcagcacaggaaaatccattcttattcagcacaattaatcaaacagttgaagaattaaacacaaataaagaatctgttattgccatttttgtacctgctgaaaattctaaaccctcagttaattcttttatatctgcacaaaaagaaaccacggaaatggaagacacagacattgaagactccttgtataaggatgtagactatgggacagaagttttacaaatcgaacattcttactgcagacaagatataaataaggaacatctttggcagaaagtctctaagctacattcaaagataactcttctagagttaaaagagcaacaaactctaggtagattgaagtctttggaagctcttataaggcagctaaagcaggaaaactggctatctgaagaaagcgtcaagattatagaaaaccattttacaacatatgaagtcactatgatatagaataactaggttttaaaactatggctgttaaataagctttttccagccaaaccaaactacatgtaaagtgaactgtttcctgtataaagttctcatcttaatgaacctatgagagtgttgtaaagttatgaactgtatcctattcttgtaatactcatttatgaaaaaccagagagttgggctggagagaaaagcagttttattacttgataattttccaaattaaaatttagcacatagaaggattcagttataacatgagaaaacaaagaagtgttcaaagagcacagactagaagtcaggttcaggaatcagtcctggttctaccactggcatatgacttgggcaagttacttatgattgtgcctcagcccctaatttgtaaaataagcacttactggatttgtaattggttatttatagtcccttccctttttattaagataattctattagaacacattttctgtaagataatatatacgtaatactagaagttggctagaatttgatgatattaaccatgtattattttcagtatttattgaattctgtggtctttgaccttttggctatagttacatattacagttatattatctgtaatagaaaggaagataaactttttttttttttttgagatggagtctcactctgtaacccaggctggagtgcagtggcctgatcttggctcactgcagcctctgcctcccgggttcaagtgattcttctgcctcagcttcccgagtagctgggattataggcacacaccaccacatccagcttatttttgtatttttagtagaaacggggtttcaccatgttggccgggctggcctcgaactcctgaccccaggtgatccacctaccttggcctcccaaagtgctgggattacaggcgtgagccaccgcgcctggccaagatagaacttttataattttattccagttgaactaaactaaggaaccacccattagcccagttcttaggagaggtacttcaaacttgaaagaatatgtatttcggtaacttatatgtggctaaccatcaaatacatagtcatctaagctaaactttctgtatttatacagttaaacttataaaccaaaaattttaatgaggttaattttaaatatattttagaaattacagtttgtttcttagtaggtgtggcctttaaaatatgtgcttattcattgttaaattccagaataatagagtaatacttaatactgtacattcccacttacgtatattttattaaaatttataagcaagaaattatacataagtggtcatgatcttagggagacaaagaatttctcttagaaaagagaagtaatggtaatgtaaataaaaatactgtttatattcacatgattttaagaaaactgtaaaagcaaagattttgtagtaatgacacaaatgtaacaaatagatgttttcttaaaattggcagtcagtataattatgtttctgcctatgatgttgaggaagttgtatcagtctgattcttagttttttcatctgttaagtagaacgtactattacttaccttaaagggtggctttgagaattttgtaaggaacaaacatgtttttggttctggaatataggaggtgctcaataaaagttgactctgactggcaaaaaaaaaaaaaaaaaaaaaaaaaaaca

SEQ ID NO: 24622 - DNA, 2006 bp, Homo Sapiens
tgcaagagagccccttataagagctaccgaaattcttcctatgaaaatgcacgagaaaacagtcaaatgaatgagtctgcacctggtacctatgttgttcagaatccacacagctctgaattaccaacgctgaatttccaagatactgtaaacaccctgaccaacagtccagccatcccattggaaacatctgcatgtcaggacatacccacttctgccaatgtacaaaatgcagagggtaccaaatggggagaggaggcattgaaaatggatcttgacaataacttttattcaactgaggtgtcagtttcttccactgaaaatgctgtcagttctgacctccgggcaggggatgtacctgttttatctttgagtaatagcagtgagaatgccgcctctgtgatcagctacagtggctctgcaccctcggtcattgtacacagcagccagttttcatcggtgatcatgcacagcaatgccattgctgccatgaccagcagcaaccacagagccttttcagacccagctgtcagtcagtccctgaaagatgacagtaagcccgagccagataaagtgggtaggtttgcaagcagacccaaaagcattaaggagaaaaagaaaactacatcacataccaggggggaaataccggaggagtcaaactatgttgctgatcctggaggatcactgagcaaaaccacaaatattgctgaagaaaccagcaaaattgaaacctacattgcaaaacctgctctgccgggaacctccacaaatagtaatgttgcacccctttgccaaataacagtgaaaattggaaacgaagccattgtgaaaaggcacattctaggatctaaattgttttataaaagagggagaagacccaagtatcagatgcaggaggagcctttgccacaggggaatgacccagaacccagtggagacagcccactcgggctttgccaatccgagtgcatggagatgagtgaagtgttcgatgacgcaagtgaccaggattccactgacaaaccgtggcgcccttactacaactacaaacccaaaaagaaatccagacagttgaaaaaaatgaggaaagtcaactggaggaaggagcacggaaacaggagcccgagccataaatgtaaatacccagcagaactggattgcgccgtggggaaggctcctcaggataaaccctttgaggaagaagaaactaaagagatgcccaagctgcagtgtgaactctgtgatggagacaaagcagtgggggctggaaaccaaggaaggccccaccgacatcttacttctcggccatatgcctgcgagctctgcgccaagcagttccagagcccttccacactcaaaatgcacatgagatgtcacaccggggagaagccataccagtgcaagacctgcggacggtgcttttcggtgcaaggaaacttacagaaacatgaacgcatccacctgggcttgaaggagttcgtctgtcagtattgcaacaaggcattcaccttgaatgagaccctcaaaatccatgaaagaatccatactggagaaaagcgttaccactgtcagttctgctttcagagatttttgtatctctccaccaaaaggaatcacgagcagaggcatattcgggagcataatgggaagggctatgcctgcttccagtgccccaaaatttgcaaaacagctgctgcccttggaatgcaccaaaagaaacacttattcaaaagcccaagtcagcaggagaaaataggtgacgtgtgccacgaaaactcaaatcccttggagaatcaacatttcattggttcagaagacaatgaccaaaaggataacatacaaaccggtgtggaaaatgttgtcctttgagtggcaagaattagaaaaatcttcaaaaatatagttggtggtttttttagttatgatttaagtttagtttcattttgtccatgtgacagtcatgaaggagtgaaaaaaaaaaaaaaaaaaaaaaaaaaaaaaca

SEQ ID NO: 24623 - DNA, 1987 bp, Homo Sapiens
gctgttcggtagcggagtgtcacactgatttccagccccgcagcacacacactgagaccctgcctggcgtgattcagaggcaacgtatttcccaaggtggctgtgaaggaaccagggggataaacacagcccgtgaaccgcacgccagaggacaggtccggctgcctgccgcggagtcgtcacggcgtgtcgcgtctgagcgcttctccaaagcacccaagtggcacccggggtgacatttacatcatcttgagtacagttctctcaaggaaaaagcaagcccagcatcttctgccatggcaaccctggcttggagcctccataagagagaaggccctaagaataccattttcttgctctaagttgctcttacgggaaagaagtgataatattcttcctaaacgccatcattcgtgcatccttcccacctacatgtgtcaccggatcattctccgcctgggcggggccgtcctgtgcactgcagaatgctgagcagtgtccttggcttcgaccgaccacatgccaggagcaccccaatttctgccatcgggtgattgacttcactgttgcatttgattttttatgtatcttttaaaaggacccaatagggccaggcacagtggctcacacttgtaatctcagcctcctgagtatctgggattacaggcatgcgccaccacacccagctaattttgtatttttagtggagatggcgtttctccgtgttggtcaggctggtctcaaactcccgacctcaggtgatctgcctgcctcggcctcccggagtgttgggattacaggcgtgagccaccacgcctagccgggtttatagttttataacccttatgacaaatctcatagtattctgcagggataagcatgaaaccacttgttcaataagtgcaaacaaaaacgccaacaattcttaagacatttctaatcttattttaccaataattttaaagccagcttatgtattaaagatttataactacttttattaacacgtttaaaattctatgcagcttaaagcatttataatggataaaactgccaatactgagtgcctgacataatatttgaaaggtggcaggcattcaaccatggtcactgaatgagagatgtagggaagatgatggcagggaggtttttagatatcaacaccctgatagttctcattttaaccacctgtaagtgcacatacaagtcaacggcactggccgggcgcggtggctcatgcctgtattcccagcactttgggaggccaaatcacaaggtcaggagatcgagaccatcctggctaacacggtgaagccccgtctctactaaaaatacaaaaaatcagctgggactacaggtgcctgccgccatgcccggctatttttttttgtattttttgggggttttactgtgttgcccaggctggtcttgaactcctgagctcaggcaatctgcctgcctcagcctcctaaagtactaggattacaggcatgggccaccacgcccggccttatttttatttttgagacagtctcactctgccgcccaggctggagtgcagtggtgcgatctcggcttaccggaatctctgcctcccaggttcaagcgattctcatgcctccgtctcccaagtagctgggattacaggcacctgccaccatgcccggctaatttaacgcccagctaatttttgtatttttagtagagatggggtttcaccatgttaaccaggctggtctcggactcctgacctcaggtgatccgcccgcctcggcctcccaaagtgctgggattacaggcgtgagccactgtgcctggctgatttttattcttttagttaaggctggttgatattaccttgtgtgtatataccacatgttgtttatccattgttgttgatggacatgtgggtggtttcaccttttggctattgtgaataaagctgctatgaacactgtgcaaaaaaaaaaaaaaaaaaaaaaaaaaa

SEQ ID NO: 24624 - DNA, 4966 bp, Homo Sapiens
cacgagccttcctgacaagtgtaactcattcctacacaacaaggcggagtggaggtgcgaaattgaggcaactcttgagaggctaaagaaactagagcgtgatctcagctttaaggagcaggagcttaaagaacgagaaagacgtttaaagatgtgggagcaaaagctgacagagcagtccaacaccccgcttctcttgcctcttgctgcaagaatgtctgaggagtcttactttgaatctaaaacagaggagtcaaacagtgcagagatgtcatgtcagatcacagcaacaagtaacggggagggccatggcatgaacccaagtctgcaggccatgatgctgatgggctttggggatatcttctcaatgaacaaagcaggagctgtgatgcattctgggatgcagataaacatgcaagccaagcagaattcttccaaaaccacatctaagagaagggggaagaaagtcaacatggctctggggttcagtgattttgacttgtcagaaggtgacgatgatgatgatgatgacggtgaggaggaggataatgacatggataatagtgaatgaaagcagaaagcaaagtaataaaatcacaaatgtttggaaaacacaaaagtaacttgtttatctcagtctgtacaaaaacagtaaggaggcagaaagccaagcactgcatttttaggccaatcacatttacatgaccgtaatttcttatcaattctacttttatttttgcttacagaaaaacggggggagaattaagccaaagaagtatatttatgaatcagcaaatgtggtgcctgattatagaaatttgtgatcctatatacaatataggacttttaaagttgtgacattctggctttttcttttaatgaatactttttagtttgtatttgactttatttcctttattcaaatcatttttaaaaacttacattttgaacaaacactcttaactcctaattgttctttgacacgtagtaattctgtgacatactttttttttcttatagcaatacactgtaatatcagaaatggttggcctgagcaacctagtaagacctcgtctctactaataattaaaaaactagctggcatggtagcacacacctgtagtcccagatacttgggaggccaaggcaggaggattgcttgagacctagcaatcagtcagggctgcagtgagccatgatggcaccactgcactctagcctgggcaagagaacaagatcctgtctcaaaaaacaaaaaaaaagaaagaattgatagtacaaaatccaacaacaatactgagatgatctaagaaggttataacaaaatgctcttcagaaatacctaagtgctgagaatttttagtactaaagagcacagctgctcaaagtaaagcctgagcagtgttctcagtaatgtatttgaaggaaaaataccctgatttgaaaccaacagcagatgttgcaaactttcataccactgctggccatggaagcctcttaacaacacactgtcatttaaggctgtgcttgtgctttatacaaagagaaagaggtggtcttaaggggatgcttccaggggggtgagttcatgcctctcctgtattttccagcaagtggggtatgtgtggtggtttgttttttagaggggcataataatccaggattctaagcatatgctcagctattttaaagaggaaattaaatattataaaagaaatagtaaagataagttatcctcacttaggcaaaagcacaggtcctttccatatcaagtttagcctaccagggttgttttttgttttaaccctgcttaataatgttggtgttttagaagtagatacaggcactgctctgaaaacctggctagccaaggatattctcagaatgttatcacctgtttgtcaaagcttgtttaaattataaaacacttttaattatatatatgaggcaaaagaactaagacttttttcaaactaaattagaaaggagtgtcattatttgactgttaaaccaaaatatttttggtgggtctttttatggaagtttaaagaaaggacatcctcatagatatgatctaacagtatttctaactatatttgatcattaaaagcctcttggaatttgaagcgtgacgtgtttctaatgccccttgagaggtgaaaaataccacataatgatcagtatgctgtgccagcttcatttggggagaaataactagtagaaagttctgggtgtgaggtgtacagcagtctaggtggcatagtgatgaagaaagggatcagagtctgactgtcactcagaatcctgggctcagttgcttgacaaccttgggaaaattgttttatctttgtgcgtctgtttgctgatcttcagcgtgggaataataacagtacctacttgaaaggatcattgtgcggattaaaagaaataatatatgtaaagcactttaacacagcaccaggcccacggaaagtggctaatgttagctactatgaatggtgccagtgaagacactgaaaaataagtgatttcagtaaccttctggaaagctatcagtttcaaataatattttctctgtagtatgagatgaaattaaaagtggatagctttcaggaaagataaagagaacatgcttagaatgtaagctaaacagattttttctgttgctctttgaaaactatgagccctggccagcttaacctggtctgaggtgagactaaacacaaaaacagtagataaatctctccctaaaagatggattcccccacatacccatgctactagtttctctgtctattcacacatatgtacaaatacatgaacacagcctgtctgtgctcagacatagagaagtactacctgacttgagtcaatgcacccaagaagaaaagcttggagtagagcagaagggagggcttgggactcctgtctttccagcatgccctggggtgcagtggtcagccacctgaagagagagccaatagcatggggtttacaaggcaaagatagtcattcattcaacacatattcatagagctccttctctgtgccagacactgttctggaagatagctagatgaaaatctttgcactcacagagcttacatgccagtgagtgaagatcgatgataaataaagcaaatgcatcatatgttcacatttgataagtatatgccaaaaaatgaagccgggaaggaggacaaggcccatgggtgggtgttgaggtttttaaagtgtggtcaggaaaggccccactgataaggtaacatttgagcaagtctgaaaaaggcaaggggatctttggggctaacttcgggatccctgcactttatgtaagaatgtaaacctggagtctcatttaagaatgatcagcaatacgtttagaacatatgaactgaatgaaatggacattttttcttaatttacgtataaatccatatgattatacataaagttctgatgcattaataaaagcagccaaatagggccaaagagaaaaataacaggactctgtactggacctaactttatcattaattaggtaatattttcctcatttctttactgctgccattttcctcaccagtattccagagatggtcatagctcattactctaccaccaagaacctaaaaggaattagaatacagcagaattggcctcagtgaagagcttaaaattgttctcctcgtagaactggactattgatcattaccacgtgacgttggctctattactttctgttcccaatgtccttctagtggtttgaaaatgttaaaacatccctaaaatctaaatcatataatcagaattctatagtgtcccactctatctgtaaagatcatttggaagactttagactctattaattttaaaaggaatatttattagccatatgcagaatttctaatgatgatattgtacagcttctaattcacttttcagatcagtgtttgaaatggcaattatcagtgttggatttagttccaactacttgatttacaaaaatgtacatttagagaaggttaaaagaaacagtgagaaatgtaaacattcaaaatgataattgaatctctcagttgtgggaataattatcagagacatgcaactgaaaatgtctcacctttcatctttttttcttaattcataaagttatcttgtagaatttgatgagaccctcctagtcattctcaactggggcggtgctgtcaccgaatggtgtttgagagtgttggggctagggcacatttttggttgtcacagcaactggggtggcatttgctgcccagtgccaggaatagtaacattatgaatgccagggacagtgtgctcagtaaagtcttccatccaaaaggggcagggcacggtggctcacgcctgtaatcccagcactttgggaggccaaggtgggcggatcacctgatgtcaggggttcgagaccagcctggccaacatggtgaaaccctgttgctactaaaaatacaaaaattggctgggtgtggtgtcacatgccagtaaccccagctactagggaggctgaggcaggagaatcacttgaacccgggagccagaggttgcagtgagctgagattgcaccactacactccagcctggatgacagagtgagacttcatctcaaaaaaaaaaaaaaaacaaaaaaaaacaacccggtagcattgtcccttccccactgacaaacttatcaaatccagaagctttagagtttcgtctctaattatttttctcctgaacaaaattacccaagtcaaaacaaaatgtatttttagaattacggcagcatacgacctgaattttgtgagtttcgtggctttatcttaaatcaccatttccctaaaaacggtttctttctccttagaaatgctggtggcaacttgatgaaacagccaaatgcaccagggcaggtcactttcccattacactgattccacaaaaaaaaaaaaaaaaa

SEQ ID NO: 24625 - DNA, 3010 bp, Homo Sapiens
ggatggggacagccgagatggcggcggcggcaaggacgccaccgggtcggaggactacgagaacctgccgactagcgcctccgtgtccacccacatgacagcaggagcgatggccgggatcctggagcactcggtcatgtacccggtggactcggtgaagacacgaatgcagagtttgagtccagatcccaaagcccagtacacaagtatctacggagccctcaagaaaatcatgcggaccgaaggcttctggaggcccttgcgaggcgtcaacgtcatgatcatgggtgcagggccggcccatgccatgtattttgcctgctatgaaaacatgaaaaggactttaaatgacgttttccaccaccaaggaaacagccacctagccaacggtattttgaaagcgtttgtctggagttagaaagttctcttcttcaacacgtccctccccagggtgttcctccctgtgacccagccgcctcgacttcggcccgcttgctcacgaataaagaactcagagttgtgtgtgcaatgcacacccagacacacgcacgcacacacacgcgcgcgcacacacatgcttttttctgttcccctccgctttctgaagcctggggagaaatcagtgacagaggtgttttggttttattgttatgtgggttttcttttgtatttttttttgtttgttttgtttttaaacattcaaaagcaattaatgatcagacataggagaaaccctgaatagaaacaaaacttttgaatgctggattcaaaaaaaaaaaaaaagttatctggacagcttctttgagactatttaaaaactggtacaacaggtctctacaacgccaagatctaactaagctttaaaaggtcaagaagttttatggctgacaaaggactcgcgcaacgcagaaggcctttcccaccttaagcttccggggatctgggaattttacccccattctcttctgtttgtctgagtctcatctctctgcaagcaagggctgaaatcattttgtttggttgttttgagggagagaggcggggtgggggggtgcaaatctgccagcagctcttacgtaaggcatgttttattggggagggctgagcttttattttctcctctccagtggggttggcttttattgtttcttgtttgggtttggaatggaaatatggatagcagcataaagtacttttattttgacaaaattcatttttttcaacaatggagacatagatttgacccacaataacttctccccctctctttttactctgctcaaaaagcatctctcctcccattacccaaccttggtcataagtgtgcctggctggtttgcagatatttgttctgctttgtaaaaattggccattagtgcatttattgagatgatctctaaagagctatgccctgacctacccctgattctatgacattggggcccttcttttgctgaaactgccttacgtaatggttttactccttgaaagagatttgacggaatccattttatgccaagtgctgccctgcactgtttctgcaatatgtggtgtatgctgtggtgatcttgctgggaatgattataagtgtgtgtgtggtgggggagtgggtattacatgcattgctgaagagtcatcctggtgttcctcattcctcccaccttcccgtggtcattttaattacggggcagtgtcaccgcaaagggaggaaactcaaagccgaaagcaaaattccaggcctgattctggcttttgaggttcctggttcttgaagccaggcctgacccgactctcagatggggtcagtcccgtcgctttgcagactgaccctggaaatctacaaaatgcagattttcctgatttcctcttctcttgcccagtttttttttttttttttttttaaagcctggattgtaaccagattttcttttttcccccttctcagctgtagatatgatatctcctttcagggccccagcttaagggcaaagtgagttaatgtgtagacaaaggcgagggacaagagagagttaacatctagacagtggaaaaagccatggtgtgtggtttctgggaaccaccaacacttgcaggtttagctttttcccagggttgactacaagaaagaaaaccatgtttttgcaagattaaaatgtggttgagtgtgcctaaattaaccatccccatttttatcatatttccaccatcacttcagggttttaagagtcagtgctcacctgggcggagctggtagtacattttgcttcttagaaagctaagtcctgggttccgtctgattttaggttccaggaacttcctgagaacacccgatcgcagagggtaattttctggagtttgttttgcagggatagctgggagtatggccaccctgctccacgatgcggtaatgaatccagcagaaggtaatgtttcatggtcccagggaggggcagtaggggatgtgcaaaggggcacaaaaaatggttgtgggagagtggagaggactgaaggtgggcagagcggctcctagtctccagtcagagcagacaggagaattgaattttttactacgttatcaaaggcctcaagaaaggacgtgaacataagagtttttggtattcctgtgctcggagctactcaaagtgtgttctacagaccagcagcatcagacatcttgaggggtgttggaaatgctaattctgaggctgggtgcagtggctcatgcctgtaatcccagcattttttgggaggccgaggtgggcagatcacttgaggtcaggagttcgagaccagcctggccaacatggagagacccccatctctactaaaaatacaaaaattagcctagtgcggtgtgtgcacctgtaatcccagctactggggtggccgaggtgggagaatcgcttgaacccagcaggcagaggttgcagtgcaccgagagtacgccactgtactccagcctgggccacagagccagactccatctcaaaagcaaaaaaaaaaaaaaaaa

SEQ ID NO: 24626 - DNA, 4223 bp, Homo Sapiens
agaggatgctgaggtgaccaaagcttttgaagaagatatagagaccccaccaacaagaaacattccttctcccggacagctggacccagacacacggatccctgttatcaatcttgaagatgggactaggctggtgggggaagatgctcctaaaaataaggatttagttgaatggctgaagctgcaccctacttacactgttgatatgccaagttatgtaccagtgagtattgcagagtttagagttggaaggaatcttgcaggccggtccacttcattcccttacaacatagaaatccctgacagctggtccctctgccttttccttgaatgtttcctggtctcaaacatttcccaggtctttgttgttgaatcttcttcattacagatactagcttcaggtctgtcttactgaaggcagccttacagttatttgaagatgcgcgttatgcatttccttactgtttgcttctcccatcaaactcatgtgacttcttcagttattctttccatggcatcgtttccaggcagtcttagtattggggtaacactgttgaatgcactttctccagtctccagacgaggccccgccatcccagagtgctatgaagccaattacttccagagatttgaccagttagtgcagcccaagattgtattagctgcttttatggcaactaatcctggtgccttatattaaacgttagacagttcatatctccaaatggtttgtcacacgaactgtttgctagctagcaatgcaagtcttttgctttctgtatttatgtgattgattttttaaaacttaaatgtagagttttacattttattttgttgggttcagcctagagttcttgccactcagaaagtacccccaccccctacaagatctgtctgtttgttggttagttctcattacagacagtctcatgttgttgatggggtatcatctctgtgttcattggagccactaactagaaattagtaaaagtactacagaaagcctcctttaaaagtatcatgacttggttaaacatttaaagaaaaactttaagtgaggttattgatagataaaaggaaaagccaattctcacttatgtattccttaatggacgggtaaaataggagttttttctttcaaagagaaaaatatggtttctaatattaataattaaaatgattcttgaaacttccataataattgaagatgatctgacagttctctttggcatttatatagagaagaataagtactaaataccaattttactaaatatgttttttcttttgcagaagaatgcagatgtgctgttttcctcatttcagaaaccgaaacagaaacgacatagatgtcgaaaccctaataaattggatataaacactttgacaggagaagaaagggtgcctgttgtcaataaacgaaatgggaagaaggtaaacgctgggaaagggaattgatcactatgcgatttcttagcccagaaggaagtgttttatcctgccttcttctataggggaaaagaatcctgtctgcccgaatgcgtgtgtgcgtgtatgtgtgtattatagaagggggagggagtagattaacagaaaggggagggaagactgtgtttttaatcatttgtcaaatgcctctacccagatgggtggagctatggcgcctccaatgaaggatctacccaggtggctggaagaaaatcctgaatttgcagttgctccagactggactgatatagttaagcagtctgtaagtacaaactgcatttctatcaagaaaggtagctatacaaaactgttttccttagtctttcttattttctgttggccattaattattcagttgtaacttagcttaaaagaattgacataatacatcattttcatacatcatttcatacatcattaatacatcattaatccaaagtgaattcatttatcagctccaatttaaaaggtttgtatggaaacatacattcacaatcttagaggtagacttctccaggggggattgccccagctaagcctacttaacagctcacctgtggaataggatgtatggtggttgagatcattaagattaactgtgatttctgatttaaaaacaaaacaaaacaaaacaaaacaaaaatacaacagttctgcctaaaagatttgttaccattagctttttaaaaattcgttcatgacatgctggttctttgttttaattatacattaaaaatgtctttcggtgtaacattctgttgatcttaacacacgtgtgagtttgtgaactgacaccgtagtcagaatagggttccatcccccacccccaccaccccgagttccctcacaccgtcctttccccgaccccagcccctggctgccgctgacctgttgtccatccctgtctttttgagaatgtcctgaaatggaagcatgaaggacataagtcttgaagcagtttctttcgctcatcatatggaaggtcatcgatggtcacatgtgtcacagttatctcctttctgttgccaagtagctgtctccattgcatagatgtgacactggacggcttagccctcacacactgaaggacatctgggttatttcctgatttttgaaactatgattagagctgctataagcaattgtgtacaggttttggtgtgaacataagttttcatttttctagggtagatactaaaatataattacattttccatatttcaaaaatacttttacatatatttgaaatatccaaaataacacattatagagggcataaaacatcctgggtttatattatgttatactattttataatttttctcccatacaatatctttttttttcttttttttttttttttttgagacaaggtgtttgtcacccaggctggagtgcagtggtgaaatcacagctcactacagcctcattctcctaggctcaagcaatcctcccacctcagcctcccaagcagctggcactacaggcacacatcaccaagcttggctagtttttgtattttttgtagagaaggcattttgccacgttgcccaggctggtctcaaactcacctcaagcaatctgcctgccctgacctcccaaagtgctgagattacaggtgtgagccactgtgcccagccaaaatttttttttaattgacagatatttaattgacaaaaattaattgatgaatcaaatatatatgcaaggtgtacagcacagtgtttttttcttttaagagacagggtcttgctgtgtcacccaggctggagtgcaatggtgcaatcatagctcactgcagcctcaaactcctgggctcaagcagtcctcccacctcagcctcctgattagccaagtagctgggatgacaagcatatgccaccacacctggatattttttttttattttgtagagatagggtcttgctatgtgccccaggctggtctcagactcctgggctcaagaaatcctctagtcttggcctcccaaagtgttgggattacaagcatgaaccacggcacctggcttcaaagtgatgatttgatataattatacattatgtactttcctttttaaaaatttgttatgggtacatagtaggtgtatatatagggtacatgagatattttgtacaagcacacagtgcataatgatcatgttgggtagatgaggtatgcatcacctcaagcatttaccctttgtattacaaacaatgtgattatactcttttagttattttaaaatatacagtaaattattgttgactgtgtagtcaccctgttgtgttatcaaaaactagatcttactcatcctgtctaactctatttttgtaccccataatgtactttctgatgtatgatttcttgagttagttatggatgcagctaacttgacatttacctcactgatgagtagccttgagcaatttttctgcagttcagcaagctaacataataataaaaacaagttttgctgtcattaagttttatcattgagctgttaggagggaagaactacttaggtatttccatttggaatggcaggttcaccacagaggctcacattgagatcaagttgtcttcgacagcctttatagccactgtttgcctcccctgtactccagggttttgttcctgagtcgatgtttgaccgccttctcactgggcctgtagtgcggggagagggagcgagcagaagaggaagaaggcccaaaagtgagatcgccagagcagc

SEQ ID NO: 24627 - DNA, 3967 bp, Homo Sapiens
ggacacctgtttcattcaccttagcatcacagtgacctttgtatgctctgttcagtctgtgtcaggcagtatgcttgtcctgaagagaggtttggctatccccaccccaccccaccccaccctgttccttttttatcaggaggacttcagagccaggcctgcagcattttgtttgaaaacacaatcagctctgacagttagacatgcacacagacgccatagctggattggaaacattgatgttttaaaaatttattttttttggaaatagttgcacaaatgctgcaatttagctttaaggttctatagatttttaactagtccaacacagtcagaaacattgttttgaatcctctgtaaaccaaggcattaatcttaataaaccaggatccatttaggtaccacttgatataaaaaggatatccataatgaatattttatactgcatcctttacattagccactaaatacgttattgcttgatgaagacctttcacagaatcctatggattgcagcatttcacttggctacttcatacccatgccttaaagaggggcagtttctcaaaagcagaaacatgccgccagttctcaagttttcctcctaactccatttgaatgtaagggcagctggcccccaatgtggggaggtccgaacattttctgaattcccattttcttgttcgcggctaaatgacagtttctgtcattacttagattccgatctttcccaaaggtgttgatttacaaagaggccagctaatagcagaaatcatgaccctgaaagagagatgaaattcaagctgtgagccaggcaggagctcagtatggcaaaggttcttgagaatcagccatttggtacaaaaaagatttttaaagcttttatgttataccatggagccatagaaaggctatggattgtttaagaactattttaaagtgttccagacccaaaaaggaaaaataaaaaaaaaggaatatttgtacccaacagctagaaggattgcaaggtagatttttgttttaaaatggagagaagtggacagataaggccatttaatatatcaaagatcagttgacatctcctagggaatgatgaaaacagcaggctattagaaaattatttcatatagttctcgtgttcttttcttttttttaatccctgaagggatgatcagtaacatagcttctcttttctgtactctagaccaccccttttcatcattttgctttttatgtctcccataagaaatgtgctttttagagcttcctaatgcatgtgttgcattattgcagcattagaaaaggagaggtagcatttttgctgaaatcgggcctgtcactctccaataaaggttctggcacttcaatgccaggcaggtctcctaaatgaacagaatgatctgtgtgagccgatgcctgcccttccagaggggccactgtccccagccgcagccaactgtgtcccacaggaatgggagcctaggtttccaaatcttgtgattctttaggagaaacatgaaacctggatttcgtgtgaaatgtcccgattgttaaaaagttggctcaattatttttaaaacattttgtaagccaacaaaagtctgtgggctgccagtttattacttttgtcttaaaacatgatcattgttctctcacggtatccttctgtcttcccgttgcaaattcacttttctttcttcctgacattgccattgagggctttgttaccacaagctaagaaactgagtttaacagcccagttatctgcaacatgtcaattacctttgctcctctcctgtgattcccaccatgctgtgaccctcagctgtctccctttgctgggaattctgcaccaatgtctcccctcaacccattccctggttggtcctactcccgtgtggccagagacatcctagcaaatccttcctcctattatatctgacactaatttcttttcaacagcgctcatgtctcttggcccagtcaggtgctgccaggtttagataggaaagtacatgtcccattttcatgggtgcccttaatgtggtccacgtcctatatcttattatatttactcatggctcaatgggggcctccagagaccctctcaggctgctgagctagactaaggaatgcatccaccgtcatcacatgagacactgactctgtgacgacaaaagtacaaacagtctgaggctaagaaaggttcatctcacaacaggaaaaacaaatctcaacacacattagagataattgattcaggggttttctctcccagtctcccagcagggactgatttcatttctgacccactaggttttctttccagaaataggtagcaaggacaagaactaaacaatcccagccccacccagcaacacagaacacaggagtttgcttttggcttctcactctccaagtaaccctgaattaggcccagaatggctgaggcttggagcatctcctcagacagagcagaggcgacacctcttcaggggtgtgtggagtaaatagctcgaagagctgaagacagaaaaccagtttcacgccaggtgcgagagagagcataatggagggaagcccgctttctctctcctcttcttttctctttatttctttagagcacttgacttttttttctctctctctctagtattctaaactgaccccatgaccaactgagaatttatttttgtttcattggttgtttcacagaattagaacacacacgactttttattcctccattgcaaaatggaatcaagatactacacaagacctgtgctttcttcctttgcatgatttacacctccgcctgttttggtgctagctgtctagaacttctctcttggtttgaatctgattccttcacactacactagaagtttatttcatcttgttttgtctagactccagatacagagggacagctggactgaggacaagcaattccatctagcatagggtctctcagggttggtgcatccagccacatgggcagggccagtcacatctagtctatgtccccagagcccttggagttgcgcagcttagctgacttgactccaaggaaattagtacagaagtaaccactctattaagtgtgttctgctatgttcacatgcctgtagtacctgcaaaccatgccaggttcatctaaagacataggggaagattaaggactcttttggacagaccatgaattgaatttgctgccaggtgctgccagactgaatttggctgacagaactcccagcccaggaaagttccatgacaatgactgtcgcagaaggaaatttcccactaaagtcagtccattttcaagttttggtcttcagagacaaaagaacgtcccagccacctgattttgatggtgaggtaactctaagttgaattcaggctagtgttgcagtatagctttggcatgttcatgagtgagcacccagaatgtgttgaaccaacccccacccctaactactgactatgactgcagtgggtttttatggggaaaaaaagtgtgaaaagcaaaaagaaaggaacagagattttttatcacctttattgtaagacagtccatttatgaattgagtataaacacatacaaagtaacaagagattcctaagaaacgcaaatccttgagtttcacgcacttcatgttcaaccatttgctgtaatccagaggcagcctgtgaatcattctcatgccctgttttttttttttttttcctataatgttctgggtttaaaagccatcttttccacattttctgtaaataatggataatcattttaaaaatttttatttttagtgctgttttaacaatgtagatagatcataaatgtacttgctgaattcaatcatttttaacaagccaataaagtttgataattcataaaaaaaaaaaaaaaaaaaaaaaaaaaaaaaaaaaaaaaaaaaaaaaaaaaaaaaaaaaaaaaaaaaaa

SEQ ID NO: 24628 - DNA, 2265 bp, Homo Sapiens
cggacgcgtgggtgtgaaccagaggtgctttctccatctctctggggctatcttgttcctcatcctgtcctgtctctatgcattggcctcaggctctggctccccatccatggcctctcagtgcaacagacactgaccagagacttttagtccccaggtttcacattcttgggacagcaaatctgattggctatcccagtccactgtctggccaggtgggcagggtcatgtggctctctgcccatttggctgaggctaagggagcaggctctgaacagagacacaggctgggcaaatttcctgcaagggagggcctagtataagtaactccccctgggagctatgagggatgagcctctggagggaaagtggccggtatgcaggaggtgatcaattggtaggtgtttccttcccccaccacgtcctatcacaagaaggtggttaagaggtggggtaccctagaggaggagggggtgctggtggggctgcagcagatccagggcaggcaagctgtgtcccccgcacacctggacctcccagtcaagggaagaatggcaacaatgcacagcaggtagggacaggggctgcgcctcaaggacaaagtcagaggaggtgctctaagccaaggggacaaagctggccattgtctgtgcatgaagagctgaagtgcccgagtacaggcttctgagggctctaggagccaccaatgatggtcaagaaagggtatgggacacaaaccagactgttcccttttctaaagtgccttgaacccactgctttactgcatcctaaagttgggaatctaaggcttactgccttgattttataaaactcagttttataggcacagaaagtcccttggattagcccaaggtcattcagcaagctgtgactcagaagtagggctgtgacaggaactggggtacccagacccaactcctgggtctggcctccacggagtctgttgcagggggtgtgcttactgcctgctctgcacccacagatgatgccagctggctgcacgcagggccaccccacaacgagtacatggagcagagtttccagggcctgagtagcatcctgaacctgcctcagccggagctcgcggaggaggctgcccagcggcacagacagctcacaggccctgcgctcgaggcctggacagacagggaactgagcagcttctggtccgtggctggactgtgtgccataggcccctctccctgcccctccctggagccctgcagactgaccagctggagctctctgtcccccgaccccaaatcagagctggggcctgtcaaagcagacgggcgactcaggtagcagggccccagccagtacccgtggaggacccgggaaattgcaccttacagacagtggaggggtgtcccctcccacaggcaagaaccagaggcccaggctgcacacccatttcagccatcaagaacccacacagacggcagggaaggtggacacagtatgaactactgctgatgtctctgttggggatcagagggctggcgggaacgcgagaagggcaccagcagcattccacacccagctcttcctcaccttcctgtctagtttgaatttcttttttttcttttttttttttttttttttaatttaaaaaggaaaatgggtggttgggagagaaactagaacagaagatgtgcaatagggctcagagcagccccaggaagtgggccatgtctgtggggagcagtggcttgctgagcccacctgctattgttctgcacgaggctgggcctgcctcactctccagggcctcatgccccattctgggcctgtggtgctcgtggctgaggctccacagggctgcaagtgccctgccaggctctaaggcccgaagaacaggtgatatcgggggcgctgcagagctgggctctagcaggacagttcttttgtagccaggggaccctagaagtggggtggggcggctccagggctttccagcataccctgcccctggatgggaaaggcagggtcagggcccactgagacccatgcagagtttccaggtgtgcactggaagtgaggtcacatgagcagcgtgggaagaagactctgtcaagactctcagaagaacctggagtaattgtgcctgaagctcagcgtgaagtctgaaatatgcaacagaagaaatatatctctatctctctaaaaaaaaaaaaaaaaaaaaaaaaaaaaaaaaaaaaaaaaaaaaaaaaaaaaaaaaaaaaaaaaaaaaaaaaaaaaaaa

SEQ ID NO: 24629 - DNA, 1754 bp, Homo Sapiens
cagagaacccactacctcgtggagaagcctgttctttgtaaacctctggcttttctatgttctctgtaatttccatcttagtctctgccccatgggggccacatgggacaagttatttttggcaaagcacctaattgctggcactgtcccaaagcatagcgtttgccttttggaaagaaacaatgctaggacatggacactttggtacactgtccttacccctgagtattagtccactcagttccttgttggagaatgttgagaaaaccctactggctggcttgtttctgccaaagcttggggagaggagagggggatgagaagatgttagcagcctgctaaacctcagacagatgaggactcagttctgtgcttgccccacaaaaacggatgctcacatcatcaggaaattgttcagctggaggatttataacttcgttgctttgcatgaagtttaaagttttcatggttgcccagggcttgtaccttagattcctgtaaggactttgcactgtttttgctgagaaaacaacgcttcaggacttaaggtctaagcgtcagagaagtgccgtattttcaaggtggaaagtctgttaagcttgctgttgtccaatcatccgtttttagagatggggaaactaaaactcaaaaagatgtgcctgaggtcatatggcattatcagaaccaacctctggccctcttgacctgtctagcattctttctttctgacctataggatgactctaattcagtctaaatcggctgccctcagattcttgagaacttaaaattgagcagaaattcccaaggccaacctagctctcagggaccaacctgcagaactcaagattgagcgaaatgtttaggccagttgagttttgcaaaatgagtggtaagggaaaacagatctagcctgttatttaaaaccagggttcaaaagccctattgggagaggtagtattgtcctagcatttaaattctcatgaaatgtgcttggtctgtgatctcttggtcagatatctgccttccaggcgatcctttgaggttgtgtaattcagctggccctggctcctggtccctgttactgagctgggcagtcgaaccgaagggcagatgagctcaagatcatgccttgggaagcatggtgctctaggggtgcctttttattcctttcattgtattatagactgtttccaagtttatggttagaaatggtaaagtgggtctggtgttttgaggtagaacccagcctagggcaagatatgaactgttcttgaggtagaaatgtctacagtcagttgtttcatctagcttgcatcttaaaacacaaacccttcagttgctttcacttaatgcacacatttgccaatgacagagggttatacaggatccttcttttacatttctattgtctgctacgctcatcagagtatattttggggtacaaggttttgggggttttttttcccattttgtaactgccttattgaaaagtaagtgcccttccattccaggcctcctcatattgtacttgtttcctgccaaatctgggggatcatttgtattttaactttgtaatctatggctctgtactgttgaaaggctctcaattctgtggggtctccttagtatgtatgtgacttttcatgttgcaatatcacacgatgggatggcccgacttttgctcttaataaataatctgaatgagtaagagaaaaaaaaaaaaaaaaaaaaaaaaaaaaaaaaaaaaaaaa

SEQ ID NO: 24630 - DNA, 4770 bp, Homo Sapiens
ctcctgcatgtctgagcaaagaaaggcctttacacagcatcaccctgtgccatcccatgcaccgtgggactcagctaaaggactgtgcaaagagggggctcctgagttggatttaggcaaaaggggcagaattcgtttgatttttagagaaaatctctggagagtttcttttgattcatagaattccttttagatttctttccagcataccaactagctttagtagtgctgctacaaccagctcttataagtaagagtgaaaaagtattcttttcttctttaaaaaataagtttttcttgcttatagttaattctagaaaggcaatactaaaggtatatatttttttcaaaatgctattttttactgcacttgataattatcctgacagctctgatctctgtaatagattcactcttcagctctgggcagaaccagaggcagggttcacaccaaatttgtaaataccatatgtgggtctggtgtccaggaacttttttctttctgttaaaaaaaagaaaaaaaaaagaaaaaaaaaaagaagtagaggtggaagaaagacaagacttagaggaacaaaagaatgttttcttttgagatactcttctcaaagaaatagcaacaattgtataaacaggaaaaccagccagctttcatgataaaaggaaggcgtgtctcttgccctggtatgagattaacagaaatacagatgcatttttattttgattgaaagatggtgagaatgtagaaatgcttaggactagatttttaattttttaaaataactattatcatttattatgaaatatttgttcagttgttttgagtgggtttcttgttccttttttcatttaaaaccttctttgttgactggctccaggcttgtttgcctaaattcttaggtagtttacacaagttctagaatcttttagaactttaactccattggaagcaaacctaactaatcggagtttgagatcctggttggtttcaataggtattctggaattctggcagaacacctaaagattttttttttttttagaaggttttagatacattatcttacacaaactgtgacctaatggcaataattacctcaaatgtgggcattcatcctggttttagccttttttgaaatcatgtagccagcttgatcttggaatttaaagactatgaattctctgtgggctgaaaataatgattacttcatacccccggtcatcgttgcttaagtgaattctgaaaatagctcatctttacaacaaaaattaaaccaaggaagagattattctttgtgtgttgtactcaaatgcgatgttcaaatgcacatgttaagtatatatgtttttagctactgtaaaatgctgttagccttctaagctatcaaaacagtcacattttaaatgagtaaactaaacaattgactgtggatacttaagcatatttctggctacgttttatagttaaagtgttttatagtttacatttagactggtactttttaaagaaaagttctgtttataactgacatccgcaaaccccagtgaatgcctcttagttggaggttgtgtctcccccaaggcaagtgtgttgtcccagactcttctgtagtccagcatgcgcacttccctctggattattactttccacgtgaactcaagagaacatgaaaggcaatccagatggagggaaaaggtgtgagtccgcagcccgggccagatgcgaaggtctcatgcgtgtcgtctaaacacttgtcttcaaggccttctctctgacatcttggaagagtcattgagaacagataacctggttcattgatttttgtcttgatttgaatatttaacttattaatagatccactgatttccaggcaccaggcagtagaagagactgggattcaggtgaccatgaaggcacagctgctacttctgggccgggggtgatattttggtcagcgttttgtaggggaggaccatatacccctattcccatggtcgctggctgggttttccatatatctgctgtcatttattcgttttccccttaaaagcaaaatcaatgtaaaaggctatgtttacgttttactcattgtccagcttagactcaaagtctagttcggtgggagggggaccttagcatcctctcagagatggtcagggctgagcaggaggaggcagagacagaggggcagctcagcctggtccattgagacccactctaaacagacatcatatttggaacaagaagatgcttcgagacaggaatgggccccactgtcatgcagaaacagactgggggaatggcagtttccctgagtcttggtttcttttatgttttctcttgtgccaccaccaaactgcagaggacctgctgtgacctaaagggcattcctttagcagataagaccttgaaaactgcaaaacacctgggaccagggagcttttaaaaaatacaaaaaaataccacatttgctttttccctgtgaactgtattgacagcgtgttcttaggacagtcttttggtggaaatgttactgtaaaatagttttcatctcacccctcctaatcatactcccactttcctgtttgtgtggtggtgttgctgttttttcctttacatgaattaaccaaatgaattttgtgtcattgtttttggggcttatatttttaaaacatagaaattgccttttgttcatttgaaaagtaagtatgttgtatctgaaaaagggctctgcctctgctctccctcgcttccttgtaaccaatctccaaacgaatctctcctggcaccgcccccttccttatatagggtcactgtccccggggccacctctgcctccaccctgctgtcaccactgccctgggccaaggcacccaggactcccagaaagcgcgagagccagcaagaaggccccactcagccttgagactggtggtcacacctccctgtcagagtcgcctgctgggctgaaggggcaatggattgtcattgttgaaattgtttggctcaggttataaggaggaacttgggaagtagaaagtgacttgaccatgtgcatccttggtagcttcctgtaactaacaaatggaacagagagcacacccccgccccgccccaccccaagcagatgttcccgtcagcgctgccctgagtcagtcggtcccccgtttctgctctcctcccttttgtgttcctgctcacttcaagcttcttccatggactttccagggcacagtcatctctagcccccaaatcatctcttcatcctctgtgtgtgcatttttttaaccaaatgaaatagacaagaaagtcatactttggggcagcagaatttctaatttagtagaatcactgtatagagatagatgttgatatatatgtttgtgtatatatatcaaaccaaattggataggagaagtatagctttacagatgaggagaaggagctctttagaggtcggagtcaagactggtgtcttggacgtgcatgggctgtgtcccaggccactccgcacacatggggctgaggcgtggcgccgggcccttgtcatccacctcaccacggcagagccagcaggccctgtagggtgctgctgctgtctcactgggtcccagcttcaagcgcatcagtgggtgacgggggcaacaaatcagagtgactggaagtttccatcccgttttgctttgaccacgtgtactgagctgcagcctctgatactctgtcacgtttccaaaaatggtatccattaggatagaaagagaatggatctgcagaaatgtttacctttcaactgctcatgaattcaggacactggatagaaagactcactccccaaaatgagaacagggaagaggagacccggcgacactaagtcaccaggtccaaggaacgtggctccctccccagggtcatctcacctagatctttctctcccaggtcatctcagctcaatctcaataaccctatgaaagccctggtctgttgtgttccttcaccgtacggtttctgtaataaaaagtgttaatccatgttaatctgtgtgaaaattattgcgtgcaacagtattttctcgtgtacctctttttcctatgtgaattgtccctcttttttatttataaatgtctacttttgtttttttaaagacaaaccaatgtgttgtagacctatatgtaacctattccttagtctcatattataggtatgttataagaatggatattttacttggctttagaatgttttacaagaaaactaattcttaactgatcaagtccttgctactaaaatgcttgtgtttttcatcatgacgtcgtgtgcttctaaattaatcattttcgttgtagaaaaatggagtgaatttatattagtcttggaaactaataatagcattgtaaatttatgagatgattttaacagaaaaaatatagaagaatatagttattttaattgtaatattactaactgtagggtgagaaaaaggggggggggtcccattgtggtgaactatgttatagcttgttactcatagtttctttttgatcattttttcggtctccgaggtgaaatgacttattaattaaaatttgtaaactcacatatgcatattgtatatgtgtagaaatgtaatcacactttgtcttggaattacattaaactgtttgaaatcactgtgaaaaaaaaaaaaaaaaaaaaaaaaaaaaaaaaaaaaaaaaaaaaaaaaaaaaaaaaaaaaaaaaaaaaaaaaaaaaaaaaaaaaaaaaaaaaaaaaa

SEQ ID NO: 24631 - DNA, 3298 bp, Homo Sapiens
gccttctctgtagagaaggaagtgtctcctgggttggaaagcccaggccgggatgaacagcatgggtgtccttaggctgtgtgtaccacacacccctggcctactctcccctgctctaaggagtcacctgaaggagcagctgcatcaccccgcctcaccccttctcctcagcacccaacaaccaggtcttcccagagagtgctcagctattggtgaagcaggcatcgtctattcttcaagaagacagcagagcatcaggaaaacaaaacaccaaaaaaataccataaagacactggagtgtatttgttaccagcccttgtataacagagaagtatttcaaggtcttatttgtaaggctggacaagctcaggctgattaaaaccacgagttagaatttgtctcccgctcccaggccctgctcagttgacagctcctagcaggctgggaggccccaccccacccccaccccaggggtccattgaagaagaccatctgggcctgggatgctgatgtgattttccctacttctccttttttttcatttgcctcctccacccacttctaaagcagctgattgctctggttccttttcatgttgagcaaaagagaagacagatcttgaaacctgagctggggactggagggcactgaccgagagtaaccccgtctggctcagctcagctcagcaaagggctttcctcctccgccttcctgagctgctctccctcctctcctttcctccttcttttcccagcctcccccaagctccttcacccctctcttccctctcctccctcctcccaccttccttgtcctctatgctcagagaactgaaggaacactgaatggcctggaaagcaggacctcgcccccaccccgcgtcatacccctccgcctgcacgtgcaaatgtgttcctcagcttggtctcagaggcctggacctgggtcccagaggtcccagctggttccccggcttggtcccagaggcctggatgtgtggcaagaagctgagggttctgcttcgtttcttccagcccacaaacacacatgtcacctgttttttgttctttttcctttcctttgccccactttacagaagctcttggctaattggtaggtcactgtttgctcctccaggcaaaaccaaggaggctgagctcagcaggtcaagtattttggtctgtattgaagagactgtggtgggagagccctcttgaccttctgctggatagtgactttctcttctgctggcagcagtagcccagctccgcatcctgtgacagaggtcataccttccagttacccgagcgaacacttggagcaagtcagctttttcccctgaaacagcacgttcacgttcttgatctttggtttgcacaacaacctgtgaatgttattagccccgttttttttgtttgtttgttttttgagacagagtgtcactcttgttgcccaggctggattgcaatggcgtgatctcggctcactgcaacctctgcctccaagcaattctcctgcctcagcttcctgagtagctgggattacaggcatgcgccaccacacccggctaattttgtatttttagtagagacggggtttcttcatgttggtcaggctggtctcgaactcccgacctcagttgatccacccgtcttggcctcccaaagtgctgtattagccccattttatatccaaggaaactgaggcttagggagatttaaataggggggaaagtatagcttcatgattacacagtcaggaaatggcagagctgactcttgaattcagaccctgtgatgctgtatccagtgctgattttgttttgccctgtgttcctttcagtgtcaggtaagaagacctcagagatcatcttctccaacccacacattttactgattataaaatccaggtccgcattaactcattggccaaagttaagtggctaaatgactctcctgttcaggaagtattccctgtcttgtgtggaatgattggtctttcgtccaggtcatcttccacctatatccatccttgcagtgactggtggatatgatcattcctggtgattccctgtaaaatactagatttatttattctttcataaagttatgagtagacaaatcagtcagcttcaacctttcctttaccttatagatagtatcagcagaaagaactcaataattctgtcttaggaactcagccaggctaatatgtattataatacacacatacatatgcacacacatacacacatgtgcataccttagatcacaaattcaacatctcaacttagccgccaaagccacttctgtgtcttgtctattctgaatatgctttaaggttaaattagccatgaatctgttcagatcagtcattcctgaaaatgatgatgatattagccatcctttaccgggcaccttactcagtgcccggcattatactaggtctgcaggtacatttgctcatttaacacctagctcagtccaatgaggtggatgccattgtcatctccattttatcatttaatcaactcagccttcctctctcctgttccccactctgcttctagctgccactcacctgactctcctcttgatctgggctgacgtggctgagtgggtttagcagaactcttgtgtcctctttacttggtttgtttcaagttcatgtcctgcttcatcttttccctaactcactgcaaggtgaattttcttctctgcaatcgacaattccccaaatcacatcaggtcattaatttattcactcatttgtattcattcattcattagttcatccatccatctattcattcattcatccaatttactgagtgcctcctctgtgccaggcactgctggctttggaattaaaaaccctggccctcaaggaatttctattcttctgggagcaggatatttacatgggtgactgcagcttgatctgtgtggtactagtgggaaacataggatgttgggcacaaaagagtcacaaaacgccgggcgcagtggctcatgcctctaatcctagcactttgggaggccaaggcgagtggatcacctgaggtcaggagttcaagaccagcctggccaacatgatgaaaccccaactctactaaaaatacaaaaaggaataatagctgggcgtgatggcgggtgctgtaatcccaacaactcgggaggctgaggcaggagaattgcttgaacctggggctttggaggttgcaatgagccaagagcgggccacttcactccagcctgggtgaaagggtgaaactctgtattaaaaaaaaaaaaaaaaa

SEQ ID NO: 24632 - DNA, 4009 bp, Homo Sapiens
ggttttctctgttggaaagtagcagctggcttgacataatcagacgttgcctgaaaaaagcaatagagattacagaatgtatggaagcacaaaacatgaatgttcttcttttagaggagaatgcatccgacctctgctgtctcatttcctctctggtgcaactgatgatggacccccactgcagaaccagaattggtttccagagcctcatccaaaaggagtgggtcatgggtggccactgtttcttggatcgctgcaaccatctccgccagaacgacaaagaggaggttcctgtgttcctgcttttcctagattgtgtctggcagctggtgcaccagcatcccccggcatttgaattcacagagacttacctgactgttttgtcagatagcctgtatatacctatttttagcaccttcttcttcaattcacctcatcaaaaagatactaacatgggtagagaaggccaggatacacaaagcaagcctttgaatctgctcaccgtgtgggattggtcggtgcagtttgaacccaaagcccagacattgctcaaaaaccctctttatgtggaaaagccaaaactggacaaaggccaacggaaaggaatgcgcttcaaacatcaacgacaactttctttgccacttacacaatctaagtcatctcccaaaagaggatttttcagggaagaaacagatcatttaattaaaaaccttctgggcaagagaattagcaaacttattaattcttctgatgagctccaagacaactttcgagagttctatgacagctggcatagcaagtccactgactaccatggtttgttgttaccgcatatcgaggggcccgaaatcaaagtctgggcccagcgctacctacgttggattccagaagcccaaatcctaggtggtggccaagtggccactctgagcaaactcttggaaatgatggaggaagtccagagtttacaagagaagatcgacgagagacaccacagccagcaggccccccaggctgaggccccctgcctgctgaggaactctgcccgcctctcgtctttgtttcctttcgctctgctccagcgacattcctctaagcccgtcttacccaccagtggctggaaagctttgggagatgaagacgatttggccaaacgagaagatgagttcgtggacctaggggatgtgtgacctgtttgttgagtgattgtgaaagaggaatgtgggagattgggacagctgatccctggatttgtgtcacgctacagctcatgctggctgggtccttagcccggcactccgttagaataaacctgggccttcgggaaaagaggtggctctcattatttttcatgattctaaaagactatgcaattaaaaccgcatctgtagtattattaattggaaggaattattacttgacccgtaatagggttgtggccgttttctgatgcctaagtattatacagagcccacaatggccagtttactaccagaaagggcttcagtaagatattcttggacttgatactttcttcagatcctctttgtgccaagataatttatccagtcattgggaatagtaagtttctgtgtaacccatctcaattatagaagcaagttcagctttatgtatttgtatggggagttgaagattcagatagaggtattaagatgtgtggcatttacttaaaccatcacatttttttctttctacgcccccttgcctgtaaaacacctgggaagttccactggtgtcatccatcctgatgcttcagaccaccctcccttcttcacagaccgtgtcactttgcctgtgggtgggggctagccagccaccaccctcttttctgtgctgccagccccaggtcttcctccgcctgctccacaccactcgccgctgtccctctgcactccctgccttggtgcgtgtagtcccagtgtctcactgccaaacctcttggttacgctgcggggatctgtttctttgcctgagatccttcctgaggagcgtccattcctctggagtctctccttgtttggaacaaatcgcttcgcctttttctacttgcctgctgaagctttggagcacttgtgattgcagttttctgccgcaacccctgagccgagttcctcacattcttttacctttatggactgatgggattgggtcacttttgaatgtggctttcataggaaagcagcttaaacataaatatcagaagtgatgattatcatatgatacctcagtgattttaaaagccatagaagaaacttgactatgcctggtcaccttcttggatctgctgtctaaatgatatatatatgatatatatgtgatatatatatatcatatatatgtgatatatatatatatatcacatatatatgatatatatatgatatatatatatcacatatatatgatatatatatgatatatatatatcacatatatatgatatatatatcatatatatgatatatattttttttaatgcaggaaagtatactttgtaaggagcagatttttttgttctcagtggaaccctgtcaaatcgcataaaagaggaaaaaaacaaaactcattagaatgttttaaattgaatgttcgccttttacatatatttgctcttcagtatggatcccaatttgaatgttacatgttcggaaaaactttcagttgctcaagggcaataagaaaatttgaggccgggtgtggtggctcacgcctgtaatcccagcactttgggaggctcaggtgggcgaattgcttgagcccaggagttcgagaccagccggggcaacatggcaaaaccctgtctctactaaaaatacaaaaattagctgggtgtggtggtgcatgcctgtagtcccagctactcgggaggctgaggtgggaggatctcgtgagcctgggaggtggagtttgcagtgagctaagatcgtgccactgcactccggcctgggtgatggagcaagacctcgtctcagaaaattggaaactattgactaagagaagtttctaggtttgcactgaattgtcttttgtacatacagtgaattgttttgctgttctccccactccatattaatgcaggagccaggttggtctgttaggatgaacaaaggttgaggggagggcaggattcgtgcatctgggggccaaacacatgttccgtcttgattgccttaagagttactagcgaggtcagtgttaggcttgcaatagggattttaaaatacactaactagttccttagctaccttcacatacattctataggccttcttaaattagcactaacctccacttccttctctgccccattgcctcccaaatatgctatggagctatttttgttaccacgttataacgtgaatatttatacagtagcctcttcaggctttgtaattttcattccaaaaatgcccggtgtgatgctttacactctacaaagtatggtttaaaggcacaaggtcatggcctttgtcatagcagttgaatgtgcattgacatatttttctatgattttttaaaattacaatagaaaaataagctgttgtaacgtgtaaggtcatgacaatttttgtatttatatttgaaatcagatttctataactcgtatttgtgtacagaattctcaatggatttatatattgtgaaatttttatctgagattgggatgtggattatgcttaacagtgagagctgaaatgagaccatttactttgtttaaaatgctgtactgtgcaagtttggaaatgtaaattaatttactgtatataatatcttgagtttgtttatacctccaagtttttacactgaagataaactagctttaattcaaaacttttttttctttataagggaataagctgttgagctaaacctgtatacttgtgctttttattttctggatgcacaatgaaagtttatacttgtatctcactgcatcatatctgattgcagaaattaaagcacaatttacaagcaaaaaaaaaaaaaaaaa

SEQ ID NO: 24633 - DNA, 3002 bp, Homo Sapiens
cggcgtgatgtggcttccgctggtgctgctcctggctgtgctgctgctggccgtcctctgcaaagtttacttgggactattctctggcagctccccgaatcctttctccgaagatgtcaaacggcccccagcgcccctggtaactgacaaggaggccaggaagaaggttctcaaacaagctttttcagccaaccaagtgccggagaagctggatgtggtggtaattggcagtggctttgggggcctggctgcagctgcaattctagctaaagctggcaagcgagtcctggtgctggaacaacataccaaggcagggggctgctgtcatacctttggaaagaatggccttgaatttgacacaggaatccattacattgggcgtatggaagagggcagcattggccgttttatcttggaccagatcactgaagggcagctggactgggctcccctgtcctctccttttgacatcatggtactggaagggcccaatggccgaaaggagtaccccatgtacagtggagagaaagcctacattcagggcctcaaggagaagtttccacaggaggaagctatcattgacaagtatataaagctggttaaggtggtatccagtggagcccctcatgccatcctgttgaaattcctcccattgcccgtggttcagctcctcgacaggtgtgggctgctgactcgtttctctccattccttcaagcatccacccagagcctggctgaggtcctgcagcagctgggggcctcctctgagctccaggcagtactcagctacatcttccccacttacggtgtcacccccaaccacagtgccttttccatgcacgccctgctggtcaaccactacatgaaaggaggcttttatccccgagggggttccagtgaaattgccttccacaccatccctgtgattcagcgggctgggggcgctgtcctcacaaaggccactgtgcagagtgtgttgctggactcagctgggaaagcctgtggtgtcagtgtgaagaaggggcatgagctggtgaacatctattgccccatcgtggtctccaacgcaggactgttcaacacctatgaacacctactgccggggaacgcccgctgcctgccaggtgtgaagcagcaactggggacggtgcggcccggcttaggcatgacctctgttttcatctgcctgcgaggcaccaaggaagacctgcatctgccgtccaccaactactatgtttactatgacacggacatggaccaggcgatggagcgctacgtctccatgcccagggaagaggctgcggaacacatccctcttctcttcttcgctttcccatcagccaaagatccgacctgggaggaccgattcccaggccggtccaccatgatcatgctcatacccactgcctacgagtggtttgaggagtggcaggcggagctgaagggaaagcggggcagtgactatgagaccttcaaaaactcctttgtggaagcctctatgtcagtggtcctgaaactgttcccacagctggaggggaaggtggagagtgtgactgcaggatccccactcaccaaccagttctatctggctgctccccgaggtgcctgctacggggctgaccatgacctgggccgcctgcacccttgtgtgatggcctccttgagggcccagagccccatccccaacctctatctgacaggccaggatatcttcacctgtggactggtcggggccctgcaaggtgccctgctgtgcagcagcgccatcctgaagcggaacttgtactcagaccttaagaatcttgattctaggatccgggcacagaagaaaaagaattagttccatcagggaggagtcagaggaatttgcccaatggctggggcatctcccttgacttacccataatgtctttctgcattagttccttgcacgtataaagcactctaatttggttctgatgcctgaagagaggcctagtttaaatcacaattccgaatctggggcaatggaatcactgcttccagctggggcaggtgagatctttacgccttttataacatgccatccctactaataggatattgacttggatagcttgatgtctcatgacgagcggcgctctgcatccctcacccatgcctcctaactcagtgatcaaagcgaatattccatctgtggatagaacccctggcagtgttgtcagctcaacctggtgggttcagttctgtcctgaggcttctgctctcattcatttagtgctacgctgcacagttctacactgtcaagggaaaagggagactaatgaggcttaactcaaaacctgggcatggttttggttgccattccataggtttggagagctctagatctcttttgtgctgggttcagtggctcttcaggggacaggaaatgcctgtgtctggccagtgtggttctggagctttggggtaacagcaggatccatcagttagtagggtgcatgtcagatgatcatatccaattcatatggaagtcccgggtctgtcttccttatcatcggggtggcagctggttctcaatgtgccagcagggactcagtacctgagcctcaatcaagccttatccaccaaatacacagggaagggtgatgcagggaagggtgacatcaggagtcagggcatggactggtaagatgaatactttgctgggctgaagcaggctgcagggcattccagccaagggcacagcaggggacagtgcagggaggtgtggggtaagggagggaagtcacatcagaaaagggaaagccacggaatgtgtgtgaagcccagaaatggcatttgcagttaattagcacatgtgagggttagacaggtaggtgaatgcaagctcaaggtttggaaaaatgacttttcagttatgtctttggtatcagacatacgaaaggtctctttgtagttcgtgttaatgtaacattaataaatttattgattccattgctttaaaaaaaaaaaaaaaaaaa

SEQ ID NO: 24634 - DNA, 7285 bp, Homo Sapiens
gctttcttcttaacacttccaaatgtacttattgcttctagcacagtagactatctccagcaaaaatctacttatcaggtcttttggttagtggtaagaaatttagaaattaaggttggggaaaaattgacagtagaaaggtgggaaagatcagactctagcagtagtctaattttgtatgttaagtagtgaatctagcacatatcagatgtttagtaagtaagtgataagtatgaagccacaagtccagtcatgtcagagaagatatctgcttggttttccaaaagtgctaattatttcctgctgttagtatttttttcctgtagtggttgattgaggaacacacagacaagcagtatatgcacacacatatacatatacattttaaaacttttaaattggagcataacgtaacttagagaaaaatgcactaattataaatatataaaaatttcacaaagtgaacatatttgtttactagagtcccctttgtgctttctcccatttcactacctctccccaaaagtaaccagtatcctcacttctaacactgcagataggtatgtaaatgtaataatataatatgtgctgtgttcatctgacttcttttctcagcatcaggtttatgttatctgttcatattgtgtgtggagcagtaattatttcattctcattgctgtagtatagtactcaattagcttaggggaaacttacctgctttatttttttcttcttaaagcagtgtctaacacagctttaatgtagggttggggtggctttcataattgtcagaaactgcttgctacctggaggctactgggaaggaggaacatgctgttctcctagtaaccagtgaatcaacttggtgatgaagaagctacctccacgcatttcctctgtgccttctgaagtgtctttacttttgctagtagaaagttcgtgatttttcaggtttgttttttagggttatatactctagtagtaacagtaatagctagcatatattgagctttatattaggtacaagtactatgcaaagtgctttccttaaattacctgtttttattttcatgagaactgatgttttattaatgttctggagagtgaggtcttggtcggtgggagtgaatacatcccttaaacatatgttaggctgtggcctctgttatctaactgcttattcttttcatgtgtaggtatgtcattgatggtgccactgctctttggtgtgcagctggagcagggcattttgaagttgttaaacttctagtcagccatggagccaacgtgaaccataccacagtaactaattcaacccccctgcgggcagcatgcttgatggcagactggacattgtgaaatacttggttgaaaataatgccaacatcagcattgccaacaaatatgacaacacctgcctaatgattgcggcatataagggacacactgatgtggtcagataccttttagaacaacgtgctgatcccaatgccaaagcacattgtggagccacagcattgcactttgcagctgaagctgggcacatagatattgtgaaagagctgataaaatggcgtgctgctatagtagtgaatggccatgggatgacgccattgaaagtagctgccgaaagctgtaaagctgatgtcgtagaactgttactctctcatgctgattgcgaccgaagaagtcggattgaagctttggaactcttgggtgcctcctttgcaaatgaccgtgagaactatgacatcataaagacataccactatctatatttagccatgttagagaggttccaagatggtgataacattctcgaaaaagaggttcttccaccaatccatgcttatgggaatagaactgaatgtagaaatcctcaggaactggagtccattcggcaagacagagatgctcttcatatggaaggccttatagttcgggaacggattttaggtgctgacaatattgatgtttctcatcccatcatttacagaggagctgtttatgcggataatatggaatttgagcagtgtatcaagttgtggcttcatgccctgcacctcagacaaaaaggtaacaggaacacccacaaggatcttcttcgatttgctcaagttttctcacaaatgatacatttgaatgaaactgtgaaggccccagacatagaatgtgttttgagatgcagtgttttggaaatagaacaaagtatgaacagagtgaaaaatatttcagatgctgatgtccacaatgctatggacaattatgaatgtaatctctatacctttctgtatttagtgtgcatctctaccaaaacacagtgcagcgaagaagatcagtgcaaaattaacaagcagatctacaacctgattcaccttgatcccagaactcgtgaaggtttcaccttgctgcatctggctgtcaactccaatactccagttgatgatttccacaccaatgacgtctgcagctttccaaatgcacttgtcacaaagctcctgctggactgtggtgctgaggtgaatgccgtggacaatgagggaaacagtgcccttcatattatcgttcagtacaacaggcccatcagtgattttttgaccttgcactccatcatcattagcctagttgaagccggagctcacactgacatgacgaataaacagaataagactccgctagacaaaagtacaactggggtatctgaaatactgcttaaaactcaaatgaagatgagtctcaagtgcctggctgcccgagcagttcgggctaatgacattaactaccaagaccagatccccagaactcttgaagagtttgttggatttcattaagtgactggatatgtaaagtcgtttaatgtggtgctaaaaagtaaaggacttttaatcacagacagtagaattatgtgttcataaattctgcttttctttccactacccttcctcccatcccatccttccttagttctgtatttgtttttcttgcctcatggtaattgatttcagacagactttaacaaaaccacattgttttggtgtaactataaggtatttgcatattggttacctatttgtctttcttttttttaaaggaacagatataaaatgttttgtttatgtaacaagggacatttataatttcaagttgataatgttttaaacagctgcttacaaaagtatttctattaagcctatgtcagcatgttatccatgcagcagttttgaggattttatgaagaaaaagagctaaaaaggaacattaagaggaatgggatatccaggtgttctgcacatgccaaactgctgtagatagtttacactcttccattatttatacggagtgatgcagcacattttagcattcaggaggatttttaaaaaatagctgcagattaatctggaaaatgtgctaatttaataatagttacaaatttataaatttaaatccatttgaaattgttgcattatgctgggtagtatatacaaaatggttatcatcttaaaccaacttttcagagaatcttgatggactctgcctttaggcttgaattcttcaaagtctattttaatgaaatttatctaaattgcagcagtctatttgattcagctcatagacatgtaaaaattatgaatgctgttttcttatgaaacaaattgtcacagtgtagttatacattctatttttgtccccttttccctttttctcctgtatcttttaaaatttggaaactacttttccagaaggcattatttatgcctccctaataaggtattttacttatgacagatgaaaaggaaccaggatatgtttgaattttttcactttcttagtctgtgacaagaagtagaaatatcactagtgtggtataggaacttacatgttttttatgatgaaaataattctcaatgccacttgaaaggtaattgtgtctgagagctgcaaatttttcaaccacaaaatgtcacttattcctacaggctatacagaggtctttatggtttttttgttttgttttaatggcaacattgtaactgtcaaactaaaagggtattctgtgattatcttttaagcattacagaaattcaagtgaaagttatatgcttatttctattgatgttaaaaatgatgatgaaagcaaaattagctgtatctgtaattttctctctagtgccaaatgaatgccttagctactcatagtgcatggtactgtaagtgaagacctgtagctttttttttttctttaatgaaaagcattataatgatgtagcagcatcagatataaacttaaaaaaaaaggtttcaattaacattttatatatggataatgctttgtaaagtgtaagagaaaggttgcagttggatcagtataaaacaatgaccaagccaaaatcagcaccctagggccttaaataaaatagagataccccacaaaatgaaatattttgaaggatgggaggggacagaggggggactatcccccaaggatgcaagatactttttacagttgctatcattatactttgtcttcttgcttcagttaggaaggttttgatggtaaattctgtcatggtaatagatacctattttcctaacctgagattttacaaggaaggtttttaggttggcttaaatggaggtatttatttgagtgagccctaatttgaaaattaccagacttgatcctcctggtatgaatcaaggaaatactgtaccttgctcttagcaactctcagtggcctgaaagagaaaatgcacttcttcaaggtgagtgaatcatgctttttccacagttcagatcagaccctttatttttcaaactacaaggcctgcttattggacagtctaaggaatagctttgatacttggtattcagttggttccattattaatgtatattatttttatttaaacatcaaaacttaaaatatcagataatgttgcatgttttaaaaacacatttcatccctttggctacccaggaccagcactatttaagacactgcttatttataaaatgagaataatgattatatgtacatattcagacatcaaaatttaatgacattctattttgagaagggaagacaatgctgaagaaagtaaaactgttgattgaaatgctgacagggtggagaacgaatttgaagacagtggaataaactatgaactatgctaatggtaattagattttttgtttgtttagtatagtggtaaattgtgtagtatcttgctgagaatctaattctatcttgtaaaatcaatccaaatgtgtattgtgaaacacctgtataaaatcatttttgaaataagtgatctacatgcctgtttttttaaaatgtttttggtagaattgtttgaaaatatgtttagccagacccttccccaacttaattttttttttaaaaaaggaaaataggtaagaaaatgatagttctatatctcagccctctgtgaactctaggctgtctccattttgcagccactttggtcatttgatgtttactattggtatacttatgctttgaattgtaaatcttcattgacggtattacagattcaaccaaaacttctctgtcctgttcagtaattgttatataaatctggatgagctagggaggcccaggtggatgttttcattcgcaaatcatgagaaacttaagtgggttttatgcacttgatagagttggcaaaattgaactatgaagttaactatttaactcaaggaatgggcggcaaacccatcccctcgattgataaagaaggggaacatttttacattagaactgacactgaaaacatagctttttcagtccaccctggttgctctagtagcccacagcccaatcacgttaaggttctttgctgtgggaattttaaataaaccaaaccccaaagcagaccatctgtaagctttggtctgcttgtttctgagaagggttttatttcattatactaatagtggactaataattggtaattgtgagaacttaggtatgataacattgtttgaagtaaaatatgatttgggggcagcagctttctaaataccaactctgtttgacaaatgttttgaaaattaaaatttcaagtgagcaacaccctgttaagagttttcactatagttgaggcagctactttatgaataagaccactttgggttatttaagcagaagcgtttcttttttttttggaatggggtgggatgaggagtgagttgccagacctttgattagtttgctggtttagaaacagccagtggctgaattagtgagtaaatgaatgaaagtataaaggacttgttttttatgatagattttctgtaagaatcttaaatgttccttttcaaattagatgtgttgatgcacacatgactattctgtttttctcactgactatataacattaaaaaggggttaaagaaaacaaaactctgccctttgtgctatgaaatatttttagtccagaggttttaagctgtgtgtccattcctactctgaaaatgcatagctttgttctggatgtcatctcttgaaagtagaaaactcctatgtgtttatcacattgcagggctttcttatgtatttctggcagacttgcccaaatctttagatgggctgggttatacagcatgccctcccccaaataagggatctgaaataaatactacactattgatagtggagatatattaatttttaaaactgtaaagtaaatgtggtctctaggtttgtggtgtgtacctttgtgttaatgtgtagggaagagacagtgacttgatggttatggggagtgtatcttgatgtgtgtataggggtaagtattgctaaattatttacagcttttattcagggtgagtcatgtgatgaatggcctaatcagaaaagtgaaggagcgaagatgcaagcttgccaaatgatgaaatgaacaagattttgtatctattttttatcaggtgttgtaaaatttgtgcatggctttttgttgttgttgcttagtaactggtagaggagaaaagatgaggaaagaaactcagctttcctcacagtcttttcaaaggtacacagttggggagtaaaatctgactggcctaatcgatggaaaagaccctgtccttttcaccccatcctgcaatcctccgtgcagaggaactacactgttgtattctagtaattcactgtgatttataacaaaccggtgatgtcattctattgtgcacttttgtcaaaccatttatgtgactttaataaacatagtaaacttgctgactgaaaaaaaaaaaaaaaaa

SEQ ID NO: 24635 - DNA, 6274 bp, Homo Sapiens
aaaactggggggtttctcttcaaagccagctggactggctttattctgcaggaatttttttacctgtcagggtttggacaacaaagccctcagcaggtgctgacgggtacagcttcctggagaagcagaaaggcactggtgccaaagaagagttgcaaactgtgaagtaacttctatgaagagatgaagtaaagaacggaaggcaaatgattgtggcagtaaagaagtgtatgtgcaggaacgaatgcaggaatttgggaactgagctgtgcaagtgctgaagaaggagatttgtttggaggaaacaggaaagagaaagaaaaggaaggaaaaaatacataatttcagggacgagagagagaagaaaaacggggactatggggagaaaaaagattcagattacaaggattatggatgaacgtaacagacaggtgacatttacaaagaggaaatttgggttgatgaagaaggcttatgagctgagcgtgctgtgtgactgtgagattgcgctgatcatcttcaacagcaccaacaagctgttccagtatgccagcaccgacatggacaaagtgcttctcaagtacacggagtacaacgagccgcatgagagccggacaaactcagacatcgtggagacgttgagaaagaagggccttaatggctgtgacagcccagaccccgatgcggacgattccgcattgaacaagaaagaaaacaaaggctgtgaaagccccgatcccgactcctcttatgcactcaccccacgcactgaagaaaaatacaaaaaaattaatgaagaatttgataatatgatcaagagtcataaaattcctgctgttccacctcccaacttcgagatgccagtctccatcccagtgtccagccacaacagtttggtgtacagcaaccctgtcagctcactgggaaaccccaacctattgccactggctcacccttctctgcagaggaatagtatgtctcctggtgtaacacatcgacctccaagtgcaggtaacacaggtggtctgatgggtggagacctcacgtctggtgcaggcaccagtgcagggaacgggtatggcaatccccgaaactcaccaggtctgctggtctcacctggtaacttgaacaagaatatgcaagcaaaatctcctcccccaatgaatttaggaatgaataaccgtaaaccagatctccgagttcttattccaccaggcagcaagaatacgatgccatcagtgaatcaaaggataaataactcccagtcggctcagtcattggctaccccagtggtttccgtagcaactcctactttaccaggacaaggaatgggaggatatccatcagccatttcaacaacatatggtaccgagtactctctgagtagtgcagacctgtcatctctgtctgggtttaacaccgccagcgctcttcaccttggttcagtaactggctggcaacagcaacacctacataacatgccaccatctgccctcagtcagttgggagcttgcactagcactcatttatctcagagttcaaatctctccctgccttctactcaaagcctcaacaccaagtcagaacctgtttctcctcctagagaccgtaccaccaccccttcgagatacccacaacacacgcgccacgaggcggggagatctcctgttgacagcttgagcagctgtagcagttcgtacgacgggagcgaccgagaggatcaccggaacgaattccactcccccattggactcaccagaccttcgccggacgaaagggaaagtccctcagtcaagcgcatgcgactttctgaaggatgggcaacatgatcagattattacttactagtttttttttttcttgcagtgtgtgtgtgtgctataccttaatggggaaggggggtcgatatgcattatatgtgccgtgtgtggaaaaaaaaaaagtcaggtactctgttttgtaaaagtacttttaaattgcctcagtgatacagtataaagataaacagaaatgctgagataagcttagcacttgagttgtacaacagaacacttgtacaaaatagattttaaggctaacttcttttcactgttgtgctcctttgcaaaatgtatgttacaatagatagtgtcatgttgcaggttcaacgttatttacatgtaaatagacaaaaggaaacatttgccaaaagcggcagatctttactgaaagagagagcagctgttatgcaacatatagaaaaatgtatagatgcttggacagacccggtaatgggtggccattggtaaatgttaggaacacaccaggtcacctgacatcccaagaatgctcacaaacctgcaggcatatcattggcgtatggcactcattaaaaaggatcagagaccattaaaagaggaccatacctattaaaaaaaaatgtggagttggagggctaacatatttaattaaataaataaataaatctgggtctgcatctcttattaaataaaaatataaaaatatgtacattacattttgcttattttcatataaaaggtaagacagagtttgcaaagcatttgtggctttttgtagtttacttaagccaaaatgtgtttttttccccttgatagcttcgctaatattttaaacagtcctgtaaaaaaccaaaaaggactttttgtatagaaagcactaccctaagccatgaagaactccatgctttgctaaccaagataactgttttctctttgtagaagttttgtttttgaaatgtgtatttctaattatataaaatattaagaatcttttaaaaaaatctgtgaaattaacatgcttgtgtatagctttctaatatatataatattatggtaatagcagaagttttgttatcttaatagcgggaggggggtatatttgtgcagttgcacatttgagtaactattttctttctgttttcttttactctgcttacattttataagtttaaggtcagctgtcaaaaggataacctgtggggttagaacatatcacattgcaacaccctaaattgtttttaatacattagcaatctattgggtcaactgacatccattgtatatactagtttctttcatgctatttttattttgttttttgcatttttatcaaatgcagggcccctttctgatctcaccatttcaccatgcatcttggaattcagtaagtgcatatcctaacttgcccatattctaaatcatctggttggttttcagcctagaatttgatacgctttttagaaatatgcccagaatagaaaagctatgttggggcacatgtcctgcaaatatggccctagaaacaagtgatatggaatttacttggtgaataagttataaattcccacagaagaaaaatgtgaaagactgggtgctagacaagaaggaagcaggtaaagggatagttgctttgtcatccgtttttaattattttaactgacccttgacaatcttgtcagcaatataggactgttgaacaatcccggtgtgtcaggacccccaaatgtcacttctgcataaagcatgtatgtcatctattttttcttcaataaagagatttaatagccatttcaagaaatcccataaagaacctctctatgtccctttttttaatttaaaaaaaatgactcttgtctaatattcgtctataagggattaattttcagaccctttaataagtgagtgccataagaaagtcaatatatattgtttaaaagatatttcagtctaggaaagattttccttctcttggaatgtgaagatctgtcgattcatctccaatcatatgcattgacatacacagcaaagaagatataggcagtaatatcaacactgctatatcatgtgtaggacatttcttatccattttttctcttttacttgcatagttgctatgtgtttctcattgtaaaaggctgccgctgggtggcagaagccaagagaccttattaactaggctatatttttcttaacttgatctgaaatccacaattagaccacaatgcacctttggttgtatccataaaggatgctagcctgccttgtactaatgttttatatattaaaaaaaaaaaaatctatcaaccatttcatatatatcccactactcaaggtatccatggaacatgaaagaataacatttatgcagaggaaaaacaaaaacatccctgaaaatatacacactcatacacacacacgcacaggggaataaaataagaaaaccattttccccaccatagacttgatcccatccttacaacccatccttctaacttgatgtgtataaaatatgcaaacatttcacaaatgttctttgtcatttcaaaatactttagtatatcaatatcagtagataccagtgggtgggaaagggtcattacatgaaaatatgaagaaatagccatattagttttttaacctgcaatttgcctcagcaacaaagaaaaagtgaatttttaatgctgaagataaagtaagctaaagtaccagcagaagccttggctatttatagcagttctgacaatagttttataagaacatgaagagaacagaatcacttgaaaatggatgccagtcatctcttgttcccactactgaattcttataaagtggtggcaagatagggaagggataatctgagaatttttaaaagatgatttaatgagaagaagcacaattttgattttgatgagtcactttctgtaaacaatcttggtctatctttacccttataccttatctgtaatttaccatttattgtatttgcaaagctagtatggtttttaatcacagtaaatcctttgtattccagactttagggcagagccctgagggagtattattttacataacccgtcctagagtaacattttaggcaacattcttcattgcaagtaaaagatccataagtggcattttacacggctgcgagtattgttatatctaatcctattttaaaagatttttggtaatatgaagcttgaatactggtaacagtgatgcaatatacgcaagctgcacaacctgtatattgtatgcattgctgcgtggaggctgtttatttcaacctttttaaaaattgtgttttttagtaaaatggcttattttttcccaaaggtggaatttagcattttgtaatgatgaatataaaaatacctgtcatccccagatcatttaaaagttaactaaagtgagaatgaaaaaacaaaattccaagacactttttaaaagaatgtctgccctcacacacttttatggatttgtttttcttacatacccatcttttaacttagagatagcattttttgccctctttattttgttgtttgtttctccagagagtaaacgctttgtagttctttctttaaaaaacattttttttaaagaagaagaagccacttgaaccctcaataaaggctgttgcctaagcatggcatacttcatctgttctcatttgtgccatctgccgtgatgtcgtcacttttatggcgttaatttcctgccactacagatcttttgaagattgctggaatactggtgtctgttagaatgcttcagactacagatgtaattaaaggcttttcttaatatgttttaaccaaagatgtggagcaatccaagccacatatcttctacatcaaatttttccattttggttattttcataatctggtattgcattttgccttccctgttcatacctcaaattgattcatacctcagtttaattcagagaggtcagttaagtgacggattctgctgtggtttgaatgcagtaccagtgttctcttcgagcaaagtagacctgggtcactgtaggcataggacttggattgcttcagatggtttgctgtatcatttttcttctttttcttttcctggggacttgtttccattaaatgagagtaattaaaatcgcttgtaaatgagggcatacaagcatttgcaacaaatattcaaatagaggctcacagcggcataagctggactttgtcgccactagatgacaagatgttataactaagttaaaccacatctgtgtatctcaagggacttaattcagctgtctgtagtgaataaaagtgggaaattttcaaaagtttctcctgctggaaataaggtataatttgtattttgcagacaattcagtaaagttactggctttcttagtgaaaaaaaaaaaaaaaaaaaaaaaaaaaaaaaaaaaaaaaaaaaaaaaaaaaaaaaaaaaaaaaaaaaaaaaaaaaaaaaaaaaa

SEQ ID NO: 24636 - DNA, 7699 bp, Homo Sapiens
gacggttgcctggtattattagcaagcagcaaatatggcggtggcgcgcgtggacgcggctttgcctcccggagaaggatcagtggtcaattggtcaggacagggactacagaaattaggtccaaatttaccctgtgaagctgatattcacactttgattctggataaaaatcagattattaaattggaaaatctggagaaatgcaaacgattaatacagttatcagtagctaataatcggctggttcggatgatgggtgtggccaagctgacgttgcttcgtgtattaaatttgcctcataatagcattggctgtgtggaagggctaaaggaactagtacatctggaatggctgaatttggcaggaaataatcttaaggccatggaacagatcaatagctgcacagctctacagcatctcgatttatcagacaataatatatcccagataggtgatctatctaaattggtatccctgaaaaccctgcttttacatggaaacatcatcacctctcttagaatggcacctgcttacctacccagaagtcttgctatactttctttggcagaaaatgaaatccgagacttaaatgagatctcttttttggcatccttaactgaattggaacagttgtcgattatgaacaatccttgtgtgatggcaacaccatccatcccaggatttgactatcggccgtacatcgtcagctggtgcctaaacctcagagtcctagatggatatgtgatttctcagaaggaaagtttgaaagctgaatggctctatagtcaaggcaaggggagagcatatcggcctggccagcacatccagcttgtccaatatctggctacagtctgccccctcacttctacactaggtcttcaaactgcagaggatgccaaactagagaagattttgagcaaacagaggtttcaccagaggcagttgatgaaccaaagccaaaatgaagagttgtctcctcttgttcctgttgaaacaagggcatcccttattcctgagcattcaagccctgttcaagattgccagatatcccaggaaagtgaacccgtcattcaagtgaattcttgggttgggataaacagtaatgatgatcagttatttgcggttaagaataattttccagcctctgtacacactacgagatattctcgaaatgatctgcacctggaagacatacagacggatgaggacaagttaaactgtagtcttctctcttcagagtctacttttatgccagttgcatcaggactgtctccactatcacctacagttgagctgaggctgcagggcattaacttgggcctagaagatgatggtgctgcagatgaatctgtgaaagggctggaaagccaggtgttggataaggaagaggaacagcctttatgggctgcaaatgagaattctgttcaaatgatgagaagtgaaatcaatacagaggtaaatgagaaagctggactattaccttgtcctgagccaacaataatcagtgctatcttgaaggatgataaccacagtcttacattttttcctgagtcaactgagcagaaacaatcagacataaagaaatcagaaaatacacaaccagaaaataaagaaaccatatctcaagcaacttcagagaaacttcccatgattttaacccagagatctgttgctttgggacaagacaaagttgcccttcagaaattaaatgatgcagccaccaagcttcgggcctgttggcggggattttatgccaggaactacaaccctcaagccaaagatgtgcgttacgaaatccggctacgcagaatgcaagagcacattgtctgcttaactgatgaaataaggagattacgaaaagaaagagatgaagaacgtattaaaaaatctgtacaagaagaggctttcagattcctttggaaccaggtaaggtctctacaggtttggcaacagacagtggaccagcgtctaagttcctggcatactgatgttcctcctatatcaagtactcttgtgccatcgaaacatccattatttacccaaagccaggagtcctcttgtgatcaaaatgctgattggtttattgcttctgatgtagctcctcaagagaaatcattaccagaatttccagactctggttttcattcctctctaacagaacaagttcattcattgcagcattctttggattttgagaaaagttccacagaaggcagtgaaagctccataatggggaattccattgacacagtcagatatggcaaagaatcagatttaggggatgttagtgaagaacatggtgaatggaataaggaaagctcaaataacgagcaggacaatagtctgcttgaacagtatttaacttcagttcaacagctggaagatgctgatgagaggaccaattttgatacagagacaagagatagcaaacttcacattgcttgtttcccagtacagttagatacattgtctgacggtgcttctgtagatgagagtcatggcatatctcctcctttgcaaggtgaaattagccagacacaagagaattctaaattaaatgcagaagttcaagggcagcagccagaatgtgattctacatttcagctattgcatgttggtgttactgtgtagcatgtcttttgggaggcagatatccacttaacttttcttaaaaatactttcagttgcctttgcttttttttggagggaaatactccctacccctaattttgttactacttatatagaatttgtattcatgtcttatatttttcagattctagatattgagctgagttttcattttgattttgttagctttttacttagctgtaaggtaccaaactatttatattgaaagctatatgcactttatttcttaactgaattgcatcaacaatgttcctgtttctttcatgtactcatttactttcaaaaataagctagaatatattaaagaaaatagaaaaaattaccttaaatatataaataagagaattttggcccttctgtgtctgagaaaattaattatatagcaaggaatgaaatttgataaagcaaatataaatgagaaatatgaggattgtgaattattgaaatttgccagtctccctggtgtaaaatgtttttttaaagccttttttcctcctttcggagtcaaggaaagcctttctataagcaaattaaggaagaaaaggtaggattataagatttctcaatggggatgattaaattgtctcatggaaaacttcagttaatgtcatgcatcagttttaacatatgaagtaaagtgttctatccaggattaaagtcaagtttacttaggcaacacaagaatatttcacttagatatgaagaaaggaaacactagtctccattcacttgaaatactctcatggcaaatatttatcctctcattaagtgctttttcaccctataggtaagcatttttgtgccaacatgttgtcagaaattaatgtatgttcatctcctctgttcctgcttatttttacttatatatttcagcagaaggtccgtggccattcacttcaattttgacctctgtcccatagtgaagaacatttaaagtaatactactggtcgaatatgaatgactttttaggaactactttttgtctaacctgaaaaagttccacatttggaagacaatttaatgatggtgaagaaataataaacctcactttacttgttaaaagggatatatatatatatatatatgtctgcaacttcagggagaaataagattgtgtttgaatattgtaggtagatgcatttgtaattaaggataatatcgtttaacaacatgtatttggtttccctcaacttacagacatacagctatttaaaactatggcaatacttaagcatctctaaatttaggtgctaaatatctattattctgttgtagtcattaggtgcccttctctgaagttatgtaaaataaaagcatctgatccttcaaggataaagttgaggatcacatggtatgtggcatttgttgttattgttttttaaagagatggaggctggctctgttggtgcggtgccatgatcatagttcactataacctcgaactcctggctcaagtgatctcccacttcagcctcccgagtatctgggattataagcaagagccactgctcccagctcatggtatttgttgatagtcataacatttttcctgtatggtaagacgtatttttctcagtttataaatacgtagcactcaggttgagacgacttggattttattcttagaaatccagaatcccttgaaaaggaaatattttctgtttcttataaataaaagagtaatcttactttcagaaggattttccttagtgaaacatgtgtaacattgaatgcatgttaaataaaaatggaatttctaactttttttcaatagtgctaattatcttttctgaatgattttgaatgtcttcttaaatataccctatttttctattttaaagttaagtgcctcacttgctgtccatagttagacaaagaaaaaccaatttccactgcactagtaccaaaatactactttatacattagtttttcataaaagctgctggaatgtcatgattcagtattacctaaatagatttctgctaaaatcctctccctcctgtcttttttaagttatggaaaaacacaactaaattcatttgatcatcagcacttgttagcaggatttccttttttacctttgccttgtttctttagcccacaaatagtactcagcatactttcattaaaaatttggcacaatatgataattgttaatattctgttcttcgtctgtgttttatttaacttttactagtgtttagaagtgcaagaatattaaatagccccttccttaactgtacatattatcttgaatgtagataaaatgaaaatactgtaaattagagtgtaggaaaactggcatagagttaatatattttaatgggtttacattatactttaaaagtaatttatataattaaaatatttggttttaactctatgggctattctttggttggctgaagagggaatgggtctagtaaggtttggaaagttaagctttgaacatggtctttgtgtttttttcctaacaaggaaaggtttagttcagctgtgcttttttagtacacatcagttctcttgatttatggaagattcagtttatcaattaagaattcctgcagaagcacagaatcataccatgtaagagttggaaggaagcttaagagatttctgttcgaatctctttgtttcaaagatgaaactaaagcacagcatgttaaatgacttgtctaagttatagctagttagtagtaaataaactgaaaacctatatgctactgtagtccaaaattttattatgtcctcttaatctttacatttagtgagtcagtaaggaaatctctgcatatttctcattctctttgaaagaggaaaaaaacttctaagagagctacaactctatcactcatgacagagttgcttgtagaaaataactaattccttcagaaccctgagtgaattttttctaagaaatgtgacttgattaaaatggtttcaaaagagcaatagtggaaattaaagttttagaaaagagacctggcgtggtggttgacaactgtaatcccagtgctttgggaggctgaggccagaggatcacttgaggccaggagttcaagaccagcctggacaacatagcaagacccccctctctacaaaaaaaaattttttctgaaaagaataagtacattttagagtccatttatttgacgacaggcagtatgacaggttgctgaggtatataaaattttctagagaaatgctgagtttgatgacattttatcttcagttttgtagaacagatgttaaaatgttaactctcctggtgtgcagaaagctgtaatcatgacagtcgataatatgcaatttagtttgattttataggtttaattataaaaggcttcacaatatgcatgttttaggaaaatgttcatttatttagtcatataatcgtttgtatatatgtaaataactttattctggaataatgtgggtgccatcttgagcgtgtgtttttatctgttttggattattttttgtatacaaacaccataatactgtattttcctgttatctacttaagtctagttctactttttcccaataatttcagcaaaatacaagcttgagatattatactatctcccttggtattttttgtgtgcaaagtcttagaattggatttataacattgataataaaaatataaaacgtttttcctcgggagttaagatggtaaaaggaaaaaaatagaatgaatatgatcatttctccatcataaaggaaagaagagacttcattgtgtgtgtgtttttttttattttttcgagatagagtttcactgttgtcacccaggctggtctcagctcactgcaacctccacttcctgggtacaagcgattctcctgcctcagcttcctgtgtagctgggattacaggtgtgcaaccacaaggctcggctaatttttttgtatttttagtagagatagggtttcaccatgttggccaggctggtctcgaactcctgacctcaagtgatccacccacctcggcctcgcaaagtgctgagattacaggtgtgagccactgtgcccagccgagacttcattgtttaatgtatatttttattttttccaaacaccagctcgaatcagagtatatttttattttgccacatacctttaaaaggtatttattgtgtcataatgttttaaatgttaaatatatgataccctcattcatgaagtgaagcagaaagggtctgtaaggaacattctaaacatttttaatgatattgcttttactgatcaagcttgttgtgccatattaaaattaaaagtcaaataaacaaagcagtcctcacagccttggaaagaaatagataattgtcttcttaagatgaggtgctttttatctgtggatgaatggaagtcacactgaattttaattcttatttattttagtggatagcaggaatcactctgtagtagttgtgttcattttcttttctttttcttttcttttttttgagagagtctcgctctgtcaccaggctggagtgcagtggcgtgatctcggctcactgcaacctccatctcctgggttcaagtgattctcctgcctcatcctcccgagtagctaagactacaggcacacgccaccatgcccagctaatttttatatttttagtagagatggggtttcaccatgttggccaggatggtctcaatctcttgacctcgtgatccacccagtttggcctcccaaagtgctgggattacaggcgtgagccactacacctggccttgttcatcttctaattaaatatctttgaatgttttgtaataattttaatgttgacaataagagtttaaaaataatttgattttggactgtatttagatttctctttaattttgctgtagaaatagtaaatgatttaaagtggttatgatgtgttttatgaaggcttactattttatattgtacttatttaatttgtatttgagtctgtctaattttaaataaaaggtttatacatttgaaaaaaaaaaaaaaaaaaaaaaaaaaaaaaaaaaaaagaaaaaaaaaaaaaaaaaaa

SEQ ID NO: 24637 - DNA, 6178 bp, Homo Sapiens
atggacagtgagaaacatggacagagtaaaccaaggattccctctcgtggaaatatatattaccagtcttatgaacatagatcaccttcccctaacataagaaactctttagaaaatgtttatatgtataagcctcacagaggatattcgcctggaagaggggacagtaacaggagagctcagtatatgcccaaatactcagagggtataccctacaaagagcatgaaaggaattcttatccccagaaagtgcaaggagggcatagtcctgatgaccacagagttagaggaagtggaaaaggagggaaaccacctcagaggtcaatagcagattcttttagatttgaaggaaagtggcatgaagatgagttgaggcaccagaggatacaagaagaaaaatactcccagtcaactagaagaggctctgaagactttgagacaaggagctcatttcagaagaggtatcctgaggatcgtgatttcagaaaatatggacacacatcaaaaagacctaaagacgtggagaggtatgaaagcagagagcctgccaggaacccaaagtggaagcctgagcattccctcccaccttaccaagaggacacagaccagtggaaccttgggccccaaacttatcgacatgctgagagggaacacccagagaccagttcagcaaccaaagtatcctatgactatcgtcacaaacgtcctaagctcttggatggggaccaggacttttctgatgggagaactcagaagtactgtaaggaagaagatagaaaatatagttttcaaaaaggccctctaaatagagagttagattgttttaatactggaagagggagagagactcaagatggacaagtcaaagaaccttttaaaccgtctaagaaagacagcattgcctgtacttattcaaataaaaatgatgttgatttgcgatctagtaatgacaaatggaaggaaaaaataaagaaagaaggggattgtagaaaagagagcaattcttccagtaaccaacttgataaaagtcaaaaacttcctgatgtgaaaccctcgcctatcaatcttaggaagaaatcacttacagttaaagtagatgtgaagaaaacagtagatacattcagggttgcttctagctattccacagagagacagatgtcacatgatttggttgctgttggcaggaaaagtgagaactttcatccagtgtttgaacatcttgactcaactcagaatactgaaaacaaacctacaggagaatttgctcaggaaatcataacaataatccatcaagttaaagcaaattattttccatcacctggcattactttacatgagcgtttctcaacaatgcaagatatacacaaggcagatgtaaatgaaattccattgaattcagatccagaaatacacaggagaatagatatgtctttggccgagcttcagagtaaacaagctgtgatctatgaatcggaacagactctgatcaaaataatagatccaaatgacctacgacatgacattgaaagaaggcgaaaagaacggttacagaatgaagatgagcacatttttcacatagctagtgctgcagagagggatgatcagaattccagtttttcaaagaattatactacgcagagaaaagacataattactcacaaaccatttgaggttgagggaaaccaccgaaacacaagagtaagaccttttaagagcaactttagaggtggcagatgccagcccaattataaatcaggcctggtacagaagagcttgtacattcaggctaagtatcagcgtttacggttcactggcccaaggggatttatcactcataagttcagagaaagattaatgagaaaaaagaaggaatatacagatgttgccacaggaatctaatctgaaatcgtacaaatggaaatgacgctacaggaggatgtttgggagcatctctctctttttgtcaggagttagaagtgacactaaggcactaatactgtaacttcttgataaaataactttattttttagtagtggaatgctgcaacttttttacacctaacaattgcttttaaattacagtattcaatttaaaagttgtattaactacagtttcctttgcaaaaagtctcaaaagaatcacttgaagggcattatttgttgatgcatttttctctgagcatggtttcatagagagaacttcaccaagtaatattcagacgtttatatgttgaaagttttgcttacataataaaaacaaaaacaagtgtctgaattgtatagtgtctttacatgaaagaactttaaacagtggccttatggtagaaaattttataccagatttttctttttctgatgacattttggcttataactcgaagttttcttaagtttctgaagatcaaggcctatataattcatacatttcatattataagaaggcaagagacaaggtgcttcaaatattccatcaggtagttgtgagtgcactgaatttttagtaatatgttcattcagtttttttccacaactatttgctcttttccaatttcaaaatgctattgtggaaaatatgtaaagattttgtaatctatagtccatcttatttttccctcagggcaagcttgtgcatatcatatttttaaaggctttttaaaaatctgacaaacaaaatctcatatttgaaaattgtactttactactacagcattacacattttgcaagcacatcttatagagtgtttacttttagttcagttgatatgtattgcatacctactatgtgtaagagcaaatggatgggatttttaaatgaaatttttaggccccaataccttatttctttatgttttctgtgttctgcttaacagtacatatacattcccaattacatttttgtgaaatgtttatttgtaataaaataaaatgttgttgctctttctgcttaaataagttacttgccagtttgtgagagcattattttaattttgtttgagacttatagccttggatagcacctctgtttaaacagtgtttaaagcactgttctgtgcctacaaagacagagctttcaaaattaaaatgtgaaggttgataagaacttggtttttcatgactggatgtgaaaaatcttagtacattcagttttcttgtccatatctttaaaagagagggcagccttttccttaagtgagttcatgataaggggggcaagtgcacttgattcattgctaagcaggtaataaatttgggtagatggcctgtcttgtactgtgtacaatctctataggtcaggttttccaaacatatttagcattccacttatggtaagaaagaaatgcatgcacacaggtagtatggcaactttatattgtgttaggtacttataaaatctgtcttaaattttaaaataattgatttcatttactcccatattctaggggacagtaatgagctttgaatatttaatcatttgattgacaactatgtattgcacagatactgtactaaaattacagcaatgaacaagaagacaagacacatggaccctgcctttatggtacgaagagtctaataggaaaaatggacattaaacagaaatataacttggtaaatcgcctttatagctcgctttttatttattgtaacacataaaggtaagatggctgatttactattattcattccacaactgattccctatttggatattcttttggcactgtctcaatatgcaaagcgtgttatctgcaaaatacctgtgcagaaaacattgtgtgtataagatctaaagcctaaaaggaaaaaccaactttataatttagagtataaaataaggacagggaccgtgtctgtcttgtccaccatagtatccccagcacccagcttcctatttgacgtgtggtaagagttcattaaatattagttgaataatgaatgaataaatagggaataatagaatatgtttattagggactacatgtgtaattttcatatggagattgaacaaaaggttatccatagcattctctattgactggaaagaatttgacttcttgaatgcataagacttgagaagagaagttttttttttttttctttttttttgataagtcccctaccattgcctcctcaccttcctccactacgtgctaggcccttcgctggtactgggaagacaaagataataagacacagtccctgctgtgaggaagctcatgcactgctgaagaagagattcacaaaaacaaagaatcacaatgtagagtaagtactttagtggacatatatacaaaaggttgagaggaaagttgacatttctgattcagcatcccctcgtcatgtttctttcctattggtttcaccaacctcagaaggcactattctgttggtggttttactggttttaaaaattgatgcattgggggaaactgggtaaattgtacgcgggatctctctgtattttttcttttatagctgcatgtgaatctagagttacttcaacataaatttcaatttgaagaattgcccatagtcttatcacagagaacactattataaatattttagatgatacattttcatttttttctattggaaaaaaactcgctacatttatgtgtaacaatttatgtagatgtatactatgtaccacattttacctaataaatcctacatttttgaatagtttttttttaaaaaaaagacggggatacttccaggcagaagcaagaaaagtaaagctggatgagaaactcttattgtctttattacccagcaaattcagtaaccaccaggcacaaattcaccaggaacaaccaagcaaggaaggaagaagaagctgatgcaacaaggtgtggtatgacttcatccctcgcccatccccagaagtagcactgagtaaaacaatggagatgacaaaaatattggtaacagtgggccccagtatggacaaaggcactgacgaggtgaccaggccacgtggaggagagtcaaggaaaactcttgggacaacgaagtctttgcttccatctcaggacctcagcagaaggggtaagattcaccaggactaggcatttcccaggtctcagagcagcctgggaaagccaaatcctgcagaagtcagagacacctttgactgtgtctagtgagttctggttctggacatttaatgggaacctagaagagaggggataccaggttccccaacaaagttccgtcaaataggatgattatgagctctgagtccattaaaatacagaatgaacatttaagaactgaggaatcatagatgtagaatagtatgtaaatgttataaatcttgacaaagaaaaattaatgtacattgacaaattcagacatggaggaggtaaagtgggataaagacttaagaactaaccgtctcatcattcatggccaggtgtcatgtcacgtcatgtcttaaaattataatatggggaaaaacgctagtgaccaaccttaagtttttccacaatcttttttttccttgaccttaatacagtggttctcaaagtgtggtcccagaccagcaacatcagcatcacctgagaacttgttaaaaatgcagattcttggccccaccccagacctcctgaatcagaaaccctgggggtggggccaagcaatctgtgatttaacaagtcctccaggggattctggcacatacttgagtttgagaataactggcttatttatcccttttaggaaccaatgaagaaacatttatctgaagttcagcagccccttcaatttaatgcctaattttttttctattgcattcaaataaagttaaatctaaaacttgtttgctggtctcgaactcctgacctcaggtgatccacctgcctcagcctcccaaagtgctgagattacaggcgtgagccaccaggcccagccaacagtagagcctttcattgttccatctttagagaggcatctcctgtgagcctttcattgttccatctttagagaggcatctcctgtgagactttccatcttggatgttttttttttcttagtaatatgttaaataatgacacatcttccaattgagggtgtatcttagatttgatgacatatgatattaatgccttcaagacatattgcagtaaagaaacttgttgaattcttccaaatataaaaaaaaaaaaaaaaaaaa

SEQ ID NO: 24638 - DNA, 7233 bp, Homo Sapiens
agcgaggagcttttgcggcaggcagagacaatggaagaaaatgaaagccagaaatgtgagccgtgccttccttactcagcagacagaagacagatgcaggaacaaggcaaaggcaatctgcatgtaacatcaccagaagatgcagaatgccgcagaaccaaggaacgcctttctaatggaaacagtcgtggttcagtttccaagtcttcccgcaatatcccaaggagacacaccctaggggggccccgaagttccaaggaaatactgggaatgcaaacatctgagatggatcggaagagagaagcgttcctagaacatctgaagcagaagtacccccaccacgcctctgcaatcatgggtcaccaagagaggctgagagaccagacaaggagccccaaactgtctcacagtcctcaaccacccagtctgggtgacccggtcgagcatttatcagagacgtccgctgattctttggaagccatgtctgagggggatgctccaacccctttttccagaggcagccggactcgtgcgagccttcctgtggtgaggtcaaccaaccagacgaaagaaagatctctgggggttctctatctccagtatggagatgaaaccaagcagctcaggatgccgaatgaaatcacaagtgcagacacaatccgtgctctcttcgtaagtgcctttccacagcagctcaccatgaaaatgctggaatcgcccagtgtcgccatttacatcaaagatgaaagcagaaatgtctattatgaattaaatgatgtaaggaacattcaagacagatcactcctcaaagtgtacaacaaggatcctgcacatgcgtttaatcacacaccaaaaactatgaatggagacatgaggatgcagagagaacttgtttatgcaagaggagatggccctggggcccctcgccccggatctactgctcatccaccccatgcgattccaaattccccaccgtctactccagtgccccattccatgcccccctccccgtccagaattccttatgggggcacccgctccatggttgttcctggcaatgccaccatccccagggacagaatctccagcctgccagtctccagacccatctctccaagcccaagcgccattttagaaagaagagatgtcaagcctgatgaagacatgagtggcaaaaacattgcaatgtacagaaatgagggtttctatgctgatccttacctttatcacgagggacggatgagcatagcctcatcccatggtggacacccactggatgtccccgaccacatcattgcatatcaccgcaccgccatccggtcagcgagtgcttattgtaacccctcaatgcaagcggaaatgcatatggaacaatcactgtacagacagaaatcaaggaaatatccggatagccatttgcctacactgggctccaaaacaccccctgcctctcctcacagagtcagtgacctgaggatgatagacatgcacgctcactataatgcccacggcccccctcacgccatgcagccagaccgggcctctccgagccgccaggcctttaaaaaggagccaggcaccttggtgtatatagaaaagccacggagcgctgcaggattatccagccttgtagacctcggccctcctctaatggagaagcaagtttttgcctacagcacggcgacaatacccaaagacagagagaccagagagaggatgcaagccatggagaaacagattgccagtttaactggccttgttcagtctgcgctttttaaagggcccattacaagttatagcaaagatgcgtctagcgagaaaatgatgaaaaccacagccaacaggaaccacacagatagtgcaggaacgccccatgtgtctggtgggaagatgctcagtgctctggagtccacggtgcctcccagccagcctccacctgtgggcacctcggccatccacatgagcctgcttgagatgaggcggagcgtggcggaactcaggctccagctccagcagatgcggcagctccagctgcagaaccaggagttgctgagggcaatgatgaggaaggccgagctggaaatcagtggcaaagtgatggaaacaatgaagagactggaggatcccgtgcagcgacagcgcgtcctagtggagcaagagagacaaaaatatcttcatgaggaagagaagatcgtcaagaagttgtgcgagttggaagactttgttgaagacttgaagaaggactccacggcagccagccgattggttactctgaaagacgtggaagacggggctttcctcctgcgtcaagtgggagaggctgtagctaccctgaaaggagaatttccaaccttacaaaacaagatgcgagccatcctgcgcatagaagtggaggccgtgcggtttctgaaggaggagccacacaagctggacagtctcctgaagcgtgtgcgcagcatgacagacgtcctgaccatgctgcggagacatgtcactgatgggctcctgaaaggcacggacgcagcccaagccgcacagtacatggctatggaaaaggccacagccgcagaagtcctgaagagtcaggaggaggcagcccacacctccggccagcccttccacagcacaggtgcccctggcgatgcgaagtcggaagtggtgcctttgtccggcatgatggttcgccacgcgcagagctcccctgtggtcatccagccctcccagcactccgtggccctgctgaaccctgctcagaacttgcctcacgtggccagctccccagccgtcccccaggaagcaacctccactctgcagatgtcgcaggctccgcagtccccacagatacccatgaatgggtctgccatgcagagcttgttcattgaagaaatccacagtgtgagtgccaagaacagggcagtgtctatcgagaaagcagaaaagaaatgggaggaaaaaaaggcaaaatctggatcactataatgggaaagagtttgagaagctcctagaagaagctcaggccaatatcatgaagtcaataccaaatctggagatgccgccagccacaggcccactgccaaggggagatgccccagtggacaaggtggaactttcagaagattctccaaattcggaacaggacttggaaaagctggggggaaagtcgccccctcctcctccgccacctcctcgtcgaagctacctgccaggatcgggactcaccaccacgaggtcaggcgatgtggtctacaccggcagaaaggagaacatcaccgctaaggcaagcagtgaagatgctggaccaagcccacagaccagagctacaaaatatccagcagaggagcctgcttcagcctggaccccatccccaccgcctgtcaccacctcctcctcaaaggatgaggaggaagaagaagaagaaggagacaaaataatggcagaactccaggcattccagaagtgttcctttatggatgtaaattcaaacagtcatgctgagccatcccgggctgacagtcacgttaaagacactaggtcgggcgccacagtgccacccaaggagaagaagaatttggaatttttccatgaagatgtacggaaatctgatgttgaatatgaaaatggcccccaaatggaattccaaaaggttaccacaggggctgtaagacctagtgaccctcctaagtgggaaagaggaatggagaatagtatttctgatgcatcaagaacatcagaatataaaactgagatcataatgaaggaaaattccatatccaatatgagtttactcagagacagtagaaactattcccaggaaactgtgcctaaggccagtttcggtttctctggcattagtccattagaagatgaaataaacaaagggtctaaaatctcaggcctgcaatactctatacctgacaccgagaaccagacgctgaattacggaaaggcaaaggagatggaaaagcaaaatacggataagtgtcacgtttcctctcacactagactaacagaatcaagcgtgcatgattttaaaacagaagatcaagaggttatcacgacagattttggccaagttgttctaagacccaaggaggcaaggcatgctaacgtgaaccctaatgaggatggagaatcaagttcaagttctcccactgaagaaaatgcagccactgacaatattgccttcatgattaccgaaaccactgtccaggttctttccagtggggaggtgcatgatattgttagccaaaagggagaagacatacagacggttaatatcgatgccagaaaagagatgaccccccgacaagaagggactgacaatgaggatccagtcgtgtgcctggacaagaaaccagtgatcatcattttcgatgagcccatggacatccggtctgcctataagagactttcaactatctttgaggaatgtgatgaggaattagagagaatgatgatggaggaaaagatagaggaggaggaagaggaggaaaatggggattctgtagtccagaataataacacttcccagatgtctcataagaaggtggccccaggcaatcttagaaccggacaacaggtggaaacaaagtcacagccacactccctggccacagagaccagaaacccaggaggacaggaaatgaacagaacggagctgaacaagttcagccacgtggattctccaaattcggaatgcaagggtgaggacgcgaccgatgaccagtttgaaagccccaagaaaaagtttaaattcaaattccctaagaagcaactcgccgctctcactcaagccattcgcaccggaactaaaacagggaagaagactttgcaagtggtagtctatgaagaagaggaagaggatggcaccctgaaacagcacaaagaagccaagcgcttcgaaatcgctaggtctcaacctgaagacacccctgaaaacacagtgaggaggcaagagcagcccagcatcgagagtacatctccgatttcaagaactgatgaaattagaaaaaacacctacagaacattggatagcctggagcagaccattaaacagctcgaaaatacaatcagtgaaatgagtcccaaagccctagttgatacctcatgttcttccaacagagattctgttgcaagttcatcccacatagcccaagaggcctctccccgacccttgctagttccggatgaaggtcccactgccctagagccccctacgtcgataccttcagcttcacgtaagggctccagcggggccctacagacgagcaggatgcctgtccccatgagtgccaagaacagacccggaaccctggacaaacccggcaagcagtccaaactgcaggatccccgccaatatcgtcaggctaatggaagtgctaagaaatctggtggggactttaagcctacttccccctccttacctgcttctaagattccagccctttctcccagctctgggaaaagcagttctctgccctcttctagtggtgacagctctaacctccctaatccacctgctactaaaccatcgattgcttctaaccctctcagcccccaaacaggaccacctgctcactctgcctccctcatcccttctgtctctaatggctctttgaagtttcagagcctcactcatacaggtaaaggtcaccatctttcattctcaccgcagagtcaaaatggccgagcaccccctcctttgtcattttcctcctcccctccttctcctgcctcctccgtctcactgaatcaaggtgccaagggcaccaggaccatccatactcccagcctcaccagctacaaggcacagaatggaagttcaagcaaagccaccccatccacagcaaaagaaacctcttaaaggtcaaatcctattaggcacaagtcggagttacatttaaaaaaaattaacagtctacaacaactgttttcacaagagaatgtaacatattgctgtatcgtttgaggcttaatgctaaatatgtgctaaatactggattaatagatttcagtaaagctcgttcgttttgtttggttttctttttacctagttgctatagtgtctacagtctatactcaatacctataaaatgcagtaagcatgtgttacagaaagaggttctggtgggagagaaaggtgcgtgtgagacaggagaattgtcttaagcatataaaacatgtatgattccagaattttagtatgttttgtataaaactatttttcattacggagactagaagtgaacagagaattacacaagtgtgactatacaaattgtaaaacagatactataatatttccttttattttagtgttatttagctttattacagatttctatttttgtcaaaacttcatggttcctttcaagatcttttttgccaaaacattttgatactatagcattgtacatttgaaagtagtgttctagactataaaaccaatgaacttctacatgagccctacagacaggcatgtgtagaaggcaatttatcaaacctattgcactgccatgaaaagtgtgtataataatttgctagcccaagcaagctagttttctttgcttgcttcttttctttcttttttccttcctttttttttttttttttcttttttaacatgttgagattctctagttgttttctttggcgtatctaaccccttcttttgttttctgagacctggtaacccacgctcttgcattgtggattttaaaatgtatactctgtacggttctgtaaaccgaaaaacttttgtaaatatataaatatacatagacataaaaatactgtatgtgacagcacatagagtagttttcccacaccaaagttaatttttatgcatgctttaaaagtatatatcgggaccggcagaaatggaagtatccatacatttttaaaaagcaacaagtttgcacagctagagtgtttttgtaaataaatgtatttgtataacacagtcatgtaatatacagaactataagcagagactttgcaaaactaaataaagggctgcatgcttattattttttgtaccttgtcactataactacttcctagtcaaagaacgaaatgtaactgttaccgagttaaatgtttttccgctttgagggatgtaaccacatccactcagaggacactacttttctgaaagctcaggggtgactaatgatgagttcctaataaattaattgcaagtgtggtgccttggaaaaaaaaaaaaaaaaaaaa

SEQ ID NO: 24639 - DNA, 6926 bp, Homo Sapiens
cagtcggacaaccgcagtttggcagaagcctgttcagaaggagatgtaaatgctgtgcgaaagttactcattgaagggcgaagtgtaaatgaacacacagaggaaggggggagcctcctttgtttagcttgttctgctggatactatgagcttgcacaggttttgttggcaatgcatgcaaatgtggaagataggggaatcaaaggtgacattacacctttaatggctgctgctaatggaggacatgtcaaaattgtgaagttgctgctagctcataaagcagatgttaatgcacagtcttcaacaggcaatacagcacttacatatgcttgtgctggaggctatgtagatgttgtaaaggtgctcttggaatccggtgctagtattgaggaccataatgaaaatggtcatacccctcttatggaagctggaagtgctggacatgtggaagtagccagattgctgctagaaaatggggctggcattaatacgcattctaatgaatttaaagagagtgcccttaccttagcttgttacaaaggacacttagagatggtgcgatttcttttggaagcaggcgcggatcaagagcataaaacagatgaaatgcacactgctctgatggaggcttgcatggatggccatgttgaagtagctaggttacttcttgacagcggtgcccaagtgaacatgcctgctgattcatttgagtcaccattaactttggctgcatgtggtgggcatgtggaacttgtggctttacttattgaaagaggagctagcctggaagaggtcaatgatgaaggttatacaccattgatggaagcagctcgagaaggacatgaagaaatggtggcattacttcttggtcaaggagcaaatatcaatgcacagacagaagaaactcaagaaactgccttgactctggcttgctgtggaggctttctggaagtggcagactttctaattaaggcaggagccgatatagaactagggtgttctacccctttaatggaagctgctcaagagggtcatttggagttagttaaatacttattagctgcaggagctaacgttcatgcaacaacagcaacaggggatacagcactaacatatgcctgtgaaaatggtcatactgatgtagcagatgtcttacttcaggcaggcgcagatctggaacatgaatctgaaggtggaagaactcctttaatgaaagctgcaagagctggtcatgtttgtactgttcagttcttaattagtaaaggagcgaatgtgaatagaaccacagctaataatgaccatactgtactgtccctggcttgtgcagggggtcatctggcagtggtggaactacttttggctcatggggcagatcctactcaccgtttgaaagatggctcaactatgttgatagaagcagcaaaaggtggccatacaagtgttgtttgctatctcttggattatcctaataacttgctttcagcccctccaccagatgtcactcagttaactcccccatcccacgatttaaatagggctcctcgtgtaccagttcaagcactgcccatggttgttccacctcaggagcctgacaaaccacctgccaatgttgccaccactcttcccatcaggaataaagcagtcagtggaagagcatctgcaatgtcaaacactcctacccacagtattgctgcatccatttcccaacctcagactccaactccaagtcctatcatctctccttcagccatgcttcctatctaccctgccattgatattgatgcacagactgagagtaatcatgacacggcgctaacacttgcctgtgctggtggccacgaggaactggtacaaacactgctagagagaggagctagtatagagcaccgagacaagaaaggttttactccactcatcttggctgccacagctggtcatgttggtgttgtggaaatattgctggacaatggtgcagacattgaagcccagtctgaaagaaccaaggacacaccactctccttggcttgttctgggggaagacaggaggtggtggagctattgttagctcgaggggcaaataaagagcacaggaatgtttctgattacacacctctaagtctggctgcttctggtggctatgtgaacatcatcaaaatattactaaatgcaggagctgagattaactctagaactggtagcaaattgggcatctctcctctgatgttagcagctatgaatgggcatacagctgctgttaagctcctgttagacatgggctctgacataaatgctcagatagaaaccaatcggaacactgcccttactttagcctgcttccaaggaagaactgaagtggttagtcttctgcttgatagaaaagcaaatgttgaacacagagctaagactggtctcacaccactaatggaagctgcctctggtggatatgcggaggtgggccgagttcttttggataaaggtgctgatgttaatgcccctccagttccctcctcaagagatacagctttaaccatagcagcagataaagggcattacaaattctgtgagcttcttattggcaggggagctcatattgatgtacgtaacaagaaggggaacactccattgtggctagcagcaaatggtggacacctcgatgtggttcagttactggtgcaagcaggtgcagatgtggatgcagcagataaccgcaagataactcctcttatggcagcatttagaaagggtcatgtgaaggtggtgcgctacttagtcaaagaagtcaatcagtttccatcagattctgaatgtatgagatacatagcaaccatcactgataaggagatgctgaagaagtgtcatctttgtatggagtcaatagtacaagccaaagatagacaggctgctgaagcaaacaaaaacgccagcattttgttagaggagttagacttggaaaagttaagggaagaaagtcggaggctggctttggctgcgaaaagagaaaaaagaaaagagaagagaaggaagaaaaaggaagaacaaagaaggaaactagaagaaattgaagccaaaaataaagagaactttgaactccaagctgctcaagaaaaagaaaagcttaaagttgaagatgagcctgaagtcttgacagaacctccaagtgccacaaccactactaccataggtatatctgcaacctggacaactttggcaggttctcatggtaaaagaaataataccataactacaaccagttcaaagaggaaaaacaggaaaaataaaattactccagaaaacgttcaaattatatttgatgatccactaccaatttcatacagtcagccagagaaggtgaatggagagtccaagagcagcagtaccagcgagagtggggacagtgataacatgaggatttccagctgcagcgatgaaagtagtaacagcaacagcagtcgtaagagtgacaatcattcaccagctgtggtcactaccactgtgagcagcaaaaagcagccatcagttcttgttacatttccaaaggaagagagaaaatctgtttctggcaaggcttcaataaaattgtcagaaactatcagtgaagggaccagtaattctctatctacttgtacaaaatctggtccatctcccctttcttctccaaatgggaagttaacagtagcaagtcctaagcgtgggcaaaagagggaagaaggatggaaagaagttgtaagaaggtcaaagaaagtatctgttccatcaactgtgatatccagagtgattggaagaggaggctgtaatatcaatgctattcgggagtttactggtgcacacatagatattgataaacagaaagacaagactggagaccggataatcactataaggggtggcactgaaccaacaagacaagcaactcaattgattaatgctttgatcaaggatccagacaaagaaattgatgaacttattccaaagaatcgtttgaaaagctcctcagcaaattccaaaatagggtcatcagcacctaccaccactgctgctaacacttccttaatgggaattaaaatgacaactgtagctctgtcatcaacatctcaaactgccacagcactcactgtgcctgcaatttcttctgcatccactcacaaaaccattaagaacccagtgaataatgtgaggcctggttttccagtttctcttccattagcatatcctcctccacagtttgcacatgctttgcttgctgctcagactttccagcagatccgtccaccaaggttgcccatgacccactttggaggtacttttccaccagctcaatccacttggggtccgtttcctgtcaggcctttgagccctgccagagctactaactcgcctaagcctcacatggtgcctcgccatagcaatcagaatagcagtggttctcaggtgaattcagcaggttctttaacttcaagcccaacaactacaaccagttcatcagcttcaacggtgcctggtacatctacaaatggcagtccaagttcaccttctgtccgaaggcagctttttgtcacagttgtgaagacatccaatgccaccacaacaacagtcacaaccacggcaagcaacaacaacactgcacccacaaatgccacatatcctatgcctactgccaaagaacactatccagtatcatccccatcttccccatcaccaccagcccagccaggaggggtttctagaaacagccctttggattgtggatcagcatctccaaataaagtggcatcttcctccgaacaggaagcaggtagtccaccagtagtagaaacaacaaacactagacctccaaacagcagcagttcttctgggagttcatcagctcattctaatcagcaacaacctccgggatctgtttctcaggaaccaagaccacctcttcagcagtctcaggttcctcccccggaagttagaatgactgttcctcctttagcaacaagttctgctccagtggcggtgccttctactgccccagtgacttaccctatgcctcagacaccaatgggatgcccccagcctactcctaaaatggaaacccctgctattagaccaccccctcatggcacaactgcccctcacaagaattcagcttcagtgcaaaattcatctgttgcagtcctcagtgtcaatcacattaaaagacctcacagtgttccctcttctgtccagctaccttcgaccttaagtacacaaagtgcttgtcagaattcagtacatccagcaaataagcctattgctcccaatttcagtgcccccttaccatttgggccctttagcacattgtttgaaaacagccctacttctgctcatgccttctggggaggatctgttgtttcatctcagtcaacaccagaatctatgctatcaggaaaatcctcatatttgccaaattcagatcctttacatcagtctgatacttccaaagctccaggttttagaccaccattacagagacctgctccaagtccctcaggtattgtcaatatggactcgccatatggttctgtaacaccttcttcaacacatttgggaaactttgcttcaaacatttcaggaggtcagatgtacggacctggggcaccccttggaggagcacccgcagctgctaactttaacagacaacatttttccccgcttagtttgttgactccgtgttcatcagcatcaaatggttcttctgcacagtcagtatcctcgggagttcgtgcaccatctcctgccccatcatcagtaccgttagggtcagaaaagcccagcaatgtgtctcaggacaggaaagttccagtccctattgggactgaacgttctgcacgtatcaggcaaactggaacgtcagctccatctgttattgggagcaatttgtctacatcagtaggacatagtggcatctggtcctttgaagggattggtggcaatcaagacaaagtagactggtgtaaccctgggatgggaaatcctatgatccacagaccgatgtctgacccaggagtattttcacaacatcaagcaatggagcgagatagtacaggaattgtaactccttctggtacattccatcagcatgttcctgcaggctacatggactttcctaaagttgggggtatgcctttttctgtgtatgggaatgcaatgattcctccagtagcacctatccctgatggtgctggaggacccatatttaatggccctcatgctgcagacccttcttggaactcactgataaagatggtttccagctccacagaaaataatggccctcaaacggtgtggactggaccctgggcacctcacatgaacagtgtacatatgaaccagcttggctgatgaggatcagcttgttagcctgcagattccttttcatttggaggaaatcacaagtggccgaaaaaaaaaattatgctcccaaatcattctactgatgtgcttgactgaagtgtgtaggctttttgcagaagatcttactaactgacctattttctgtgaacatttgtgactgcccattccccatcatcatccgttttaccttagttagcatttttcttatcatttttctttttttctttccctcttcccctttggacataactttctgttgaagctgttctttggctggttggttttagtactgtaaactgcttctgagcaaacacggaaatttagcaaaattatgtaaacttgatcctgaagttttagaatggcaaataaatgtacaattgtttacataacagaaaaggctaagcagaaagtaaatttcaatatgtcagtatagaggctctactttatgtagacttaaattaatgtgagatatgtaccttcatattcagaaatctggatgtttccttcatacattaaactattaataagcataaaaaaaaaaaaaaaaa

SEQ ID NO: 24640 - DNA, 6466 bp, Homo Sapiens
cgccaagttgaagcgcaaggctgcggcaaagctgcgcgagatcgagcagagctggaagcacgagaaggcggtgcctggggaggtcgacagtctgcgcaagctcagccccgaccgcttccagcgaaagcggcgattgagcggggctcaagcgccgggcccctcggtccctaccagggagcctgagggtgggaccctggcggcttggcaggagggagagactgagactgctcagcactcaggtttgggcctgatcaacagttttgcttctggagaagtgaccaccaacggggaggctgcccccgagaatggagaggacggagagcatggcttgctgacatacatctgtgacgccatggagctggggcctcagagagccctcaaagaggagagtggggccaagaagaaaaagaaagatgaggaatccaagcaaggcctgcggaagccagagttagagaaggcagcccaaagccgccgttcttcagaaaactgcatccccagctcagacgagcctgactcctgtgggactcaggggcccgtgggcgtggagcaggttcagacccagcccagaggcagggctgcgcgggagcctgggtcctctggcacagatagtaccaggaagccagcctctgctgtgggcactccagacaaggcccagaaggcccctggcccaggcccaggccaggaagtgtatttctccttgaaggacatgtacctggagaacacccaggcagtcaggcctcttggggaagagggaccccagaccctgagtgtccgggcgcctggagagagtcccaaggggaaggcacccctcagggctagaagcgagggggtgcctggcgctcctggccagcccacacactccttgaccccccagccgactaggcctttcaacagaaagagatttgcccctccaaagcccaaaggagaggccaccactgacagcaagcccatttcttctctgagtcaagctccagaatgcggggcccagagcttaggaaaggccccacctcaggcctctgtgcaggtgccgacgccccctgcccggcggagacatggcacccgggacagcacgttgcaggggcaagcaggccacaggactccaggagaggtcctggaatgccagacaaccacggctcctaccatgtcggccagcagcagctctgatgtagcctccattggggttagcacttccggaagtcaaggtatcattgaacccatggatatggaaacccaggaggatgggagaacatctgctaaccagagaactggaagcaagaagaatgtgcaggcagatgggaagatacaagtggatggaaggaccaggggagatggaacacagacagcccagaggacacgtgcagataggaagacgcaggtggatgctgggacacaagaaagcaagaggccacagtcagacaggagtgcacagaagggcatgatgacacagggaagggcagagacacagctagaaacaacacaggcaggtgagaagatacaggaagacaggaaggcccaggcagataagggcacacaggaagacagaaggatgcagggagagaaggggatgcagggagagaaggggacgcagtcagaggggagcgcgcccacagccatggaaggtcagtctgagcaggaggtggcaaccagcctcggcccaccatccagaacccccaaactcccacctacagcgggtcctagagctcctctgaatattgaatgttttgtacagaccccagaagggtcttgtttcccaaaaaaacctggttgcctgcccagatctgaggaggcagtagtaacagcctccaggaaccatgagcaaactgtgctgggtcccctgtcagggaacctcatgctcccagcacagccgccccatgaggggagtgtggagcaggtgggaggagagagatgccgagggccacagtcatcaggcccagtcgaggccaagcaggaggacagcccgttccagtgccccaaggaggagcggccagggggagtgccgtgtatggatcagggtggctgtcctctagctggcctgagccaggaggtacccacgatgccttctcttcctggaactgggctgacagctagcccaaaggcggggccgtgtagcaccccgacttctcagcacgggagcacagccaccttcctgccctctgaggatcaggtcctgatgagttctgccccaacactgcacctggggctggggacccccactcagagtcacccaccagaaaccatggccaccagcagtgagggggcctgcgcccaggtaccagatgtggaggggcggaccccaggtccccggagctgtgaccctggcctcatagattccctgaagaactacctgcttctgctgctgaagctgtccagcacagagacaagtggagcagggggagagtcccaggtgggggcagccaccggaggtctggtgccctcagccactctgacacccactgtggaagtggctgggcttagtccccggacatcgaggcgcatcctggagcgtgtggagaacaaccacctggtgcagagtgcacagaccctgctgctgagcccctgtacctcccgccgcctcaccggcctcctggaccgtgaggtgcaggctggccgccaggcccttgctgctgcccgaggctcctggggtcctggtcccagctccctcactgtccctgccattgtggtagacgaggaggaccctgggctggcctcagaaggagccagtgagggtgaaggagaggtttcccttgaggggcctggcctcctgggggcctctcaggagagcagcatggctggtcgactgggggaggcgggtgggcaggcagcccctggacaggggccctcagcagagagcatagcccaggagccctcccaagaggagaagttcccaggggaggctctgacaggcctcccggcagctacacctgaggaactggctctaggggcccggaggaagagatttctccctaaggtcagagcagcaggagacggggaggcaaccacacctgaagaaagggagagccccacggtttccccccgggggcccaggaaaagcctggtgcctgggtccccagggactccagggcgggagagacgctcccctacgcagggcagaaaggcgagcatgctggaggtgcctcgggcagaggaggagctggcggcaggagacctgggccccagccccaaggccggcggtctggacacagaggtggccctggatgaaggcaagcaggagacactggccaagcccaggaaagccaaagacctgctgaaagccccacaggtgatccggaagattcgggtggagcagtttcctgatgcctccggtagcctgaagctgtggtgccagtttttcaacattcttagtgactcagtcttgacatgggccaaggatcagcgcccagtgggcgaggtgggcaggagcgcaggggatgaggggccggcggccttggccatcgtgcaggcctcccccgtagactgcggtgtgtatcggtgcaccatccacaatgagcacggctcggcctccaccgacttctgcctcagccctgaggtgttgtcaggattcatctccagagaagaaggtgaagttggagaagagattgagatgacccctatggtgtttgctaagggtctggctgactctggctgctgggggggcaagctctttgggcgactggtaagcgaggagctccgagggggtggatatgggtgtggccttcggaaggcctcccaggccaaggtcatctacgggctggaacccatcttcgagtcgggccgcacgtgcatcatcaaggtgtccagcctgcttgtgtttgggcccagcagtgagacttctcttgtgggcagaaactacgacgtcaccatccaggggtgcaagatccagaacatgagtcgggagtactgcaaaatcttcgcagcagaagcccgggccgcgcctggctttggggaggtgcctgagatcatcccactgtatctgatctaccggcctgcaaacaatatcccatatgctaccctggaggaagacctgggcaagcccctggagtcttactgttctcgggaatggggctgtgctgaggctccgacagcatctggcagctctgaggccatgcagaaatgccagaccttccaacactggctgtatcagtggacaaatggcagcttccttgtcacagacttggcaggggttgactggaagatgactgatgtgcagattgctaccaaactccgaggataccagggcctcaaggaaagctgcttccctgccctgctggaccggttcgcctcctcccaccagtgcaatgcctactgtgagctgctggggctgacacctctcaagggcccggaggcggcccacccccaagccaaagccaaaggctctaagagtccatctgctggcaggaaaggctcccagctgagtcctcagccccagaagaaaggcctccctagtcctcagggcacccggaagagtgctccaagttccaaggccacccctcaggccacagagccagtcaccactcagttgttgggacagcctcccacccaagaggagggctccaaggcccagggcatgcggtagcctccgcagaggctgggggcctccacccagcagcagaccaaccaggaagcagcttgaactggatggagactttccaaatatggaactaactggagaaggtgcacgaaggagacaccacttggggacctctctgagcaggctctcgtgaatcagctcgtcatcagatggctttggtgcatggcacatagcccactggcctcttctggtgccactgtcacccagggctcccgggcctcaagcagtccccacctccgagtgcctggcaacctaggccctccttgaagtttacactttgccactgctggaggctcccctgagtcctctgcatgagttctgcaccccaagcccttgccccagcccagtccagcagcagatgttacaatctgagtgaggacatgcaggccaacttttaccctcctgcatttgcctggccctgatctcgcctgtcctcagggatccagacttcctctgctggtctggcctggtgactctcagggtatcttctccttccagctactttcgctcactgatctcagcttatcctgcaactaaccatccttgagcccagatggggctcagggcccttccagagcctgtcatgtccttgtgcagtggcctttgatgtgtgttcacgctcttcccccttcactcactcgcctgcttcccatgctcccttgtaccccctcgccacatccctgtcttggggcccagctgcagcctgctgcctgcccttcatggctctgcacatggccctttgcttgagggctccccactccctgcccaccaatacccaggtgaggaacagaccctctggcctctcaccccacttcagtgctctcttccccaacttctctcgggctctttgctcatgaggtgagagctggtgtgagggttgtgtcagcagctgtagccagagagaggtgttgactctgagagaccttgcactccatactgaaaggaggtggggtcacagtgaatttcacatcccctctcaaccaggagtggagggctaggtcccttccccatggggagtacacttgggtgttctaggagggatgcagtctatccatgcacttgggtggaggggagtctctgtgcctgggaattaggacccctgctccaaccatcgctcttgatcctggggccccagctctgggtcctcatgtatgggctcccaaggacccagcagcctggatccttccagagcatccctcctggaggcctgggatggggtaggtctgcagctagcctactccctttggaatgcaataaaggcagcattgtgtgccctgcttgccctcatctggtgtggttggaggtctgtggagtcaaggtccccctctcccaggcaggctctctgagggcattctgtagtcccaggcccactggaaaaatgaatctatattttggttcctggaccgaagttcagtcgcagccttctgtggccacagaaagacagcttgtgctgcttgcacaactgagctgctggtgtgtaccccttagcagggtgtctggggacctacgcctttggaattgctcttcattcagaagaggaacacaaaggaagccacccaggaaggaagcacagagctgggggctctggaaacgccctgtgtctctggctacagcaagaccagcccaggagcccaccagcacctgcctctcagctacttgctgaccatttcctgcttctcaagctgcagagaagcttttcattcccacccccacccagaacctccccttgcctaacatttcccctctatggtaacatctctgacttctctacctcctctgtgctcaggtgactccacatcttctgccccagtgtgtccccacctctcccagcctgtatacccagattactttggtgaactaaaaaaaaaaaaaaaaaaa

SEQ ID NO: 24641 - DNA, 8254 bp, Homo Sapiens
agggagtgtggtggcattgctctgcagagacatgaacagctccctgggagacactgctggggaaagatgagtcgagtctacggttttttctcatcctcctgtttattttcttgaaaaggctccaggcttcggcttggaaaatcccaccgccaaaattgagcccagcagctggagcggcagtgagagccctgccgaaaacatggaaaggatgagtgactctgcagataagccaattgacaatgatgcagaaggggtctggagccccgacatcgagcaaagctttcaggaggccctggctatctatccaccatgtgggaggaggaaaatcatcttatcagacgaaggcaaaatgtatggtaggaatgaattgatagccagatacatcaaactcaggacaggcaagacgaggaccagaaaacaggtgtctagtcatatacaggtcttagcaagaaagaaagttcgagaaattcaagccgccattaaggtgtctagtcacattcaggttcttgccagaaggaaatctcgtgattttcattccaagctaaaggtaacaagcatggatcagactgcaaaggataaggccctgcagcacatggcggccatgtcctcagcccagatcgtctcggccactgccattcataacaagctggggctgcctgggattccacgcccgaccttcccaggggcgccggggttctggccgggaatgattcaaacagggcagccaggatcctcacaagatgtcaagccttttgtgcagcaggcctaccccatccagccagcggtcacagcccccattccagggtttgagcctgcatcggccccagctccctcagtccctgcctggcaaggtcgctccataggcacaaccaagcttcgcctggtggaattttcagcttttctcgagcagcagcgagacccggactcgtacaacaaacacctcttcgtgcacattgggcatgccaaccattcttacagtgacccattgcttgaatcagtggacattcgtcagatttatgacaaatttcctgaaaagaaaggtggcttaaaggaactgtttggaaagggccctcaaaatgccttcttcctcgtaaaattctgggctgatttaaactgcaatattcaagatgatgctggggctttttatggtgtaaccagtcagtacgagagttctgaaaatatgacagtcacctgttccaccaaagtttgctcctttgggaagcaagtagtagaaaaagtagagacggagtatgcaaggtttgagaatggccgatttgtataccgaataaaccgctccccaatgtgtgaatatatgatcaacttcatccacaagctcaaacacttaccagagaaatatatgatgaacagtgttttggaaaacttcacaattttattggtggtaacaaacagggatacacaagaaactctactctgcatggcctgtgtgtttgaagtttcaaatagtgaacacggagcacaacatcatatttacaggcttgtaaaggactgaacatggttatttatatatatagatatctgtatatacacacacacatatgtgcacacacacactctctctccattatcgaacgactgactgtaaacctcaccacacagggtggtgccctggccccgaggtcaccccgacttttctaaatcttgtttgagtgaagtcattttttcatgtgttcatactatcattgtagctgtgaagttctggtacagttgtaaaaagagaaattgagttgtttctctatgttcttcagatgtgcagcccacaattcctcgggaaaggtgaacctgaacaacccaagtctctctctgcagagccctgtttctaattgtggtagaaaatattgagacagagcatttgccatgggacatttacagcctttatacaaatgtatttagttctcttttttccaacataaaattcttgttttaagatacaagtaaaattaatctttaaatataaatgtaaattagtacacaaaactaagaatctttagacttatctttgtaactaattagggtggaagttatgaaagaatgtaattcactaaattattttttaaatgaaacctttttttttctttttgaaaccaaatgttaaactatagccttaagaaatgcttggtagaagtgtcctaatgagacaaatttgtacttttatcctcaaggttaacactaatctcctaatccattaaactcttgaacaggtattacaaaggaagaaaacttcaccccttatccttaacatatatagtatatttaaaaaatataaaattgtattgtactaatgtgatgatggattatttaatgaaaaagaaaaaatggctctttttgcaataagtagatacatactgaaaaagtctaaacttacaatgtttatagtcttgtgtgtgcagttatattttatatggacgaccaaattttttattaagatgagtaaatatttgaaccactgaattttaataacaaaattttaaaattggcatgaatacggaatactgcactgtgagatgcaaagtatacagaatctgtggctgggagaaaatttcatcaaatagacaagtaaaaggctcatcagttttagcatctctgctccccagaaaattgtaagcatcctcaccagcctgtggatacattctttatttctagtgacccaatatgcatattaacctgctataactagggctatatgtgtaggtatgtgtatacatatacacaaatgcacatatagagttaacacatttagtgaacacttgtttagtgtcactcagtttgctaggtgctgatatgtacgtatatctcaatgtgtctgtagacttagatacatcctcttgaagcacatccatttctttagcgtctctcagtaagttacagtacttgtttgacttaggtttaagaggcccagctacctatctctgaccttttcaaataggctcatttgggagattcttttgccaggagagattcaactttccaatctaagtattccagagcattgcccaggcagagttggtttgatgtggccagatgttttgagttatttcccttaagtgtttcactggggagagaacagggagtgctcctccagcttcccaaagaaatatgtttttgtaagtggtaggaacatgtgcacacaatagaacatgaaataagttttttaacttgtaaaacatgtcaagatttttccaccaagctagaaaataaaaaacttagttctaccacatccaattaacttacacacccccttccctgtctcaacacctgctttgaccctgcttttctattattacatcagtcagcatcttgtggtccctaacatgaggatgtggctggctcgtgggaaacagcaaaacactaagcctgacctctcccaaattgggaagaccagaggagaaagtgcaaaactgtccccatttggaatgcccattccttctagaaagcagttggacagtgctcctctgcccttcataaacagactactgttgggtccctgattccaggctggcctgtgaaggattgccccaggtgtcccctttcacggttgtcacatttacagtgacttctgttgaacacccctcttagggatgtttcttttgctcttatttcctgcatctttccttaagggaagccccatcctctcccaggaccaggagtatatgaccaggcgagcacaaatggctaaaagccaagctgtcctagaacttcagtgggagagctgtctggttcatcttctacccaggaatggtacttttcagtgcagccaggagggctcttgggatttcctttccaaagcacaaaaatactgggacccaagaagaacagctagaggacaactctgttggcacagagacggggacagcccagtctgctgacctcacagggtcagctgggcccccctggtgcttcaccacctgcatcctcttgctcagaatgcctttgcagttgagttttctgggtttctatgattgaccttgaggtttactccttgctcttacaacatttctaaggatttttaaaagtttacttcttgtcttgttcttctaaagctttctccaggacagatattttccctgtcttaaccactggtccagtcatcccagtgggcttctctttgtctctcccagattagacctttgggtgagattggcatcacaacatctaatctgagtctgtcttttgtccttcattctgtatggcagtctccctttgttataaaagctttctaaagcatactaaagaagccttcccagagccccgtcttgcttctcttccaggtgctctatcccctcgagaccctctggtgccaggcttgcttcacggccatcttgtgttgtcactgcagagtttggaggccagttttccacagcctaaacagggaggagctgcagaatggggctctggtctctgggcattcatttccctcatagaggctgagaataaaacaaggacttattcacacatgttctagaaccccagaatggcccaagttacctgagaccagggtttctcaaccttgacaccattgacattttggactgggtaattctttgttctgcagagctgtcctttgcactgtaggagatttactaatatccctggcctctacccagtagtaccactagcacctattccccacccagcgtgtctccagatattgtcaaatatcccatcgggtgcaaaatgatccctggtcaagatctgttgcccaagatgttacaggtcacaatgaccacatttgaaattgttttccctttcattttaccctgtgaaagcatctctcctagagccttgcaagaggcaggtgacattgtgtccatatttcttcctgtttcagaacttctgtttcacaacaatttctctctcgctacaagtattctttcactcagcactggggaagttgggaacagctggtcaccatcatccctttaatcaactcacacctgtttaaagagtgtttctgatttgaccttcatcccttagtttactggcgttaaaaaagtctcagcaattttcattatttctcgtgggtctcattatcaaacctttacttattttggcatatttcctctgggcttcttctagtttctgccttacaagcaatgctgttctgtaaatttattgaaacctctggaacatttcacctttagagatggaggatggaaggattggtaccagaagagggctaagatacgttttctgtcttgagctgaaagcacagtctactctccttcgttttgtcgatgagaaagttgaggccagaggggaggtgacatgtttagagtcacccagctggttagtgacagaaaaagcgtgagagttgtctaggattcctgccactttggtccctggcctctcctgggggaggctgctgttcttaggtgctctaagcttaatccctcagaatgtgtggacaggtcagcttagaagagatggggagattcaggatccccctgtgccagagcacagcctcaccggatgctgcttcccacactgaagtgtcctgtccgaccattgctatctgaggcatccacaagcaggtaggaaagctggcgagccattttacttcctgaggacaattccccagccacaggctctgagtcaaatttctatttggtaagcatcctagcagcaaagtcctgcactcagaccagccaaaaaaacagcccccattccaagtacttggtgtcaaaagtccccgaacgacttttaaacccaagtcttcttaaggtttcagtactgtggtggctttagcagttgtttttgtgcaactataaattatttaaatcatctgagatgacagtcaattttacaaaccaggtacatattaatttgtataattttgtatatgctctggtacactacctgaactaacgaagggtagaactaattctgtttgtcagtgttcacacctgtaacattaggaggatatgtctgcattgcttatttctttatgttggtgtttctgtggcaaagccctgcacatggcatttctgaaaagccttaaatctttaagatgttgcatgtagggtatgcagtgcaaaaggctgcctcagaactgtgagcccttttgtaagctggaagcatttctcttactactgttacttttgtaggaagttttcaattcagagctgccaaagtgttcccgtaagcagtgccttagtaataccttagtcatgccgcccgccttttcttacaccaattcctaatgttcatttacgaattggcccaatattggaaacaaaacaagcaaaaattgtcttcatttttgttttgtaagcccattttttctccagttctataggaaactgactgcttggtgtaaaatccgaaactggacacaagtcagttctttcaccacactcaaatgtatataccaaaacaaaaggttgcaacttcatagtttactatgaaaagcaaattgtactttttaatgttgccttttaaattcatgaccaaatacttagctatttgtgaatcttctgcactctagcatgaaagtgcctttggtttgagattccagcttagaaaaatgctgccataataacgataatttgtagagagaccaaaaatattttgagatcaccgtaatgcctttggtttaccgggatgagtaaccaaccacaggcctctgttcacaagagcacgacgtggtccccgcctgctgctagtctgtctgccactgggggcctcccaacatccatagcacacttcagcggaaggaccccagaaactgttgtgtttgtgtgtgctgatgacctagtgtgtcatttcacctcgtcacccagccctgcgtccggatgaggggacttctgcacaaatgacagaatctcggctggtggacagatactacagctttctcctcctccttgtgttcgtgttcagtctctgtggagactttcttttccattcaaatgacagtgcgcacttatctggtttacacaatgataccattttgaaagttggaagcctcaaactgagacgacagtgcagaacaaaacaaaagtgagttagggtcgttaaaattgaagtgttcttcttagggcaaacatgttgactccgagtattgtgtatgaatgtgctacgagaaacttccaaagagcaccattcacaatttggcattttcaaagaatgttccagccctcaaaggggcaactctttaaagtccttgttggcttttatccaaaccttgtagaaattgggaaagctgatagaggtaaggaagacgagtgaaaaggacaagaaggccaaacaccagccaaaaagaaactaggaaaaaaagattttctttgctaatatagatgtaaaaataacatcagacatctttgaaaattagcctctaaactcttaatacatacgttctgtgtgtctctacctggcgtctttaagaatatcctctctgggctctgaaattttaggagtgattcttatccactccaagttgtaagtatttgtagaaatttgtgcaaacaaacaaaaactatcaaatgaaaagaaaatgtactcaacctaacttatagttagcagctggaattctcaactcttccctgccagcactataccacagtgtggaagaaattagtcaaatgcttgttttcctgcttctcttttcaactgttactgtgctttgtttgaaagtagttttctctctcaaagccgttgcttatatcgttaagaatgaaggtttgtgtttaaaatttattgcattgcaaagggtagtttcactgaagtcatgcaccattaaataagatgaaatatttgtatttattgtcctacttcctaagccgtaacttcttttcctctgtgaatttgcattgagtcactcatgctacactacatcgctttagtatttgagatggcatttatgtttcctctcgtttatcatgaaatggggtcagattccatcagattccacctctgtcaggtggactcttgtctgccttccatgatgagattttttttctccttcccctttctttaagagaggctgacagatctaggtgtcaatcaattggaaaccagtctctgatttttttttcattagttattttctatcattagtttcactgtgtaaattagatatcaactgcacttctttaaaaaaaaatacatctccctattacctccttgaaagatttacttctgtaggcctttttcaataggctcatgactgcagacaaggaaaaaaaaagtaaaaacaaaaacagtatgtgcctgaaaatgacaagaaaaaaaaaaaaaaaaa

SEQ ID NO: 24642 - DNA, 7244 bp, Homo Sapiens
cacaaattcgcagcaggcggctggggcggcggctggggcagcggctgcagcagcggcggacgctctgcattacccagtcttgcgtcctcggcaggcgcccgaagctgagtgcgcatcctctaccgcacccaagcttcgcctgtctcgtcaagctcttcatgctgcccaactaaaaggaaaacatgggcacaggggattttatctgcatttccatgactggaggggcgccctgggggttcagattgcaaggtggcaaggagcagaagcagcccttacaagttgcaaagattcgaaatcagagcaaagcctctggttctgggctctgtgagggagatgaagtggtttccatcaatggcaacccttgtgcagatctcacctaccctgaagtcatcaagctcatggaaagcataacagactctctccaaatgctcatcaaaagaccatccagtggaataagtgaggctttgatatctgaaaatgaaaacaaaaacctcgagcatctcacacatgggggttatgtggaaagtaccaccctgcagattcgaccggccacaaagacccagtgcacagaattcttcctcgcccctgtcaagactgaagttcccctagctgagaaccaaagaagtggtcccgactgtgcaggcagcttgaaagaagaaacaggcccgagctaccaaagggctccccaaatgcctgactcccaaagaggacgcgtggcagaagagctgatcttaagggagaaggtagaagcggtacagcctgggcctgtggttgagctgcaactgtccctttcacaggagagacataagggcgctagtggccctttagtggctctcccgggagctgaaaaatctaagtctcctgacccagaccctaacttgtcacatgacaggattgtccacataaattcgatccctactaatgagaaagcagaccctttcctgaggtccagcaagataatccagatctccagtggcagagagttgagagtgatccaggaaagtgaagcaggagatgcgggactgccccgggtggaagtgatcctcgactgctctgacaggcagaagacagaagggtgcaggcttcaggcaggaaaggagtgtgtggattctccagtggaaggagggcagtcagaagcacctccttctctggtatcctttgccgtctcatcagaaggcacagagcagggagaagatccacgctcggaaaaagatcacagcagacctcacaagcaccgagcgcggcatgcacggctcaggaggagtgaaagcctgtcagaaaaacaagtgaaggaagcaaaatctaaatgcaaaagcattgcccttcttctaacggatgctcccaaccccaactccaagggggtgttgatgtttaagaagcgacgtcggagggccaggaaatacaccctagttagctacggtactggcgagcttgagcgagaggcggacgaggaggaagaaggtgacaaggaggatacatgtgaagtagcatttcttggtgcaagcgaatcagaggtggatgaagagttattgtctgacgttgacgacaacacacaagttgtgaactttgactgggattctggactggtggacattgaaaagaaactgaacagaggggacaagatggagatgttaccagacaccacaggcaagggagccctcatgtttgccaagaggagggagagaatggatcagatcacagcccaaaaagaagaggacaaggtaggtggaacgccaagcagagaacaagatgctgcccagaccgatggcctgagaaccacgacttcttaccaaagaaaggaggaagagtcggtaagaacgcagagctctgtgagcaaaagctacatcgaggtgagtcatggtcttggccatgttccccaacagaatggcttcagtgggacatctgagacagcaaacatccagaggatggtccccatgaatagaacggccaaacccttcccagggtctgtgaatcagccagctacccccttctcgccaacccgaaacatgacgagtcccattgctgactttcctgcacctccaccttactctgcagtcactcctccccctgacgccttctccagaggggtttcaagtccgattgctggcccagcacagccccctccatggccccagcctgccccgtggtcccagccagccttttacgattcgtctgagcgaatagcttcccgagatgagaggatctcagtgccagcaaaaagaacaggaatattgcaggaggccaaaaggagaagcacgacaaaacccatgtttacttttaaagagcccaaagtaagcccaaatcctgaactcttgtcactccttcaaaattcagaaggcaaacggggcactggagctggaggtgattccggaccggaagaagactacctcagcttgggggcagaggcttgtaatttcatgcaaagctcctctgccaaacaaaagacccctcctcctgttgctccaaaacctgcagtcaagtcctcatcctcccaaccagtaactccagtttccccagtctggtctccaggagtggctcccacccaacctcctgccttccccacatccaacccatcaaagggcaccgttgtctcctccatcaaaatagcccagccttcttaccctcctgcccggcctgcaagtactttgaacgtggctggtcccttcaaaggaccacaagcagcagtagccagtcagaattacacacccaaaccaacagtttccacaccaacagtcaatgctgttcagcctggtgcagtgggaccatccaatgagcttccaggaatgagtgggagaggagctcagctctttgctaaaaggcagtcgagaatggagaagtatgtggtcgattcagacacggtgcaggcccacgctgctcgagctcagtctcccactccatctctcccggccagttggaagtactcctccaatgtccgagcacctcctcctgtggcctataatcctatccactcgccgtcttacccactggctgctctcaagtctcagccatcagctgcacagccctccaaaatgggcaagaaaaagggaaagaaacccctcaatgcattagatgtcatgaagcaccaaccgtatcagctcaatgcatccttgtttactttccaacctccagatgcaaaggatggcctcccccagaagtcatcagtcaaggtcaattcagccctggccatgaagcaagctcttcctccccggccagtgaatgctgcctcacctacgaatgtgcaggcttcgtcagtgtactcggtaccagcctatacctctcctccttccttctttgcagaggcctcctcaccagtcagtgcatccccagtgcctgtgggcattcccacctcgccaaagcaagaatcagcctcatcatcttattttgtggcaccaaggccaaagttctcagccaagaaaagtggtgtcacaattcaggtgtggaaaccatctgttgtggaagagtaatcttgtagctgaagctgagtgtccactttgcttgaaatgaattgtttgcagtgtttcttgagtccctgagaatgcctagcaaagtcctcaacttacttaatttcagatatgtcacctcctaatctgggtccaaggagtataatatttttaatgagtcaaaaatccaactcagattgacctaaaatatatttatcttctttgcacacttaaaaaatccaggagcaccccaaaatagacatgtaccgttatattaagtaagcaggagacttaggatttgtgctgtagccacaagaaagacagtgatcagtgatatcaaacatcaggaatcagcctttatgtaacataacagctgtcctcctatggtgaaaggttcaaatgtagtgaaggtataacctatattgactgagatttcccttttaggtagtgccttatctctattactagtgttaaaggaataaggaatctatgaaggacagggagcagctctggtctgtcaatctcagccacctgtttgatatcacagagaagatactcggaggattgttggaatgtatatagtttagtaagaagtgggtaagaaagagggtcttaattactgagcacttattatgtattaggttctttgccagatgtttttacatatataaactcatttcagaaaacttatttaaagtaaatggggccgggtatggtggttcatgcctggaatcctagcactttgggaggctgaggtaggaggactgcttgaggccgggagttggagaccagcctgagcaacatagtgagaccctgtctcaataataataataataatagtaataatgaagtaaatgggataaggaaagaaggataattatctttaaaggttgaatcccaccctccctccccagttacttaaggaactaagtgagtacatctccagttgcccatgaaagcataagtttgttttcctcagctgaggcaagtggtagagtatacaggataacgaagtaacatgtaaaaggcaggacgcacataaaggtgtacatggccattgtttcacctggagaaaccacatgattgggacctgaaggtttactgactgactacaggggctgattgtgaagcacgaggaaccccatgtgtgtggagactgtagggtgagagcacacaattattagcatcatttctgagtgatctcacagattttttttcttgtgtttgctttgctttttgacaactgcttctcccacgttccttgcaattctattctctcaccttcactttactatttgtattcgatggaccaggataattcaggcaaggttaccttgtaaactttaattggccacacaccatgttgtcacccagctggctatgaagtgaataatggtactgaaagtaaacctgaagacctttctcagatctattttaagtctgagtctgaccaaccatggaaaatattcgacatgaattaatgtagagaactataaagcatttatgacagctccaagaaaaatcatctactctatgcaggagatatgtttagagacctctcagaaaaacttgcctggtttgagggtacacagtaccattttaatcttctgaaaatatctgtattcctgctctttttctgctgtcactgtcaatctgctatatttttcactatcctattaaaatattactgtctcctttatctgttcaatgtccatattttaaaaaaatcttccttgtatgagctattctgatctaaataatttctctgatatttctctatatggctcccacaacaatttcattgttgttagcatatctatttctccatacattgtaaaactgtaatccttaggtatttctaaaacataaagaggagaattaagtcagctgcagaacaatggggctgattcttctgctttttctctggaaaatctttcattgcttttggtggaaatttacctagaggttacaaccacaggatgtagcttggtctcttatttgcctttttgggaaaccaattaagattaatacaggataaaggaaaaaagcaatctattcattatataacacagttgtttgtattacttgttccctgcaaaggaaatctgttgaatgcttgcattttgaattcttttctaatagaacaaccaaaaaaggcttcttatggtgcagcaggaaaaaagatcatttttatagctttgcattcttaacatagcatttaaagagcggcatgaattagaggaaagacatggaacacacaggtagtcggtttgagatcatcggcttaaaagtatcctaggatggtaatgacccagaagtatttccagttgtctagtggtgtggtatgcaggaatgagaagtgttttctttccatttcctgttggacaggtggcaatcttagcagagccactatttggagttgataactaaagatgcaaataacatgactatgccttctggtcatcctaggactatttggagttctccaaaaccttgtaagaggcatgtcaggcatgcagtaaaagcatctacaacttcagctgggcactggcagcataggtctcatcttggaccatacagtcccactttatagaagagggtggaagttctccaaaacaatatccacaacaaagtctgacctcactctgagggagatgggaagtgggaggaagaaggactaaccagctccctggagtaagaggaatttgctttccctgtctgcccaccagggctatatgtgccacctttcaggttggggccaaggaagtgatgtcagtgtgacagaagggagagttagacctccagacgtcagcctccctcccatggggtacattttcaatctgagtgttgttgccttagctgtgttggtattagcttgattggttggtccgctggttatgaggtgtagggaggcagtttttgtttagtttttaggactttgcctcttcctttgtccttagcataatttctaggcagagcatccacgaagtcggttttcattgccagctcaagagcgacaatcatttacgagttcctatgttatgttaggtgccttatgtatattatcccaaatccactgcatggtttaaatacaggcactggaatataaatgaaaaaggtcattacagtcactgactttctgcaggaccttaaacatttctctttccacaagtttccccttaatcatgtgtcaaacctctcttcctgacgggaatgttgtgctataatgaatctgcataacgcttgggattctaggaggaaggaaggttccatggacatgtaagtacggcatattcccctcagtcttctaggagggcagagtgaatcccagaactggtaagattgggaatctgagcattgccactttaatcttagaatatttatcattttgacacatcctgttttttagagaggaaaacaaacacagtttctgcattggtagtgtaaagcataccttgttaggaacgtgttttgtaagacacatttgggttgtcactctagagcatgtcaaactttgtacttcaaaatatatttagtatgattgttagtggtaacacatatcaaggctttgaattaaccgttttatttaattttcacaagaagcacttattttagccataggaaaaccaatctgagctacaaatagttctttaaaataagcccaggttatttagctattctagaaagtgccgacttctttcaagaagcaggcattgtaggacagctgagaattatcacatagcctaaattctagcctggcagcaagagtcgcatctgagatgtccaaaaaaaaaaaaaaaaaaa

SEQ ID NO: 24643 - DNA, 6325 bp, Homo Sapiens
ctgggttgtcagtcagtgagaggagggggaagatggctcaccgggacccgttctgctaggaagaaggggagcaggtggtgctgctactcgggaggaagcagagcagcctccgtcgctgtcgctgagagcctcacgagtcgaggtcctgcaggtggagctccggcagccgccctgacattaccagaaacatctttaccaaattatgccacaaatttgaaagacaagagttctttagtttcatctctctataaagttatccaggagccacaaagtgagttgctagaacctgtctgtcaccagctctttgaattctatcgcagtggagaggggcagttgcttcaatttacgctgcaatttctcccagaactaatttggtgctaccttgcagtctcagccagcagaaatgtgcatagcagtggatgcattgaagctcttcttctaggggtttacaatttggaaatagttgacaaacagggacataccaaagtattgagttttacgattccatctttatccaaaccatctgtataccatgaaccttccagcattgggtccatggctctgactgagagtgcactatcccagcatggtttgtcaaaagtggtatacagtggacctcatcctcaaagggagatgctgacagcacagaatcggtttgaagtgttgacattccttttgttgtgttacaatgctgccttaacttacatgcccagtgtttctcttcagtcactgtgtcaaatttgttcaagaatctgtgtttgtggatatcctcgacaacatgtaagaaaatataaaggtataagtagcaggataccagtttcttcaggattcatggtgcaaatgttaacagggatttattttgccttttataatggagaatgggatctagctcaaaaagcactggatgatattatatacagagcccagctagaattatatccagagccattgctggttgctaatgcaataaaggcttcattgcctcatggtcccatgaaatctaataaggaaggtacaaggtgtattcaagttgaaatcacaccaacttcctctcgaatatcaagaaatgcagtaaccagcatgtcaataaggggtcataggtggaaaagacatgagcaacctgacaacaataatgatgctactgaattgggcatccttgtcattcctgagattagtgtcacaaatgtggccggagagagaaccgggaatggggaaaaaggcagaacactaggagagattgatgctcagcatatacagggtgtgcaggaaacagccacagatcctagaactgagagcaaaggcttgccagagatcaggaggcaaaaatctgtaagaaaaatgatggaggatggaataaactcacctggcagagtgcagttttagcagagcactttataactgcactccaaggaaatacagaattaacaggtcaagaagaactgatggagatatctgaagttgacgagggattttattccagggctgcgtctagtaccagccagtcgggtttatcaaacagtagtcacaattgtagtaacaagccaagtataggaaagaaccacagacggtcaggaggaagcaaaactggaggaaaagaaaaagaaactacaggggaatcttgcaaagatcactttgctcgaaaacaaactcagagagcccaaagtgagaatcttgagcttctctctttgaagagacttactttaacaaccagccaatccctacctaagcctagtagccatggtttggctaagaccgcagcgactgtatttagtaaatcctttgaacaagtcagtggtgtcacagtcccacataacccgtcatctgctgttggttgtggggctgggacagatgccaataggttttccgcttgtagtctccaagaagaaaagcttatttacgtttcagaaagaactgaacttccaatggagcatcaatcaggtcagcagagacctcctagtattagcattactctgtccacagattaattagtaacatatttttctcccataacctagtgaacctggaaatacaactttgcttctttatgaaagtaccctgggtctttcatccgtattcctgacaggagccctgatgtcttaaattctgaaggctcccctgactttatgaagggaagattgtctaggttgcagtaagttgaaatatggttttgttatttcttgattaagattttttccccttggtttgagtcttttttttccctcctcttatttgttattgttgccctaagattgtcagtgacaataaattttgacaggttgtctaatcaagttggttatgtctcatgtgaggttgtaaggtggtttttcttgttttggtttggtttggttttttaatagctcctattttgatggctgtgtgtttggccttcagagtcaaagggagtctgcatgtatgggaactgttttatagagaatggggcagaggcacaactccaggaattctctagctcctggtcaggaagccaatctgaaaacaggcatgtggaaacacaaaaatgatgtgtatgaaaagcacctgatgaaaatatttgtaagcagatcatctttatgattagaacaatttgctcaaagccctggaaaatgcctggtaacccagtgcctagaatattatatgattccaggggatggctagaggcatttctgttgttatctctgaaacatttttatatcaaaaatcagattgctggtaggtgtgttgttttgaagtgttttatctggatttagcatgtgaagatccctttcaattattaaggtataataggctgtaaagctgatttaccctactgctggactttggaaatcctagttagtttggactcctataattcagagcatacgtcattggaagacttcctggaaatcagtgtaaatcttgcaacatagctctcaagataccactgtataatatgtaattgtttgtctgcaaatgcatttttcatctataaaatgtcatgaaagaaaataaaggtagtgaaatatggacaaaggacatttatatattaactaaagttgtttatgtttgtgttcttaaatttaaaacacgaagaaaaagaaatgtctttcttgttagtgaacaggcctgttttaaatatcttagtatgatatcaaaagaataatcaatttagttacctcccaactaaaaagtaaaaatgaaaaagacgacatggcagaagttgaaacaaacttgtatgtatctgtatgtgacctctagatggaaataaaagtttgatgtttgctagccgtggtccttttggctatggttgcggttcccctgtaaagcaaatgtacttaagtcatcattcagagtgagagagagaaagcacggctgaggctgagtcagttgaccgttgaggaagacctaaggagctgtccagttcttggctctttttcactgtgactgcacagcggtttccttcttcatagtcccttgctgtagtcaccaagagagcatgctagtgttttcctcttgttcctgcttatgcagagctcagatatatgaaaaatttgtatgctttgaaggctgccaaagcatttatactctggacatagttttaactgcaactgctttggctaccagtttaaaccgagttcttcaaaaagcatgaactcgttttcattcattagccctgtttacaatgtggattttgacataaatgaatttgattttcttttagctccagtaacagaatggaataagatctattgccataaattgtagttaagaactgtaaggcaatcgggcagtgaaacttgatattgtattaacttaataggaaccctgtgtacaatttaaaatatttgtaaaatatcactgtgaatttacagatgtctttttgtcattctttaacaatgaatttcccctgtgcatagttattaatagtattggtattattaaaaactaatttggcattttaagattggcattttaagcaagttgaggtgcttaggaaacattgtagaataagtttggggaaatgttagctgacagagctgagagatcagattttcatgttctatcactgtaatggaacctcatttagacctctctagacctttgctagctgtgtggtctgaggaccagtaagtaggattggcattatctggtatcttgttaaaaatgcagaatttcatgccactctaggtctactaaatcagaatttgcattcttaacaaggttcccaagtgatttttatgagaagaaagtatcagagtgcaaacaaattactcgtctaatatgtagaattcccagtggtctcacagccctagatcaaatgtgtcagacactagatcattataatcttcattggttttgacagctaattaattagtttaataatattgacatatggcttcttaagtatttgaattctagattgctaatgatccttatttttgcagtaaaaaagtaacactttatatttttcttgttaactataaatggaatcagagctgtaaatgcctgaaattttaagtgtgaaaaggggtgccacccttttatatactgcacaacaaatttgcatttgtatattctttttaaaaaatctctgaagacttgctcagtgaaatggttctgattttttgcttcaaatgatttgcactaattgattttctggagagcggagttacgttaacaacaaaattcttttatagttcctttgatactatttcaaataaggattacacattgaaagtttttatagaaattatgaaaattggataatcttaactatggtaaccattactattatccatactactttctccccactgaactttcaaatttgaaaattggggtagcttttgtaggtcactttcttataaagatgctgatggtcacagatctcctaagtatccagaataatatttttatcatgagaaggattccacacaaaattggggtcttgcaccccatatttcagaggatctgaacagaaattgtggcttcattgcacattttaaatctctatagattcttgaaatcacccaacctctcacatttgaaaacccaacggcctggagtattctggtggcactggagccagcactagctttttggaatccaagtggggagagaaacaaaaatagacttttcaagggactgtcccagactacccagggcaaatgtcttcccttcccttcctgaagccacaggaaagcaccctggagtcctttgtataccactatggaaatttttaaggcaagctctcaagacttgaagagttggaattctcggcatttaaatgatgcctgaagtttgttttgaaaaagcaatatttcattgctcttttcaattgtgaagcaactgctcagcaaatattactcatttttttaaaaagttgaattaaagggaaatatatttttaaaaccaaaatagatcaaaatgatcccagttttaagggattttgcctattttggaagaataaaactaaaatgttaaaactgttgaattacagagaacagatgtactctgagacataattttaaacaaatatttaaaataaggcaggttaacatttgcgtttaggcacaataaatctgtattaaagggaagcacatcaaggaaatatatacatgttgaataatgtaactgaaaaatattttttaaaaaccacttaaaaagaaaaataatttgatgggtactttaagcattgtagatagaaattaatgtataatagtgtcctcccagtctttgtatgaaaaattaaaactctctagtcctttaatgagcatgaatttatacttctacatttgttgcttagtaaaattatactcagtactttgagttattcagatttatgtttaatattgttaaattcttcatcagagagcataaatatattgtcttctatactttgtaacttgtgcatatctaaagaaactaacaacgaacattttgggagatgtttttgtgtttttttatagtagagttttagagtacatttgtcttaataggaagtttttaccataaacccaagattttatttcacgtattgttgctttctcttatatggaacttattgtgtacctcttacctttatttctaatcatttagtgatactaatcttttcatagtaaatatatttgtttctaattgtattcctagagtttacattcctaaagaataaacgacgactttggctatttttgtgtgttccctaccttcttaaggctatggaaataaactggagtttagttttttgaatttttgtatatttgtgtaaatgttctccatatgtagtactttatacaacaagtgttgcctcttgttttattgaaataaaaactaaaaaaaaaaaaaaaaaaaa

SEQ ID NO: 24644 - DNA, 5608 bp, Homo Sapiens
cctaccatgtggacgctgctcctccaggtgggaactggagttttgaaataaaatggatgatttgacgttacttgatcttctggagtgccctgtgtgctttgagaagctcgatgtcacagccaaagtcctcccttgccagcacaccttctgcaaaccatgtctacagagggttttcaaggcccacaaagagctgcggtgccccgaatgcaggacgcctgtgttttccaacattgaggcgctgccggccaacctgctgctcgtgcgccttctggatggagtgcgctcagggcagagctccgggagagggggctccttccgcaggcctggcacgatgaccttgcaggatggcaggaaaagcaggaccaaccccagacgtctgcaggccagtcctttccggctagtgcctaatgtcagaatccacatggatggggtgcctcgagcaaaggccttatgcaactacagagggcagaatcccggtgacctaaggtttaataagggagatatcatccttctccggagacagcttgatgagaattggtaccagggggaaatcaatggcatcagcgggaacttcccagccagctccgtggaagtcatcaagcagctgccccagccgcccccgctctgcagggccctctacaacttcgacctacgaggcaaggacaagagtgagaaccaggattgcctgaccttcctcaaggacgatatcatcactgtgatcagccgagtggatgagaactgggcagaaggcaagttaggagataaagtaggcatcttccctatcttgtttgtagagccaaacctcaccgcaagacaccttttagagaagaacaaaggtcgccagtcatcctgcacaaaaaacctgtccctggtgtcctcgtcctccagaggcaacacgtctaccctccgtaggggcccagggtccaggaggaaggtgcctgggcagttttccatcacaacagccttgaacactctcaaccggatggtccattctccttcagggcgccatatggtagagatcagcaccccagtgctcatcagctccagcaacccctctgtgatcacccagcccatggagaaagcagacgttccttccagctgtgtgggacaggtcagcacttatcaccccgcacctgtctctccaggacattccacagccgtggtcagtctgcctggctcccagcaacacctctcagcgaacatgtttgtagccctgcactcctactcagcccatggacccgatgagctggacctgcaaaagggagaaggcgtcagggtcctggggaagtgcctggacggctggctcaggggcgtctccttggtcaccgggcgagtcggcatcttcccaaacaattacgtcatccccattttcagaaagacctctagttttccagactcccggagccctggtctctacaccacatggacgttatccacctcctctgtgtcctcccaaggcagcatttcagaaggtgatccacggcaaagccgtcccttcaaatccgtctttgtgcccactgccatagtcaaccccgtgagaagcacagccggccctgggactttaggacaagggtctcttcggaaagggcggagcagcatgagaaagaatggatccctgcagagacccctccagtccgggatccccactctcgtggtaggctccctcagacgcagccccaccatggtccttcggcctcagcagttccaattctaccagccacaggggatcccctcctccccctcagccgtggtggtggagatggggtccaagcctgccctcacgggggagcccgccctcacgtgcatcagcaggggcagtgaggcccggatccgctccgcggccagctccctcattatggaagacaaagaaatccccatcaagagtgagcctctgccaaaaccgcccgcatctgccccaccatccatcctggtgaaaccagaaaactcaagaaatggcatcgaaaagcaagtcaaaaccgtgagatttcagaattacagccctcctcccaccaaacactacacctcccatcccacccccggaaagcctgaacagccagccaccctcaaggcgtcccagcctgaagcagcgtccttgggcccagagatgaccgtcctatttgcccaccgaagcggctgccactccggacagcagacagacctccggagaaagtcagctcttgccaaggccacaaccctggtgtccactgcctcaggcacgcagaccgtgtttcccagcaaatgaacctacgggtggcttttcctagaccccaaagagagcctgccttggtcatcttcccaggaggaattcatgacaactgggatgcagaagagagcaaatgatctgctgggatggaaactgctcaatggagagtttgtggactgcatgatattccttgaacatcagggatggtacagggataccaatagtctggcctccaagacaggagagtaataggaggaagagcaaatctgtcttcacctgcagtattaatgggtggtgggccagaatggaggaaagcaagtgagtcatgtgctgctacaggttacaccaaactcccatccctctgttactcactgctgttgtcaaagccaaactttatcttgctaatttctcacagcttggcacctaacaaatgacaaggcaggacatccaatgccttcgagctctgtggtctggcctgtctctccagatcagatttagagtgaggtagcagatgacataatattctctttggtgttcaatccgaagaggccaatgcttcagcacaatgtcccctagccatcacccccagcccgactccccaccaagcatcctgcatccctctgccacatcttcattcttttccattctgtcttttccccgataccttctgaccccagggatttctaatagagcataatgatcaagaaaataaagacctggtacataaagagtctcagaaaaaaaatccatgatgttatatgaaagataccaaactgcaatgcttacaaagaggctatttcaagtagaaagatataaatatcacttataaccatgcatcctttatgttcataaataagtcatcataaagaacaagccattagaagacattctaatccttgtttttaaaaaaaaagactataatctaagatacaattctaaaattactgtgctaacctgcaagagacattgctcacataaatgaaattcatatataccgtgatgttatttgaaccatatattttcatcttctcctcctctcttaagacatcaataagaatttgatttttaaaggcacatgctgctctgattatcaaagacaataacacaaatgcagcatcactgggatatgtcggttgttttaaagttcagatcctaattttactgaggaagcatcctcagtttttcatccagccctgcttgtaaacaggatccagcatcagccagaccatgagcagagtaaggattgcatctggaggttacagaaatgttttcttctatgtgaagctatcacatgcaggggttaaacaggcagccatcttttaatgcgatgaataatttggacttcttagccacacccttgtctcggttaaccacaggaggaggtgacaatacaccacaagaagccccagagttctggctttatctgccaagtggtaggtgagaagggaagaggtgggattgagcacactggctatttataccttgtcttcaaagccctcttagtcacatttccatcttcatgcattggcttctgccttacaattgagcaataggaaaccaccactcctaatttttgcacgtgctgctttttaagtctctgggaactttccatgaggtatagtggagggtttcataaggatttagctcttccttcgaacctgcttggccgataaaccagatatttttttaaaacacagcatacagattccaaatgatcaaggatcaaaaagtgttggggatgtcaggaaggatgcaaggatgggcttgaatgatcacaatgagtcaacccagaaatgtgcagtagaatagtttgctaatggtgacatctgagttgcatctcccggaaatattgtttcttattattacactttgggtcgggggaaggggtgttaagggtaaaaagaggaaggagcaaatagataaagagaaaaattcatgcctccaggaaacataagcagaaaaactatagacttgtgtctctgcttatttttttaagtacagtgtttttaatagaccaaagagaatctctatgagttaatatgtatgtgaataatgtttataaaaggggtataatgtgttagtcattatggaatattgtataaataaaccttccatatataaaacatataaaaaatgattgcttagggcagtggacacttaaggacttccaaacctttcatatcttcatcccaaaaaatagagcgttccagggctggcaacttatttccttagtatattccactgtaaagccaagaggtgtgggggcttgttttctggttttgtaatttgtaataatccgtatggattactgtaaaatgtctgttgcatgtgtgttggtgttggtgttggtgttgtttacccacatggagtcatcagagatttgttccacactttgtatcctggaaaaccaaaaggaattttcttttcttcgagacagagtctcgctctgtcgcccaggctggagtgcagtggtgccatcttggctcactgcaacctccgcctcccgaattcaagtgattctcctgcctcagcctcccgagtagctgggactacaggtgcgtgccaccttgccctgctaattttttgtatttttagtagagacggggtctcaccgtgttagccaggattgtctcgatctcctgaccttgtgatctgtccgcctcggcctcccaaagtgctgggattacagacgtgagccaccatgcccggcctggaattttctagtaagaagaaaaacatacagaatatgtcttcactgttgggtaactctcaaatttgtagcaatccagattttttgtaaaactgtgctaatgggatatttaatgtcagagttattgtctctcacttcaatatctagtactggataatgtttctcctgggagcacgtatttttttttcaagtcctcttttcctggacttaacatgttcttctagaagacaccagaagtcatgaccctaagccccctcccttcaggaccactttctaccatcggttttcaaaaaactatccacatgttaattctgttttatgttctgtgattctgtggtagactcagtgctttcagagtccagagcttgacttgggttagtggccttaatgaagtgctaaatttgctctttaccgcgagactgatcagaagaagcaaaaggggaaagggggctagaggtccactcgcaccttttacatcagacaagaggaggactgtgtcagaaatctgtgcatgaaacaccatctgctcttcatgcagggaggggtcaaccgtgtgaacgtgcagagattactcgagccttctttgccaaaaatatgcattcttcccagctgtaagcgtgtgaagccaaatatgtcttttagcatgaaacaataaaaacatgtttattttcacttaagaaaaaaaaaaaaaaaaa

SEQ ID NO: 24645 - DNA, 6252 bp, Homo Sapiens
agcgctggtgtggacgggaagctcccggcccggcgaactaactggagcacggagctgcagccggttgggccggtgtactttcccgctctggaaaggaagagaaatggaagtgagaaagttgagcagttcctggcagttcttgatagttctggttctgatcctgcaaattctgtctgcgttggattttgacccatacagagtcctaggggtcagccgaacagccagtcaggctgatattaaaaaggcttataagaagctcgcccgggaatggcatcctgacaaaaacaaagatcctggagcagaagacaagttcattcaaatcagtaaggcttacgagattctttcaaatgaagaaaagagatcaaattatgatcaatatggagacgctggagagaaccagggctaccagaagcagcaacagcagcgagagtatcgcttccgccatttccatgaaaatttttattttgatgaatccttttttcacttcccttttaattctgaacggcgggactcaattgacgaaaagtatttattgcacttttcacattatgtgaatgaagtggttccagatagcttcaagaaaccctacctcatcaagatcacctccgattggtgctttagctgcattcatatcgagcctgtgtggaaagaagtcattcaagaactggaagaattgggtgtaggaattggcgtggtccatgctgggtatgagagacgcctggcccatcacctaggggcacacagcacgccctctatcctaggaatcattaacgggaaaatctccttcttccacaatgcagttgtccgtgaaaatctgcgacaatttgtagaaagtcttcttccagggaacttggtggagaaagttacaaataaaaattacgtcagattcctctctggctggcagcaagagaataagcctcatgtccttctgtttgaccaaacgcccattgtgccactgttatacaagttgactgcctttgcatacaaagattatttatcatttggatatgtatatgtgggtttgagagggacggaagagatgacaaggcggtacaacatcaatatctacgcccctaccctcttggtctttaaagaacatataaacaggcctgccgatgttatccaggcccgaggtatgaagaagcaaatcattgacgacttcatcacccgaaacaaatatctattggcagccaggctcaccagccagaagttgttccatgaactctgccctgtgaaacggtcgcatcgacagaggaagtactgtgtggttttattgactgctgagactaccaagttgagcaaaccctttgaggctttcctgtcctttgccctggcaaacactcaagacacagtgagatttgtgcatgtctacagcaatcggcagcaggagtttgccgacaccttactaccagacagtgaggcgtttcaagggaaatcagcggtgtctattttagaaaggcgcaacacagcaggaagggtggtgtataaaaccctggaagacccttggattgggagtgagagtgacaaatttatcctcttgggctatctcgaccagctgcgtaaagatccagctcttctgtcctctgaagcagtgcttcctgacctgaccgatgaacttgcccctgtttttctccttcgatggttctactctgcttctgactacatctcagactgctgggatagcatttttcacaacaactggagggaaatgatgcccctgctgtccctgatcttctctgccctcttcatcctcttcggcactgtcatcgttcaggctttcagcgactctaatgatgagcgagagtcaagccctccagaaaaagaggaagcccaagagaagactgggaaaactgagccaagcttcaccaaagaaaacagcaggtttctctaacaaaacaccagactcacctccccggcacctgccccccagatcctgtcatctgataacgcagcattggaacatagagtgtagagaagaactctcatgcacctcctcccatgtaaactgtggctacagggaaaagtcactgtgatttgtgtttactaagaccctgtaggtgtttagatgccttagatttcataatgaaggcagaaggaaagaagcctatcagcaagattcctaaaaaaggctttgtggaggtaactgaactcacagatgtaacatacaccagtaacttggtacgtctgaggccaggccacatgaatgtggtcctcatcctgtcgaattctaccaagaccagcctactacagaaatttgctttggaggtctacacatttactgggagcagctgcctacacttctccttcctgagtctagataaacacagagaatggctagaatacttactagaatttgctcaagatgcagctccaatcccaaaccaatatgataagcatttcatggagcgtgactacactggttatgtactggctctgaatggccacaagaaatacttctgcctcttcaagccccaaaagacagtcgaagaggaggaagccatagggtcgtgcagtgatgttgactcttccctctacctgggtgaatctcgagggaaaccttcctgtggccttggatccaggcccatcaaaggaaagttgagcaagctctctttatggatggaacgcctgctggagggctccttacagaggttttatatcccatcatggcctgaactagactgagaggattttccaaagagatttgaactcttcagactttttaacatgcccctgtgaacaggtattttcaggactcaaactaccacaatgaacagagtatagattttagattgctcttctagaaccatggctagaagaatctttcctttgtcctgttctaacctaggaatgaaaaacaccaccagtttgaatcgcctagatgaaaatcttttcctctgggtgttatttttccccactgaatgccacaccattgaaaatagactgctcatcccctcttcctttcttgtccttgtcccatgctcaccccaccctcctgtcctgtgtcttggagaagcacagggctccaccctgcaagcggcatctggcggaccctcatgagcctgtcgtgcaggccaggtcattggccccttccccaatcccggccctgctgtgctgctgccatggcgcatgctcctaactctgaacaacccacggcagcttctagccccgcatctggaaaaaggcccctttccaagcaatctcacgtttactggttgttctgggagtaagtggctaaatgtatattttgggggtatcccccaacaacagtttgttggccacaggttgaaaaggaaaggaataaacgggagttctgcatgtgagttctcaagaaaaggaaagggaggctgagcagtggctgaagcgatgcagccttgagacacgctgtgagcatcccatccgccgccccagcgctgctggtagccaggggaggggtctgcacagcgagaagtactgtgatgactttgagccgttgacatgtatgtcttcagatgcctttctgcctctgtcgattttagggtatggatattaggagccataacttgtaatcttgttctctgaacgtagagataagctgctataaagccagtagatgttaaactgaagagaaattattcccacctgctatgagtcaggcttaaggaatctcttcaatagtgtctctttagtaaaataccaaacatgtctttgtatcaaggaacttaaaatttctcaacaattgtattttgaacactgttaccctaaaagtgctgtctcttcaagtcatcttttgcaggaagtgagccaagatttgttctagactcccattttgcaaaaggcttactttccacttctgggctgtattttgatgtctcatcttcattgttttcactcttaacttagagctgcttcaccagtattggggtcagactggccatcagcacctgagcgtgctgagctccaggtatagtggaccccagggtgcctcataccagccagttagagagcataccttttatttttcagggcagaatgaccagtggttctgagtttgagtttggacagcttcaaagagtggtccgttcaaatgtcaaagcaaggtgcctttggtggctttgtgaagggtgaaaatcagtgatgggacatttactaagtatttcttttttttttttttttttttagttgttgagacagagtttcactcttgttgcccaggctggagtgaaatggtgcgatctcggttcaccgcaacctccacatcccaggttcaagtgattctcctgcctcagcctcctgagtagctaggattacaggcatgtgccaccatgtaattagcccggctaattttgtatttttagtagagacgggatttctccatgttgatcaggctggtcatgaactcctgacctcaggtgatctgcctgcctcagcctcccaaagtgctgctgggattacaggcgtgagccaccactcccggctaagttagtatttctttaatcttaatgctttaaactaagccacttggatcctgaataatttaaatcttgagctacattggtaagtaataaattatttaaggccaggaattcctgtagttttcatggagtctgtagctttattaaaaaataaatcactgccaggcttcattcttccatatgatcctctaaaaatggacacttcctctgaatgctgtatctcatggcacctggtccaactagaaatggtcaaggaattcatttggctccttgatacatcagtcctcaatattactttctaggtattttatggccagattgcttatatgagtggtcttttggtttggtagtaggtttttatttttaatttctgtactaatgaaattcctgactttaatttctgaaaaccaaaaactctccaagtgtatttatttatattttttttaatagagacgaggtcttgctatgttgcccaggctggtcccaaactcctggcctcaagcagtccttccaccttggcctcccaaagtgctgggattatcaatatgagccaccatgccagatttgttcatttttaaacatttttatctcttcaagtcatcttttgatcttttaaaaagcaccttcaaacagctgcaccttccatttgcactaggaaatgaaggtagtgatgggattggcaatgttcctggcagatgtttcagcccaaaagctcttctacagaccggtttagagctggtgccctatgagaatattagggagcttttattttaaattgaactttacccttgtccatgcaaggcattcctcctgaatgcatccatgaatttgtttacttttgcgtcaaacatatgagccattgtcatgctcagcctgtgccaccattgctctgtctgatgtatgtaatcatacaagacctgattttggttctaacacagtggtctttgactatcaacattgatgtttttagagatgggttcttctggttgatacagactatgcattgcgtttagcagatggggtaaaactggcctaaaacaagtctttgcagaatacatgccaatttccaaaaaaaaaaaaaaatttgttgctcaggtgttgcacaatttttatctaacactgaggctatcagctccaactaaacaacatttcagtgggtgaggctgccctaacttccattaggggccatggcctcactgccatcacttattagccatgagaatttggttgtagttttcaggtaggttggtttcttcctcatttgcagcttgttgatacttgttcctttttatttattaacatcccaatcaatttgcagctgccatcattacataaatatttttctgttataaaaagaagtgtgatctgtttttttagtgatttcctttgtttgggaatagagattggaagcacatactcagacctgttttgttaactagaattctttaaaagctgatgccaaacatctttacagaggaactgtagttcacatccacctgtctgacattgtcccctaaaaacaagtgcagtgtggcagctgctgaatctgtctgttcagtttgtcaaggaggataattatgcttgggagagatctgaaaagaaggtgaatattttgcacttttgatactcttaggaacaaataacttatttggcaaattgtttcttttttatgttttgggtgttgtttttgttttttgactttttttgtattgtgaacaggcactgaagctgatgttattttaagattacagaatggaaaaagaaataaactattttaatgtctgaaaaaaaaaaaaaaaaa

SEQ ID NO: 24646 - DNA, 6272 bp, Homo Sapiens
atatgttctgaaattaaacttgaacttttttctgtgaattttgaagatttggtatcttataattatttggtgagcatttggcatgaattatttagcttctcccctgtttatgatttatttctcttgtcatcgatttccaataggaaaatgttatggttctaaatgtctcctgtagacttcagtaattgaaaaatgtcagtcaagatggggggaatctgtaatatataatagagtttatcttttagttatgttcatttccactttttttaatgtgttttttttttagtaaatgtcaaaagtgttactcagtgcaacatattatgcaatattataatcaactaacctcttcattgataatgacttcatattgagaggctttttaaatctagaaatattcttgttttaaattccaggttaaaatgtaaaggtatttttattttttttaattttaattcttctcaaagctactagtacattataaaacaacaatttcacatttagaatttttatatgtatataaattaggattattttttaatattagccttaactttctttaacttttatgaaaaacaactagtcccaagggtatttttactatttaatatacattattcctgtgattcaaaatcttagcagtagaacctgttgagctacttaactttctgtcttgggactatccaggtgcagtcataactggtttcaaagttgtgaccttttccttgctggtttcaaaatcattccttaaaaaatgttcagtatttttcttttgtcaaaaaataaaaacaggatttgtgggttgttctgttttttaaaattagtttgagaaacttcctttgccacttgttttctgtgcaaatgttgtaagagctcaaattccctgggggtagggaggacttttataaggtttttttggttgaagggtataaaaggcacttaaaaggtatacagttacttttatttcgatatcccagtcattttgacattatgataggctttccccactttataggttatctgaaaatttggtggggggcgggtattttatttatccttaatataacaaaattattttcctatgtgtagtcaatagcacatacaaaaaattatctcctgtttgtagtcagtagcacagtcagtattcaccaaaatactgagttatttttcaagtaaaggtataagtatgaatgagaaacagtttgtgggttgggtattgtcagtccttctttttcagataactttctaaatggtcattcaatctgtaatcttaaacttttttaatgttataaattcttcaaatcagtatttgtattaaatgcagtgaccagactatgtcactgatacaatgtcatgattagatgtgcagaagactatgttacatgggtgataaatgaacttttaacatatagaaattaatatcagattaaactaaaacattaagcaaagttaatacatgcttgcatacatatatatatttatttattaatgatatgtggagaatctttgtgcttcatagtcactagacctaaagtagaagcagttgtcaagaatgtccaactgctattcatctttgtggccaaagtaaatttcagattttttttttgtaatggttttctttagtctctttattaacccatcatcatgacaagtctgtcaagtgacacatgtgaaaagcagatgtcctttcttattcctggtgcttcctaaggaggcagtgcaatgcaggagaaggaacattattagagataaaggaaaaaaccagaagtgctttctcctctcacattccactcaacacttctctcaccaaatgtgtgtggggatttctctccaccaacaaccagcagttctttactgcagattctccagtggataccagccaggtgtcctctaattcagttcaattctgacattatctactgggagatagtgtcagatcccgcaagtggagggctcagtcctacaagactaccccttacttcagatgtcagtcacaagcagttagcggtttgtgattctgaccaactggctagaggtccccctcctcaagtgtgattaatttgctagagcagctcacagaattcagggaaacactttatttacatttacccatttattataaaggatattatgaaggatacacatgaactgccagaaagacaaggagcataggcaagatactgagaagggtcacggagcttctgtgccttctccaggtgcaccaccctctgggaatagtcagttcatgtgttcagctgtctcgaagctcattcgaaccctgtccttctgagtttctgtggaggcttcattacgttaaggttcagaaatcaataccccaaaatatggggctttgacatgctgaattaaagaagcagcctcaaggcctcttggccttctccagctctcctcacccaaatcctgtctctcccaaagcacaagatgaggctgttcaccaaagttcccttatttacctagaaactggaccttaaagaggaacacagttgcctgcgattccatccctgtaattttattaaccagagattaaaacttatatcacagaggaagagactaaaaattaaacaccacacctggagcccagatgacctgtcccaatctattatctgttctccagtcccatttagttcccaaagggaatcatttacaaaccattgtctgatcttccggcccatttatttacagctccccctctttccccaatgaaaatgatacttaagtgtcagccatctatcggctctttgagttttcacattttgtatgactcctgtgcacacacatgcatgtaataactgttatacttgttaactttttttcattataggggtatccaccatgattatatatgatggggaggaaagggattactccatttctgcccctgcagtctgtaggcatgattgattacatcattggtcgccggtgattaactcagtctccaagccctgtcgtgtccctggaggttggagggtggcactgaaagctccaaccatctcatcatgctttgatctttccgatgaccagaccccaccctgaagctatctacgggtccccagcaacattcatttcgttatcatacaaatgacattcttacaatttcagagattccaagggctttaggaaatggagatgaagagcaaatatatatttcacaatatcacaaacatacccttgggaattagacctctgatctaatctaggctccctcacttgccatttttgtgaccttgaacaagttgttcatcttttctggatagttctctgttaaaaaaattaaaataaaaaaatggtggctatcaggttgttaggaggactagataagagaactatgtgaaggaccctgcacagtgctagcaacaaagttgtttagtaagtgctatttcaatttattttgcttccaagctcatgtgagctccctcagtgtgtaccaccaaatcacatgatgtgtatcccagtcaaatcttaaaggtcatccaccttgaatctttaagttaattaacgtgtgtttttaaaactgcattataagaacgttagggtttttgttttgatcctatggaagttaaattttttacacaagcattcaactgtttagcttcaaactgaacagataaatagtctgtattatttcattatgtattaaaaaatgattaagcctgcctcaggcagttcaggcaaagcaggtaaaagattatcaaggagtaacattagaaaacactaatcagagtgcctaaaaagctttatgcggtccaggttgtacagggatgttggaacagtaaaacaaacaaaacattacaaggtatgaagcgttcgagataggtagaatagagcaggttatattagagaagtctcttctaaaattgtgttggctagcctgggatttgaacttataccgtgtatgtatgtccatgtgtaacaggttgaacatgcaagaagcagtgttcataaaaggtggcaaacttgttttacttgtttctcagtcttttcagatcagtacttataaaacactgatatttacagtaaatatcttatattaaatattagctaaccctattaaattgtgtgtccttgtgctgcagtcatttaatgacctcattctttggtaagttggcatgtgatttgagatagctctaagtgctaatggattgtttgaaggggttaaaggcaaaaccagaaagagaaaactatttttaggaaaaagcgatcatacaacaggccttaaatagaagaaatgagatatctctatctttactatgtaacctttaattccttacacattttgacttcatattttttgtatgtaaatgagaatgttatagtcttgtaaattccttttcctctgtgactacattcagttatttattttattgtgtgtttgtgcatgtcggtagagcacagtatttagtagaatgagttattggttaaaccacctggattcatttgtaaaatggggccacctgtctcttaaattgtaatgaggatttgattagataatctagataaatcacttagcacaagagtctccagcccccggactcttgactggtactggtctgtggcctgttaggcactgggctgcacagcaggaggtgagcagggagcaagctagcactagggcccaagctccgcctcctgtcggatcagtggcagcattagatactcataggagcacagaccctgttgtgaaccgtgcgtgtgagggatctaggtttcgtgctccttacaagaatctaattaatgcccgatgagttgaggtggaacagtttcttcccaaaaccgtctcaggaaacctgtccctggtgccaaaatttgggggacctctgacgtagcacactatctggcacataccaagcactcagaaaatatcccatttctcaaaactcagttccagtgtcaagtcttaatagtatattgatcttggaactccaaggtagttggtcctctctttgtgccataaatgtgccttgtactcagtagtgctaaattgctatcaactagtgctaaatgtactactaattcatctgtgtgtccacttcccttcttagattgtgagccccttgaggacagagatgggtttactcatatttataaattcattggcatgataaatatttgctgaaagaataaaattgtattcttatgttttaagcagggtcccctccacctctgagtggaagatggtctgggagcaaaggtgacaggtcttctaaaaaatctggccacattctcaacccaccacacccccgcttttttaaacagctatttaattgccattgtaatcctaaggattggatcaatttttcacttccctttttcacacttttttccttttactaagaaaataaagtaataaagtgactgccaaatggagaaaactgtccactaaatatgaattaataagtgctattatcagaaattgtgtaaaagcaacataatggcactataaaaaggtattatcttagaatcaaaaaccttgggtttatattatagccctgctactttctagtcatatgacagtgatcaagctatattacctctttggcttgacaaaataggggtcatctctatttctggcttgttatgattgatgtgaaatattcatacaaactaccactgtgcctggtaagtagaagacactcaaatatgtcttggagttacagttaatactgtatcgtttaaatttgagaaaaaccaactttaaaaaatcacatagatacagttgtttactgctagaaattttatttaaattagttgatactcttggttaggtaatgaaaaacaatggttttatctccattatgctgtgatagggaagagtaacacagttcaaatggcaaaggcatacctgacaattaaaatgcatagttaaaggctaatacttcctgaacacaagaagacaagtctctacttgatactactctccacagttaaatcattgatactttgtgccatacagtgaaaacagaaccatctaggtgttcacggattgtatttttccttatgaaaggtagaaggttagagaaaattattcccaatacaattaatacaaataaaattggttattaggtgccttttaattaggcagtaagggcatatgaagcttcattacctatgagaattttgtcaaaattatttcccagttaccatgttttaaaacagcctctcagaattccccacttctaatttctcctttctattctaccaattttactccatacctttttgctaaataaacattttcttcctaaaaaaaaaaaaaaaaa

SEQ ID NO: 24647 - DNA, 4020 bp, Homo Sapiens
aggagaaagggagtggaggcgcgtcggagactatgaagcgcggcattcggcgggatcctttccggaagcggaagctcggcgggcgggccaaaaaggtccgggagcccacggcggttaattctttttaccgtgaggcttcacttccctcggtctgggcttctctgaggcggcgagagatggtcaggtctggagctcgaccgggccaggtgttatcttcaggaaggcacactggacctgctaaattaacaaatggaaagaaagcgtaagtacttgaagacgtttacaacttcagatttcaaggaatttttcaggtctttgggctggatgacatgtcgtctaccccagaaaattaggtaggcctctaccatcacaagctctgaggaacaatttttcatgtctacccatgttaatcattttagtatttaacagtctttctgatcttcagaatgtgtttataaattcatcttgtacatggttggacaagctttcttgtctttgctggaaagaaaatgactacttactaatatattttgggaaaaatatttgtaagaatattaataagcttgttttccaggacctatttaagaaaaataccacgttttaatgcagattctggctattccatccattctgattcagaaagtcaggtaagattgaatagatacaatacacactattttaattagttttcaaatagtagctaaaaagtaggaataaaatgcaaagtattaattgctctaaggaagtatgaagtctgttgctttaaaacatcttttctaccaataatagtttgtaaataaacaaattttaaaactacataatttatattttttcctacactaacagtcatatacaaatgtattctaaatgactttatttcttacaggctgaaactgtacacgggcttgatggttgtgcttctttgctgagggacattttgagaaatgaagattcaggttttttttttttaattctttgctgatcaccttatctcaagtcattattttgatgtaacaaatttttgttttattaataggttcagaaacagcatatttagaaaacagatttaattctagacctttagaaagcaaaagatacggatcaaaaaagaaaagacatgaaaaacatactattcctttggtagtccagaaagaaacatcatcttcagataataagaaacagatacctaatgaagcttctgctagaagtgaaagagacacatcagacctagagcaaaactggtcattgcaagatcattatagaatgtattcacccataatataccaagccctctgtgagcacgtgcagactcagatgtcactgatgaatgacttgacttcaaagaacatccctaatggaattcctgctgtaccatgccatgctccctctcattctgaatctcaggcaactcctcattctagttatggcttatgtacctccaccccagtctggtcacttcagcggccaccctgccctccaaaggttcattctgaagttcaaactgatggcaacagtcagtttgcatcacaaggtaaaacagtttctgcaacctgtactgatgttctacggaattcatttaataccagtcctggagttccatgtagcctgcccaaaactgacatatcagctattccaacattgcagcaactgggccttgttaatggaattctgccacaacaaggaattcataaggaaacagacctactaaaatgtattcaaacatatttgtctctttttcgatctcatggaaaagaaccgcatctggacagtcagacacaccgaagccctactcagtcacaaccagctttcttggccactaatgaagaaaaatgtgccagagagcaaattagagaggccacaagtgaaagaaaggatttaaacatacatgtgcgagatacaaaaacagtgaaggatgtacagaaggcaaaaaatgtgaacaagacagctgaaaaagttagaattataaaatatttgttgggagagctcaaggccctggtagcagaacaagaggattcagaaattcagaggttgattacagaaatggaggcatgtatatctgtacttccaacagtaagtggaaacacagatattcaagttgagatagcactggccatgcaaccattaagaagtgagaatgctcagttacgaaggcagttgagaattttgaaccagcaactcagagaacaacagaaaactcaaaaaccatctggtgctgtggattgcaaccttgaattgttttctcttcagtcattgaatatgtcactgcaaaatcaattggaggagtcactaaagagccaggaattactgcagagtaaaaatgaagagctgttaaaagtgattgaaaatcagaaagatgaaaacaaaaaatttagtagtatatttaaagacaaagatcaaactatacttgaaaataaacagcaatatgatattgagataacaagaataaaaattgaattggaggaagccctagtcaatgtgaaaagctcccagtttaagttagaaactgctgaaaaggaaaaccagatattggggataacattacgtcagcgtgatgctgaggtgactcgactaagagaattaaccaggaagcagaagatgcacctgaaaaactttccagagcatctgatatgaaggacacacagctcctcaagaaaataaaggaagcaattggtaagatccctgctgccaccaaggagccagaggaacaaactgcatgtcatggcccatcaggttgtcttagcaacagccttcaagtgaaaggcaatactgtctgtgatggtagtgttttcacttctgacttgatgtctgactggagcatctcttcgttttcaacgttcacttctcgtgatgaacaagacttcagaaatggccttgcggcattagatgccaacatagctagactccagaagtctttaaggactggtcttctggagaaatgaattcagaagaaaattcatcaggtgcttctttttaaaactagaacttggctatattgaatgtgtatttttctttagtgaaatgatgttttatgttattatgtgtgaagtaatatattgtacaagtaataaatgtattgttgagatatattgacactgaggagcttataaaaacaagtcatcttaagttcacaattgctacaagaagaaagttgtggataactaggaaattattgtaagtaatgttttatttcagtacttagcaattagagttcttttattaagatgtatctgctggattaagggtacaggttgaaatagttctgtggctgtcctaagaaataatgggaaaagaatctctggatgtaagtttttctgttgaaactagagggtttttttttctgtttacatatacttttttttaatagcaatgtgtttttattaaacatgctgtgtgccacaggccagtgttgttggtgaaatatataaacatttatttaaagagaaaagttaccagtatctacacctcttaaaaaacattgattggtctaaaaaatatatagataacatcctaagttaacatatggcttcttaaaacttgggcacttttatttgtttttatcccaaattcatgttttaaggcctttaaagaatagtcagactgataaagaagtgctaacagataagctatagttggggaaatttgtgggttttttttaaataagaaatgtttatttttgtccttatatttaaacatgatggaatttgtaaatcttggcattgattgtaattctgcctttttggaagaattttttctcccagcatgttagctgagaatattctctattttataaataatatgaagtaggttggtctctctgcttctctataccaggacttcttagctcagtatcatctcccttcatgtaagcagcacgttttaactcttaggaagctgaatgttgtgttatcactaatactttgtacaggtcgcctgcctactctaattgtccttagtacttggacaggctttatcattaaagagtgttctccaaaaaaaaaaaaaaaaaaaaaaaaaaaaaaa

SEQ ID NO: 24648 - DNA, 5048 bp, Homo Sapiens
tatctgtaaggacacattacaggcgtcaaagagaaattcctttggttcagaatgggcccaggccttgaagcctgctaagaataccaaagccagaagaacactaaagttctcaaggtccctcaatgatgtgggtgagaaggcgcaggatacttcagaaagttttgcctatgtggaaagaacttgttctgaagggaaattaatactccctcaagatacgtgtctcagaactaacaggtttcatcataaagaaaaaagaaccctgaaccacaaacctcttggcaattccaaacattcttgtgtttcatgcctttctgccggtcgctcaactgcctcagaggtggaagctggcaaggggggcaggcccggcctgctgctggaagagaaggcggatggtgaggccacgtcccgaagccggcaactgctccagtacctgttctcactctcgcacggcttgagcgccagcagcctgcacaggttccatgagctggagagctgcgctgctcgcctgcacactgccaagtcctccagcgggctggcagggagtatgggcttctgctctgacgagatgggagacgacgatgtctttgaggacagcacatctgcaaaactgaagagtagggttctgcgggcgcccctctgctccacggaaaaggacagcgacctggattgtccttctcccttctctgaaaaattaccccccatatctcccgtgtccacgtcaggggatgtctgcaggatctgccactgtgaaggagatgatgagagccccctgatcaccccctgccactgcacaggaagcctccacttcgtgcaccaggcctgcctgcagcagtggatcaagagctccgacacgcgctgctgcgagctctgcaagtatgagttcatcatggagaccaagctgaagccactgagaaaatgggagaagttgcagatgacgtccagcgagcgcaggaagatcatgtgctcagtgacattccacgtcattgccatcacatgtgtggtctggtccttgtatgtgctcattgaccgtactgctgaggagatcaagcaggggcaggcaacaggaatcctagaatggcccttttggactaaattggtggttgtggccatcggcttcaccggaggacttctttttatgtatgttcagtgtaaagtgtatgtgcaattgtggaagagactcaaggcctataatagagtgatctatgttcaaaactgtccagaaacaagcaaaaagaatatttttgaaaaatctccactaacagagcccaactttgaaaataaacatggatatggaatctgtcattccgacacaaactcttcttgttgcacagagcctgaagacaccggagcagaaatcattcacgtctgattgtgtgcgggttgtcattttcctggacatccatgaagagctgaaggaaattgtttactgccaattgtatacctttcttatgtcctttaatagcatagactggacaggtgactatttatagtggcttctctttttctaaaccctccttagtctcctagaaaaccttcctgtgggccaggcatgcctgggtcctgcctctgcctggcagctctgtgggaaagtggaagaccccatgatgacatcatggggagccagcagagttcctgcccatggtcttgagctgaatgagagaataaaatgccaatcccaagggaagaggaggagcaggggtgcccaggccctgatacccagccgcctccagcttgcagtggtccccagcctggagcagagcattggggagtgtctagccatgacgagaagattccctctgcatcacggcgaaccccaggagatggtattgaaacagacccccaaacacagactcctgcctgccctctgccgatgctgcctcctccatgctcttgagcaggtggagccatggtgctctgtggtggcgcatgattcactgagcaaacagcactttacagaagaaaatctttattttgtaatatgtgtgtccagcgggattgacactcaaaaaaagtctcacttagaaatcttcccttccttacctttgtatctcctttacatcatgagagatcaaaaatccattttgccttacatatgctaagaagcgtggcattctttctgttcataaaacagactcatgacttttaagacaggacaagcaggccagaggctttttttttaatcacagatctcatgggaattagtggatgctaaatggcaattaaagcatgattcctatgcttttgagcctgttttatgacaaggtgttactttgtaggcctggcccatacatttcttttttgtcaacactgaaaaagaacagtttctgagatcgaaatggaaggaaaggaagtgagtaatgacaacaaaactgaatatttaaaaaatattcctttatagttaaatctctccagttggtgttggcttcacattgaaagagcagccatgtgccaccctggccggggtgtgtgcactgcatgcaggttctcccttgcatgcaagatgggtgctggcccactgtgaggcttctgctcggggaagttctgtggagtcactaccagggccaagaggcaggtgggctggctctgggacgagggccaggtgtgagcaaactgccagggtccgctgtgccactgctccccggccacatgcccgcccagctgtcgccttaaccagactgaacagacaggatccttcagggcccttggccccactctcagtgcattctgtcatcagggattaccacctgtaccattttcataaaacaaaaccaaaatcactaccatcaaatggccttgtccctctaaaaagtctgcttaaaattctgtttttaaaacccagtttcctagttttccaggcaaatagttacctccgggaaagttgctgggggggcctgaagcacaatgtagcgcagatgcttcctttccaggccattctctcacccagcctgcacggaggagatgggagatgctgggggtcctgccctcagtctttttgggccttaggcgtttcgttcatcctgctaaggggatgaagcaaacacgaggtgattcctttgcctttcagagtggaagccctggagtttgttttgaaggccaggaggctgaaggatctctaagctacggtgtgggcttaatagcagcaggctttgtcctcctgtctcctccaagccagtgtctgattccttggcaacacaggtcttagtctgtggagtggctctgctgtggccttcctctggccgggcaggcactgtccagccatagccagctcctgagaataggtcagcctctcctttctgtctcccagggcacatccagcccgtgcctgtgttcactgtgccccgaagtgcaattacccataccccttctcagcctggggaccccaggcaaccacagactgtccactcaggggagctgaatcccaggtcagccctgccaatgtcccttaggaactgcccaggcaaggcccctggttttgtatacttgttcctgccacccagcagtagatgagtgtttcaggtgaagaccaggatagattttctaagtgtgaatccccacttcacatatggaaccccttatgctgaacttgaaaagcaccaagacttcctgtagacaagaaagtgcttaggtagggacagcccctgggcatcccacccaatgtagctggcaccccactatggcaaaggtgccttgataactgagccctgtatccctcccatgcccagccagattctcatgggaagccctctcccttcttttctgcctaacaccatctcatcgtttctggcctcactgtggacaatccacacacattcttctttcctctcctggcggggcacagagccacccccttgccttttcttttcttgaaggttctagttcagctcctgattcatcagacccttctagccccctgcatctagcagtgaagcatgaagcctggtggggatgtggtactcccatctggtgtggccaccagctctgccaatgttcctgtagccttggaaaacttgctctctcggttcttttgggtgctgtgtactccccagcttccccccttccccccccattttgcacctgggtttagtgaaaggatggcatttggttgacccatatagaaacccagaatgaggtctcagggccaggaggcctggtatttgtaggccagggaaggggaagaggcaagtggtctggggtatcaccagccagccctctctgatttggcctctactccccataagtcacagtaccataagcaggcttctggcctcagcaatttggtctttgtgcccaagtttattgtgagaatttcctgaaaactctataaaaggtctcttcctactgtaggcctctaatgtttctcccctttttgcttcagtccactcttcagtcttgtaggcctagttttcaaacctgcacatgtgtcctacctggccacaggcatgcaggcctcaggcagctgggccagtttgggagcctcgggtgatgtctgcacgatctggggctgcctctgcacccctgctgtgggcttcagggttggagaagggctgggaccaaccgggtgagatccacaagtctctggatgtggctgaaggcaaatacacaattgaagtactttctgttttgaagtgctttcccttttgaatctggtttgaaacatgcagcttctgtctctagcccaaggaaagaccaaaacatagggaaataaaagcatttatctttgtcttggaagtaattgttgaagttgtgcagttgatcagtgcacagttagatgcaatgtttatagaaattgattgttaaaccaaatttacactggcatgtgtggtgtagtttctaaaaggcacttcacatttgaaatttttcttaccttagaaagtttctagtgatctaaatgtctagttttgtattcttttgtgtgtgttcactgtttctcagtattaccacttgaataattctctgtacaggggggtttgtgctatacactgggatgtctaattgcagcaataaagcctttctttaaaaagcaaaaaaaaaaaaaaaaaaaaaaaaaa

SEQ ID NO: 24649 - DNA, 3187 bp, Homo Sapiens
aagatggtgcggacgctagcgaggaagacctgacacgggccaggcaggaagagggtgcggacgctagtgaggaagatccgacaccggccggggaggaagacgttaaagacgccagggaggaggacggtgtggacaccattgaggaagacctgacacgggccggggaggaagacggtaaagacaccagggaggaggacggtgcggacgccagcgaggaagacccgacatgggctggggaggaagagggtgcagactccggggaggaggacggtgcagacgccagcgaggaagatgatacaattaccaatgaaaaggcacacagtattctaaattttttgaagtcaacacaggaaatgtatttttatgacggtgtctccagagatgcagcttcagctgccctcgcagatgccgctgaggagctgctggaccgcctcgcgtcacacagcatgctgccctcagacgtgtccatcctgtaccacatgaaaacgctgctgctcctgcaagatactgagagattgaagcatgctctggaaatgttcccagaacattgcacgatgcctcctggtaagtaccgtacgatttattcaaggtcctgcttaagatactctcatcgaggtttgcctctgaaagacttacacgccaccaaaacagcaatgagttggaaaatatgacactgcacatatggcatgggagaatagagtcccagagagaaacaggcttcctgcatctctgcttgatataaaaatatttcacataatatatgcagaaatgcatgtgcagtctaagtttccggacttgggagctgtcaactcttggagccaaattttcctaagtttaaatagaaatgaattcatttcttcctcttttccttctcctctactgctgtggtagatggtaaatttttgcttacctccaactctctggtaccttattgaacccctgacgtggtgatgacgacttttattttctgccaccttcaccgggcatccttttcatgcaaactgttgtgtgctggagcagctgtgctcatgtcttcccaatgccgtgtgcggtgacacaagctgtggtgagggtattcaggccacagaaacctgcaaatgctgaaaatcagaaattcaggctgttgagccattcacctgcacaccactgagtgcagagcagcccacctggcccagggctggcgtcccagaggaggagtggaggagggtccgtggcacccgtcagtggcacctatcccagaggaggagtgaaggtgggtccgtggcacccgtcccagagaaggagtgaaggaggctctgcagattttgtggagggagtttcagagtaagtgtcgggagtggtttctgtccgtagaaaccacattgctgaggggtcaagaccagcatgttagagaagccaggtagcaaacagttacataaccacggtatgatgatgccgtggcaccggtgcagggagccgggggctgcagggaccacaaggctggagtcacagcgtgcagagcatatgggtgctggaggagctgccttcatgcagaacgccctcatccgtcaaggagctgttggctttgtgttgccctgcatggtgctgtgggctgtggagcctaccactggggaaggctggtggggaccccaccctggggcgcttgctccctagctgaggagctggaaaagaagccagatactcggtgagatgcgtcatagagctgcagatagatcctggagatgaggctgtggaggagcgggaagaggagggtgttgttgcagccaagtgcgcatgcgctgagatgggtgaacccatgtgtttgggagctgcgaggagcccggtggctggaccaggggatggatgtgagttgcagaaggtggagaaggtgaagaggtgacagggccaggcacatgggaggagcccggtggctggaccaggggatgcacgtgacagggcgagaggcattgagtgagtctcagaagggggaaaggtgacaggaccaggcacatgggaccccgggcatgtgagccttgtgggcttctacgcagacagagacaggaggttcctggaagctatgaggcttctgggctgttatcttgaggctggatggaggagatagagaatggagaccagtctggggctgctgaggacctgctgagagatacctgcagcgtggaccaggtgggggcggctgaggatttgccaagaggtacttgcagcatggaccaggctggggttgctgaggacctgctgagaggggcctgcagcgtggaccaaggtgcagccacaggttaggcagctgtagccaacgtccaggtggaccatggaggtagaaccagtgggagctgccgagtggccggtgaggcactgggaggaccaggtcaccgcgaggaggaggaggggctcccagaaagatagggtttgaggtgagaggccctgcccagagcgcagtgctgggcagctatgcaggtgccagtcagacctcaggttccagctgaggctcaagagggccatgaggcccggagtgcagggaggagagagatcagggacagtgagtacagatgcccaccaggagcgtggccagggaccatgagaaacgacactggaggaggaagcagggcccgcgggcgacggaagagagaggaggggccccagcaggaaggtggcagtgctcctgagaaggcacctgtgtgtgtggagagggcggcgttggccccaggcgggcatctgtttctggtgggttgtcaggcctcttacagcaagtacttaacaaacttagatttccataatcagatttatctcaaaccgcaaaaaaaagctgattttattatgttaaactgataggagatttttatgagagatgaaagtaagcgattttaactttttaatttttttaatttttgctctgtttctcacacttgaggcttttctgaaattcaccaaaagagttttggcagttgtggggaatttaccagaaccccccattattaaaacaattggtttcttatattaaaatcatcagacaggttttgtgtacacagacatttatgttaagccactgatagaactaaactgtgtgtaggaacctgttttctctaagaaaggactcctttgagttctgtaggatatgtgcttaaaggttttctgtgtcaagctattttatgaaataaaattttacaaacaatgaaaaaaaaaaaaaaaaaaa

SEQ ID NO: 24650 - DNA, 3234 bp, Homo Sapiens
cgcccatactttggtggccactgaaagtcagcggcgcggactgccctgagggcgggaaagggtggtcactgggtcagcccgaagcacctgacatgagggcggggaccccgaaatgcacacgaagtccggaactggtcttctgtgattttcattcgccctggtctctgttccctttcgtactcaaagctcgtgcatccagggaggggaaaccggagatagggtcttcgggccccgggcagaccctctgtgccgctgcaaaccgttgcagcctgaggctgtcaggtcctcccccagacacctgcggaccctccctctcctggcttcccgtctggtcatggcgagattctgggtctgcgtagccggtgctggcttctttcttgcatttttggttttgcattcgcgtttttgtggctctccagtgagttgggtagtgaggaaatgactgtcgggtgtgcgggtagccctgttgggaggcgtcgccacggtcgtggcatggaggtggcaggccctggttccctcagtagcttgtctcaaagcctgcacctgggtccaaactgccttgaccctttgagtttaaaaatttgtgtatgttacatcgccattttcctctttcccaactcttactacatcctcaaataatttgcagacttgtattgtggtcgtgttggtctttaggcatctaagctcatttctttggaattatttcagtccagcaaacttctagttgtcaaggcatgcttaaaaataagccctgttacccggcccccccgccctttttttgttcttacctagacggtaaactaaatctgaattgtctgattttgtttaaggttttgaggaactttacttttgcagtttcctggagaactgagaaaattctttaccggctggatgtgggttggcctaagcacccagaatattttaccggaacaacattttgtgttgcagttgactccctcaatggattggtttacataggtcaaagaggggataacatcccaaagatattagtgttcacagaggatggatatttcctacgagcctggaattatacagttgacacacctcatggtatatttgcagccagtactctatatgaacaatccgtctggatcacggatgtaggaagtggtatgtatagtaatatctattaaattatcttactggaaatcacatctttgcacatgtccttgtttgtattgtttaaaatcagagttgctgaatctaattgtaatttctttaacgattcatgaaatcacatgtttttaacaaactttattttgtacttctgtggaattaagaaatttaacaagggctggacgccgtggctcacgcctgtaatcccagcactttgggaggccgaggcgggcggatcacgaggtcaggagatcgagacgatcctggccaacacggtgaaacccccgtctccactaaaaatacaaaaaaaaaaaaaaaatcagccaggcgtggtggcgggcgcctttagtcgcagctactggggaggctgaggcaggagaatggcgtgaacccgggaggcggagcttgcagtgagccgagatcgcgccactgcactccagcctgggtgacacagcgacactctgtctcaaaaaaaaaaaaaaaaaagaaagaaatttgacaaggagcctgttaatatgatctttccttgaacttgtctagggtcttttcctctttaaagcatcagttgctcttctcagattaaataactctaaactgaagccaaataaagtggcagtctctgaaagcaatgactggaatccttgactcttattttccttttccagttttctttcataaaagattgtgaaatcgtaactgctttgttgctcaaagtgcaaagattgcagaaactgttgttaatgtttttgaaattctactgactgaagcatgtctgaaatcttcctgccatcaaatatttttagtagaaaaagctgaaaaatgaagtgagcacaactgaatgtgcagctatggagaaagttttcagagaaacaattcacctgtggctgtagcttaagacaaggcaatacctgagatatcctggcattaccctaggaattcaggaagaaatgggattataaagacattatttctagtattccttggcccagttatgttcttgaattgagggacatcctggttctacagtcctggctgattcagataccattttttagagataatgagttctcagtttctgtaagtagtgccattatcacagctgttctcagaacccataagatttctgggcctcagctgatggcccatttatttcatgctgtgttttacatagtatgaatctggttcaaccaaaaaaagtctatagattatcactgagtgaattgttaatactataatgagagtctattttcacttttttcctgaagatccactgttaaagaccatttctttgagttcattttattcatgtgatttttaaaaataagacttccttgattcccagaaataaaaagagcacagacgatctcttcattttttccattacagctaattttctacccagagatctgaagacagttttatattcccatttcccaaaggaataaatttcctctaatgaaaaatatggctacaaattagcctttttttttttttgagaaaattttttattggtagtcttttttgctagtttttagaaacttggaggcttatgtgttttttattgctatgaactttagctcaactgtctaaaagtgtaatagtaaataaattatttaacatagaattgtaatgcaagctgattcactttctttctggtaagctcaatgtatccagtttgtcttttgaatacctatcaattaatttggcatatgtaccttcaaattgatttctgttcactgctttatgatattcccttattagtaggagataattttaacttaaagaaattttaacgtgagaaaataagatactcatgatttacaaagattattttcttcttagcaaagaaaagttgggttgaattttgaatgtctccacaaggtgaaaatgcagttaaaaaaaaaatctgtaccatagagaacgtttttgttgacttactgaaatttaaggtctgtatgtgagtgattgaaataacagtttcaaatataagttgttccctttacattttcttcttgatttcctttcataagcaatgcttattcaaggtcataagattaaaaaagaaaatggtgcaccaataaaaaaaaaaaaaaaaaa

SEQ ID NO: 24651 - DNA, 3405 bp, Homo Sapiens
aaccagaactgtgcccccatcccctgctctcctcagtagggcaccctgatgcccgagaaccagtgcagaccacactgccagccttggggggctggaaaggaagagttagatcttggcctttcagggctttggccaaagaaattgaagaactataagattgggaaaagtccagttctacagatgaggaaactgaggcccagtgaggggctggggctcactccaggtcacaaagaattggtgtcagcgcagagactgggactgcccttttggtcactgggcactttaagagggagagaaagggaagcccagggcaatgtgaaattggccctcagccaggcagaaagctctggcaccaaccctaccaagttctccccatgtgggcatctagtgatgagaggcagtgtgggatgaggagggagccctgaaacaggaggctggcatctggtccagtctcaagtgagttcttggcctgggcctgttgcttttgagcccagcggttcacctggacaggggaaggtcagactaccagtctgggcagtccttaccctgacatcccatcccactatcattttgcagggctttcccctctccttcctttacgtatacttgtggttaacattgttgagtgcctgctgtgtgccaggcattgtgctaagtatctctttcgatccacacaacaaccctatgaagatattccccccccctccccgttttagagatgaaaaaacaaaagctcagaggccttgagggatatgcgcaaggaatcgcagcttgttaagtgctggggtttgaacccctttgatgtgagttcagagcctttgttccccatcaccactcatgggttcatctgggccgccccgagcagctctaggtgtttggagaaagaagtgaaaggagggagagagtatttgtgctgcagggagcgaagcatgattttttggcaggtgtctatcctgggtgctccccgtgcctcacagcagagtcagcaggtccccgccagcctgagcatgagaggaagaggtcagcctccttgggccaggctctgaggaggtgtggagtagaggccccgtggttgaggagccatagggaagtgctctagccacgcccattgtgaaggccacatttgagggtgtggctttctcctagagatctgagcacagtaacagcgctcagtcacagagaggcaggagagaggttctgttcctcctgggttttggtgcccccatggctgtaagattggcctattatactctttggagtactgcatttcttcttactctcaaagcatccttgttaagaagtgggtatgaccaccatgttttttaggttagaaaaacaaggcccacagaggccaagagcgctacccacattgaaagaatgaagggcagggccagactgcacctttattagagtctttgccctgtcgggatggggacccaatttaggggccagcatgtgtctagcagtggaataggggtgcagggagggtggggcaagagccccatgtgtcctggaagctgagggtcccccagcagcggccgcattgccagagccccctgctctgctgctctgcctgtccgcctatctgccattccatcatgtgtgtgcagacgtgcctgctccctggatgccagcctctcactgtctcctgtgctttttgccagcccaggcagtgactgacccgtgacccagcatgcaaagaagcctggagccaggggcccagtggaaccagcttcctccaaggagatgacctttctgcccccaaggaaaccccttccagctgagcagggaatccggccggaggaaggagcagcttaccgactgcgggtgttcaccacaggccaggccctaatatacacccactagtttagctcagactcctctctacatatgaatggcaaaggcacttttgatatacactgtaaaatacactgtattttagaatcggaatctattttctaatgttcccctcaagggctgagtggcaggaaggttgaggatgcaggactttgcagctgcacgtacagattcaggtacttctgggtgacaggtgttgtgggggcaggaagggcggggcaagccgaggctagtccaacttccaatgacctcaggagaaagtgagatttgaagaggtgttcccagtagactccagcaagaggctggttggcgtgctgtctgggagaagaggggcccttggctgcagagatcagctgtccctgacctgatgaccagctctgtgtgaaactccacgaggatcacacgtggagcccaagtctgtgccttgccccttgggtttggcttaggggcaacagtgtgttcaagaggactggggcccacaacctgcccccaggcttcctccagcaaaaggctcttgtcagaaagaagaaagcagtttgctatctttttttttttttgagatggagtttcactcttgttgcccaggctggagtgcaatggcacgatctcggttcactgcaacctctgcctcctgggttcaagtgattctcctgcctcagcctcccaagtagctaggattacaggcatgtgccaccacgcccggctaattttgtatttttagtagagacgggggtttcttcatgttggtgaggttggtctcgaactcctgacctcaggtgattcatccgcttcggcatcccaaagtgttgggattacagctgtgagccaccacgcccagcctgctttcatttttaacagtacacattgaaatacagaaaaggtgagaggaagcaactttcattgtatcgtagcaataaactccacactgggtgacatctacctagaaatcccttccctctaaccaggccatgatgggaacctttgctgcctgcccttggagaaccccggattggcttccctgggactcaggtctggtggcaggagggcagcagtgtgcccccaccatccctcatggcctgccgccagcagggccataatggcaggactttgatttgacttccagccccacatgaggaggggggctaccaagccaggtgcagtgtttgtggccctttatttaagttgttttcttatattattctgcatataaacaatgacgtttaaatggaaaaaacaacaacaacgaaaacctccattgggtggagccacactttaaatgaaaatttctctttgactatgctcagaaaaaaaaatagaattttgaatatatttagcagttgttgtctatttttaactaactccatatgctgccagtatcgacttcatgacatttgccaaaataaaattttatttttgcctttataagattttcttggaaaaaatgaaatgaatattttgcaagaaaaagttaatttaaaaatgtaatggtttgcaaaaaaaatgtgatgtacagattaaaatattaacctaaaaaaaaaaaaaaaaaaa

SEQ ID NO: 24652 - DNA, 3025 bp, Homo Sapiens
gaacaatagaagatctaaaaatgtatgaacaccttttccctgagcttgttgatgattttcaggactatgatttaatctccaaagaaccaaagccttttgtatttgagggaaaagtacgtggtcctattgttgttcctacggcaggcgaggaaacatctgggaattctggcaatttaagaaaagttgtaatgaaggagaacatatcttctaaaggagatgaaggtgaaaagaagtctacctttatggatctagcaaaagaagatattaaagataatgatagaacattacaacagcagccaggtgatcaaaatagaactatttcatcagtccatggtttaaacaatgatattgtaaaggccttggaccgaattacattgcagaatattccttctcaaacagccccaggttttactgcagaaatgaagaaggactgcagtcttcctcttactgtccttacctgtgctaaagcatgtccacacatggctacttgtggaaatgttctgtttgagggaagaacagttcagctagggaagctttgctgcactggagttgaaactgaagatgatgaagatactgagtcaaattcatcggtagaacaagcatcggttgaagtacctgatggaccaacactccatgacccagacctctatattgagattgtgaaaaatacgaagtctgtcccagaatattcagaggtggcttatcccgattattttggtcacattccgcctccattcaaagagcctattttagaaaggccttatggtgtacaaaggacaaaaattgctcaagatattgaaaggctaatacatcagagtgatatcatagatcgtgtggtatatgacttggataacccaaattacaccattccagaagagggagatattttgaaaattaactccaaatttgagtctgggaatctgcgcaaagtaattcaaattagaaaaaatgaatatgatcttattctgaactcagacataaacagcaatcattatcatcagtggttttactttgaagtcagtggaatgcgaccaggtgttgcttacaggtttaacatcattaactgtgaaaagtccaacagtcagtttaattatggtatgcaaccactcatgtattcggttcaggaagcattaaatgccagaccatggtggattcgtatggggactgacatttgttactataaaaatcatttctcaagaagttcagttgctgcaggtgggcaaaagggaaaatcctactatacaattacatttactgtcaattttccacataaagatgatgtttgctactttgcttatcactatccatatacgtattcaactttacagatgcatcttcaaaaattggaatcagcacacaatcctcagcaaatctattttcggaaagatgtgttatgtgaaaccctgtctggaaacagctgccccttggtgactataacagcaatgccagagtctaattattatgaacatatctgccatttcagaaatcgcccttacgttttcttgtctgctcgggtacatcctggagaaactaatgcaagttgggttatgaaaggaacgttggaatatctcatgagcaataaccccactgctcagagcttacgagaatcttatatttttaaaattgtccctatgttaaatccagatggtgtcatcaatggaaatcatcgctgttctttaagtggagaggatttgaataggcagtggcaaagtccaagtccggatttacatcctacaatttaccatgctaaggggctgttgcaatacttggctgcagtgaagcgtttacccttggtttattgtgattatcatggccattcccgaaagaagaatgtatttatgtatggttgcagcatcaaagagacagtgtggcataccaatgataatgcaacttcatgtgatgttgtggaggatacgggatacaggacattgcctaagatactgagccatatcgccccagcattttgcatgagcagctgtagcttcgtagtggaaaaatctaaagaatccacagcacgtgttgtagtttggagggaaataggagtacaaagaagttataccatggagagtactttatgtggctgtgatcagggaaaatacaagggtttacagattggtacccgagaactggaagagatgggagcaaaattttgtgttggtcttttacgtttgaaaagactgacctctccattggagtataatctgccttccagcctgcttgactttgaaaatgatttaattgaatcaagctgcaaagtaactagccctaccacttatgtcttggatgaagatgaacctcgattccttgaagaagttgattacagtgcagaaagtaatgatgagttagatattgagttggctgaaaatgtaggagattatgaaccttctgctcaagaagaagtactttctgactctgaattatcaagaacatacctaccttgagcccgctgccatctcttgttaactgcaaagaataaatgaaatatcttggtttttatttcccaggaagcttgagagaaatgagtttatacagagctgactcaaaaagacaaaaagtaacttgggccagtttggtttcaagataataaatgtgttattaattaatgataaaattggcgcttgttttattttcgatattcaatgcactttatgtagcattgaatgatcaaatattggatttacctttaaaaaaaaaacctgagtatcattgcatgaatttttatctccctatggttatatcctgcatcaagtggataattttgaagtgtgttcagaatataaaattgaaattttagagttgttgaaaatcctgacttgttgaaaactaatatatatgtacatggatttctatagatgtgtttgtttagaagtgggtagatattgcagataagactgttcttcagaatcatgttaactattgggttgtgactgaagtagtccagggtttgccttgaaaccattacattctacatttaccaaattaaacaaataaaaactgtattaaatgttaaaaaaaaaaaaaaaaa

SEQ ID NO: 24653 - DNA, 2938 bp, Homo Sapiens
ccatgcctggccgcatgtgtcattttcttgggtgttatactgatcgtatatttgcaggtttgcttttgtgacagacttcttctgggggaaaaaaagtatccttctatctttttacttttgtccagttccaggtatccctgtttttttcttcactcttccttccttgttcatgggagtttttcttgaggacttcaagcccagcttcggagaatcctggttgtgtcatctcatctcctttctgctctcttctctacctagcctttccaccctcacacctcccggggtctgaaaatggaaagataagggtgtttccctgaaagttgctcttctgtgtggggatgacaggttctaaagactcttttctggtccctgccctcattgccatgattaatcagttaagtggcccgaggttttgtaacagcacagtcttaaaatgcttctcccaagtttaatttctctccatttgaccttttaaggatgtgaattggctttaagcagtagactccctttagtacggcgctgtgagcctctcagtgaatctgctacatccattccacccacgggtctggaaacttgtctgtttacctttccctaaaaacctaagatatatttttaagaagtgccttgtaacttttcatatagcctttcccctactttgggtagactgtttcttacaggaatttggtagatctttccaaagagaattctgtatctctatttttaaagcataaatcctgtcaactttggaggagaactgatttggcttgagttttctcagacatgggaacttttgacctaagtttgtattttacattgttgaaagggaactccgggatcccagaaaacatatggactgcaattgggtaaagtttctgtttcagtacttattcctacttactagccgtttaatcttggtcaagtcagccatgtggctctcaacttcctcatctgtaacataaaaggattagagcagacaatctctaacaaatgctataataccactgacaaataataatattagctaatatgtgtaaggcactgtgtttagtgctttttcccttaatacaatagctttgagatataatttatataccatacaatttacttcttaaaaaagtacacaattcagtaattttaatagataggagtaaccatcaccacagtcaattctagaatatttttatacatcagaagaaaccctttacccattatcaattactctccattcctcctaactccctcccagccctaggcaactactagtctactttctgtctttatttgcctcttctggacatttcatacaaatggaaacatgcagcatgtagtaatttatgacagcttctttcacttagcatgaggttttcaaagttcattgatgtggtagcatttatcagtactctgtgcctttttatggctgaataatattttatcatatggatttaccacattttatcattttatttatccatcatcagttgattgacatttgagttgcttctactttttgagtattatcaataattctgttatgaacattcttgtataattttttggtagacatttatcttcatatttcttggatatatacctaggagcagaattgctgcgtcagatggtaatgctgtttaaccttttcaggaactgtcagactgttctgaagtgggtacattattttacattccaaccagcagtgtatgagaattccagtttatccacatcctcatcaacagttgttattgtctgtcttttttattatattcatctgtaatgtgaagtgtttatctcattgtggttttgatttacatttccctgatggttgatgattttcaacatcttttcatatacttattagtcattatgtatcttctttggagaatgtctgttcagatcctttacctactttataattggtttatctttttaatattgaactgtaatagttttaaaaaaatatatcctaaatacaagtctcttatcagataatatgacttgcagatattttctgtcattctatgtactgtcttttcacattcttgatgatatacttttcagcccaaatgtttttaacttgatggaatacaatttattttttcttttgttgcttgtgctttcagtcatatttgtgaaaactttgcttatcccacattacaaagatttactacttctaagtgatttataattttaccacctacctttaggtctctgatccattttgagttaatttttatgtgcaaggagggagtctaacttgattcttttacatgtggatatttagttgtcccaggaccatttgttgaattaagtgcccagaacaagtacatctatatatagagaaagtagattagtggttgtcagagactgcaagaagtggggaattggagagtgactgcccatgggtacaggcatgctttttggcattatgaaaatattctggaattaggtagtggtgatggttgcagaacttttggaatatggtaaaagacactgaaatatatgcttaaaaatggtgatttttgtgatatatgaattatactatggaactaataataacagtaataaagcaaggtgtctttccacatctccatgccttgtattttcattaaaaaaaaaaaaaaaaaaaaaaaaagcatttcagggccaggctcagtggtttactcctgtaatcccagcacttttggaggcctaggtgggaggatcgcttgaggccagaagttcaaaaccagcctgagcaacatagcaagaccttgtctccatgaaaaataaaaaattagccagaaatggtgatgtgtgcctagagttccaactacttggaaagctgaggcaagaggatcacttgagcctaggagttcaaggttgcagtgatctataatcaccactgcactccagcctgggtgacagaacaagaccctgtctcaaagaaaaaaaaaaaaaaaaa

SEQ ID NO: 24654 - DNA, 3780 bp, Homo Sapiens
aaaagaatttggattctaatttatgaccatcttgacatatggtcaaaggtgtcattttcctactcagtttcaattctgagttaatttcttaagccttaaataataagaacaatggacagcctggcctggcagagagtttcacagatgacttaatctgagcaccatcacagagaagtcaggactaaaccccctactgagcagggcggcggagtgtccaaaggtctcagttctgtggagcagagtaccacgctttctgtggaatggggacagggtcaccacgctcactaaaatgcagtatgttccattgcagcaaagctttcgcctgtgttcaaaatgcatgtctagcagattgcagccttttaaattaaatatatataaatggttgtatatagaatatactctggactgtgagggcatcctattttggtatgcctcctggctgtggatggcatgtccagtgctctgtgagtgttttcagtcattcacattcactatgtgtttagagattctctccctgcttacagctgaaggatgttgatacaggcatcaagaaggctgaggggcagatggggcctgcaggttaaggcattgttaacttgctccatggaaatgtccatatcttaatgagtaaaaaagtgtatttttctgatacgtaaaccagaattgtgggcgtgtaggtcacatcactatttctttagcagcaaatctgttttcccagttgagagagacaatagcttctgcacaagaatatatgatggtaggatccatctgttcaattgtgtctgaaagaatctttattccaaagcgaaacctggggaaatgttttaccttcagccagatgctgtgtgtgtacttgggtcccttgtctttcctctaaggagaggtgcttgtggaaagtggaggttgtgggcatcttttcaaccttttcaatctgacctttcaacaggtcaggtgagagaaaagacaaagctatttgaacctatgtttttcttatgtccagaaatccgttctttcatcaaaccactaaaccactcgccttagcctcttctgcagtttctggtggctctatctgtgggcaagggactcctgcctgtgagaagtggccaggccctccagagcaacggggtctggcttcagggagcagtggggtgtggggaaagcaatgttcatcttggctgctccatttttataccatccatcaaggactcttgcgcttctctccacctgtgacgtagcagcattgccttctttcctcttggtgcttctgggcaaaactggaatttgaaatccagaactggcgttgtcttcttaaagagtatggttcctgcctcagttccagcctggtatggttctttgatatgccctgaaggttctcacatggcaacatcagtatcctgccattcatgttgttttaagatgttttaaaaaccaatggacaaacttcttgcttcaaggaacaaactcttaggttggcaacagcatataaaaaaaaagatcacagctgaatctcatgaaagattaaaaaccaaaggattcaagaccggtgttgtaaaatgaagaggaattttacttacatgttacagctgccaagtttttagatgttcctgtcatagctaaatagtcactgctagcctttcagagaacagatagtaacaattgtttgcagctgcagtgttgcatctaattttggtgtttaggctttttattttgtgggaagctttttgttaatatcctgcagggcaactgcctgttgggagggagaggatggaagaaggagcttactctgggggccttgcctattgagggaggctgttgcccagagcagttgcttcatggaagtcatccaaaggcgctctcagtcattacaatgacaggatctcaaagttgggaaagggctgttaagtcatccagtctagtctccacataggtgctgacattctgcctacaaccatcccaccaaggggttgagcagtctggacttaaacacctccgaggacagagaacccactacctcgtggagaagcctgttctttgtaaacctctggcttttctatgttctctgtaatttccatcttagtctctgccccatgggggccacatgggacaagttatttttggcaaagcacctaattgctggcactgtcccaaagcatagcgtttgccttttggaaagaaacaatgctaggacatggacactttggtacactgtccttacccctgagtattagtccactcagttccttgttggagaatgttgagaaaaccctactggctggcttgtttctgccaaagcttggggagaggagagggggatgagaagatgttagcagcctgctaaacctcagacagatgaggactcagttctgtgcttgccccacaaaaacggatgctcacatcatcaggaaattgttcagctggaggatttataacttcgttgctttgcatgaagtttaaagttttcatggttgcccagggcttgtaccttagattcctgtaaggactttgcactgtttttgctgagaaaacaacgcttcaggacttaaggtctaagcgtcagagaagtgccgtattttcaaggtggaaagtctgttaagcttgctgttgtccaatcatccgtttttagagatggggaaactaaaactcaaaaagatgtgcctgaggtcatatggcattatcagaaccaacctctggccctcttgacctgtctagcattctttctttctgacctataggatgactctaattcagtctaaatcggctgccctcagattcttgagaacttaaaattgagcagaaattcccaaggccaacctagctctcagggaccaacctgcagaactcaagattgagcgaaatgtttaggccagttgagttttgcaaaatgagtggtaagggaaaacagatctagcctgttatttaaaaccagggttcaaaagccctattgggagaggtagtattgtcctagcatttaaattctcatgaaatgtgcttggtctgtgatctcttggtcagatatctgccttccaggcgatcctttgaggttgtgtaattcagctggccctggctcctggtccctgttactgagctgggcagtcgaaccgaagggcagatgagctcaagatcatgccttgggaagcatggtgctctaggggtgcctttttattcctttcattgtattatagactgtttccaagtttatggttagaaatggtaaagtgggtctggtgttttgaggtagaacccagcctagggcaagatatgaactgttcttgaggtagaaatgtctacagtcagttgtttcatctagcttgcatcttaaaacacaaacccttcagttgctttcacttaatgcacacatttgccaatgacagagggttatacaggatccttcttttacatttctattgtctgctacgctcatcagagtatattttggggtacaaggttttgggggttttttttcccattttgtaactgccttattgaaaagtaagtgcccttccattccaggcctcctcatattgtacttgtttcctgccaaatctgggggatcatttgtattttaactttgtaatctatggctctgtactgttgaaaggctctcaattctgtggggtctccttagtatgtatgtgacttttcatgttgcaatatcacacgatgggatggcccgacttttgctcttaataaataatctgaatgagtaagaaaaaaaaaaaaaaaaaaaaaaaaaaaaaaaaaaaaaaaaaaaaaaaaaaaaaaaaaaaaaaaaaaaaaaaa

SEQ ID NO: 24655 - DNA, 3522 bp, Homo Sapiens
attactattgtgcggctgcaggaggtgtcgagcggcgttatttttttttgcggtttgcctttttttttctttttttttttttggaaccgcggttgtttaaaagcctgagggaacctggaggggggctcccactctctaccttctttcctccgagtttgtgactccgagatggacaaagtgtgtgctgtttttggaggctcccgaggcattggcagagctgtggcccagttaatggcccggaaaggctaccgactggcggtcattgccagaaacctggaaggggccaaagccgccgccggtgacctcggcggagatcatttggcatttagctgtgatgttgctaaagaacatgatgttcaaaatacatttgaagagatggagaaacatttaggtcgagtaaatttcttggtaaatgcagctggtattaacagggatggtcttttagtaagaacaaaaactgaagatatggtatctcagcttcatactaacctcttgggttccatgctgacctgtaaagctgccatgaggactatgattcaacaacagggagggtctattgttaatgtaggaagcattgttggcttaaaaggcaactctggccagtccgtttacagtgccagtaaaggaggattagttggattttcacgtgctcttgctaaagaggtagcaagaaagaaaattagagtgaatgtagttgcaccaggatttgtacacacagatatgacgaaagacttgaaagaagaacatttaaagaaaaatattcctcttgggaggtttggagaaactattgaggtggcacatgcggttgtgtttcttttagaatcaccgtatattacagggcatgttctggtagtggatgggggattacaactcattttgtaatttgcagattattcagttataggggtgattagcatcaagggcacactttggctactgattagacaattatacctacatgggtaacatgtgctaatcaaacctgctgatgctacaaatgttaatttctgtctttataaaaatatgtctcaaaagaacaatgtgtgacaaattgtggttttttttttttttggtctaagttacatcagtgttgttttgtttaaaaagccttcatgagatacaattcacataccatataatcacacatttaaaatacacaattcagtggttttaacatatttaaatacatgtgcaatcatccccccagacaaattgtgttttctaaaggatgtgtatcacttacctttggttacctcatagactgtagcaatcttagtgtatagacattttgcaagtcatataaacaagtattgatttatatattttgtctcaaaagtggaaaaattatattgtctaattatgatgaattattttcttgtatcaagctgaattttctaaaagttaaccttgtgggctgttgccaaaataagagtatttagaggacactgattagttgtcaatactttagcaagcccactaaagataactatattccttttgcatgtgcttgggtgatcagtttttatacaggttgcaaaacatagtattcattaaagacatgaatttagaattgatttctttgagtggtatttctcttgattgagcagctagacaaaataatctgcaaatttaaatgtggcgcatttgactcattcttgagaaattctcataagtgaagaggattagcccttaaggttttaatacctggtacagtagtgaaccgcacagatttcatgaacttaggatgtgttttttattcatgaaaaacttagaatagtgaactattaatatttaaaaacgagaaatacaacatttaaaaaattaagagtattttgcattagtgattatgattcttatcccaaaattctagaaagtaataaattctgtatgaataagcataaaaaataaataaatatgcaataacattaaattaaatgtctttacaagaagcagtgaaggcactggtcttaagtgagaatatttgcctgggagtagagataaagacacaaaccgaatgtgaaataccaggtaataattattttgcattaaactctttttatcgggaatagtatgatattttcaatgtcactccattcatgttgatttggagctgacagttattttgtgtaagcagagatttaattttatattgaaagtcagtgcaaaattatgaataggatatactaataaatacaaagtaataacaaaaggcaaagcagtgttctaaataaaaattctgggttccttaaaaattattttaaatttatctttgaaatagttttcttagattaatctcaggatatgagaaagtcaattaagtgtgagtaaagttagtatcattaaacaaattgtctattaaatgcaagacgtggtaatatacagaatttatcaggcattaccaagtctaggcacatataggaaatgcagcactcagaatggtttcaatgtagtagttgatgcttgtaaggtaggggagcttattcagacatagtagatagtttctctaatgctgtctcaattgctggcctttggctacctgtacttccccattatggcagcccattcagtcttgagttttcttctctggacaccttatgctctgaaatcatgagcgaggctgattcaattggtgatttgggtagaaagcagtatgttttgctgacattaagatgtaggttatagataggtttagcctttaagtgtatgtttttatactttaaaataagaaatataaccttttaagctattccacctcctcccccagcctatctcaaactggtggaatatatggagagatcttgaaagaggtaaaataaaccttcactgctccactccaggtgaatccgcccactcccactgacctagtagaatttgtaatttaatacttaccttctatttctgaaatcagttgtgaactgttgccttatgttcagaggtttaagaacctcagtgaattcattttttaaaatctgctattctgagaagcattgaatgaattcttaacaagaagactcatctgtagctgtttgctgactcctatgagcccataagggttctgtgcttagcattaacaaaataaggtttataggtaaagccaatgtattaatttttttttgcatggagggctttaaaatttgtgctctttttcatattttattcatattcaatttatggtttgtaactgctttttagggagataattatatgttataaattagttttggggggaataattgtgcaaagaggataatttaatttacgtgcttctgttattcagaataaagagagaagactacgctgcatattcaagagttgtaccttaacattggtgaaacattttttctaagattttcaaaaggaatatgtgtaaattgagaaatcataaccactgtcctaacttggtaaacaaactgttcttaaataaagtatttaatgattttaaaaaaaaaaaaaaaaaaaaaaaaaaaaaaaaaaaaaaaaaaaaaaaaaaaaaaaaaaaaaaaataaaaaaaaaaaaaaaaa

SEQ ID NO: 24656 - DNA, 2938 bp, Homo Sapiens
gggagcggcccggaggagccggcggcggcccgaggagcgagggaccgaaccgggagccatgccgcgctgagggggggccgcacagccgccgccaccgccaccgccgccgggtggggtgggaggggcgggagacgccgccgccgccgcctccagggtgggcgcctttcgccgtggacgccgaccgtccgggacgagggtttcatcaccttaaatggttttgaaccaatgaaggtgtattcccttaaaaagacggacagcccatcgtgtgaactatagagtttgtggacagatttatattgggttcatagtggcgtcatgcacgcagactcctgcaagttcccctaagttcttagaggactgctttgccttttgatctgagagttgcaaagttccataaagaatggcccttgtggataagcacaaagtcaagagacagcgattggacagaatttgtgaaggtatccgcccccagatcatgaacggccccctgcacccccgccccctggtggcgctgctggacggccgcgactgcactgtggagatgcccatcctgaaggacctggccactgtggccttctgtgacgcgcagtcgacgcaggaaatccacgagaaggttctaaacgaagccgtgggcgccatgatgtaccacaccatcaccctcaccagggaggacctggagaagttcaaggccctgagagtgatcgtgcggataggcagtggctatgacaacgtggacatcaaggctgccggcgagctcggaattgccgtgtgcaacatcccgtctgcagccgtggaagagacagcggactctaccatctgccacatcctcaacctgtaccggaggaacacgtggctgtaccaggcactgcgggaaggcacgcgggttcagagcgtggagcagatccgcgaggtggcctcgggagcggcccgcatccgtggggagacgctgggcctcattggctttggtcgcacggggcaggcggttgcagttcgagccaaggcctttggattcagcgtcatattttatgacccctacttgcaggatgggatcgagcggtccctgggcgtgcagagggtctacaccctgcaggatttgctgtatcagagcgactgcgtctccttgcactgcaatctcaacgaacataaccaccacctcatcaatgactttaccataaagcagatgaggcagggagcattccttgtgaacgcagcccgtggcggcctggtggacgagaaagccttagcacaagccctcaaggagggcaggatacgaggggcagccctcgacgtgcatgagtcagagcccttcagctttgctcagggtccgttgaaagatgccccgaatctcatctgcactcctcacactgcctggtacagtgagcaggcgtcactggagatgagggaggcagctgccaccgagatccgccgagccatcacaggtcgcatcccagaaagcttaagaaattgtgtgaacaaggaattctttgtcacatcagcgccttggtcagtaatagaccagcaagcaattcatcctgagctcaatggtgccacatacagatatccgccaggcatcgtgggtgtggctccaggaggacttcctgcagccatggaagggatcatccctggaggcatcccagtgactcacaacctcccgacagtggcacatccttcccaagcgccctctcccaaccagcccacaaaacacggggacaatcgagagcaccccaacgagcaatagcagagaatgccagaaggtaatcactcagatacacttgggaccaagagacagtgaaaaatagatgaactaagagaaaaagaatcggatggtctttgtaactgattctggacatatgcatcattgatgttgcagtgttgaaactacaagagctagaaaactgaagatgtcgtctgcttacggaagcgctgaaagactaggatgtgatttattaacgaccaacttctgttattgtgtgttaagtttttcatctgtgcatcaaatcacaaaaagaataaatagagctttttcctttatcagtcccttgggcacagcaggtcctgaacaccctgctctacaatgttgcatcaagagttcaaacaacaaaataaaaaatattaagaggaaatccccatcctgtgacttgagtcccttaagtctacaggggctggtgacctctttttgctaataggaaaatcacattactacaaaatggggagaaaactgtttgcctgtggtagacacctgcacgcataggattgaagacagtacaggctgctgtacagagaagcgcctctcacatctgaactgcatactgagcgggcaagtcggttgtaagttcagtaaaaccctctgatgatgcaaaaaaaaaaaaaaaagtattaagtttcacaagctgtttgtactcaaatatattttctcagtttcagatcctctgctattttattgagtggaaagtcttgagctaaaagggttcaagaagaataatgttgcatttccttatgtctcaggaaacactttttatggtaacttgtcagattgtctatgaacaaacccacttttttagacattgataaagtcttcttttcttcacgtgatattttatacaagaacacttcagatgtattagatgtgactgattttaacaaatcctattagatttgtatcaactagttacatgttctattcatagtcttttgtgaatcattgcctttttgtttaaaaagatggcctattttgagcctttgtataggtacattcctgtttttgtgacaaaagaaaaactttaaaattgtcccaaacagaaaaataatggctatcagaagtatgttttgttttagtgtgagttaccgttactgtatttgtttattgtaaaggtggacatttagcgttcagtgcagttttcaataaaaagtaattaaaatttaaaaaaaaaaaaaaaaa

SEQ ID NO: 24657 - DNA, 3994 bp, Homo Sapiens
ggcgggaggcggcggcggtaggaagccggagacagcagggtgacagaattggaaaatatttaactcttaacaaatgaattccccacttgaactctgccgaattcctgtgccacctcctcctttagaaaactgatcttaatacagagataaaagaggagtagaaggtaaaagaaaatgctgggaactgaccgttgtgttgtggaagaatggttatcagaattcaaggcattacctgacactcagatcaccagttatgcagcaactttacaccggaaaaaaacacttgtaccagccctctataaagttattcaagattcaaataatgagctcctggagcctgtctgccatcagctgtttgagctctatcgtagctcagaggttcgacttaagaggttcacactgcagttcttgccagaattgatgtgggtttatttacggcttacagttagccgagacagacagagtaatggttgcattgaagcacttctgttaggaatttacaatttggaaatcgctgataaagatgggaacaataaagttctgtctttcactatcccctccttatccaagccttcaatataccatgaaccttcaacaattggatccatggctttgacagaaggggcattgtgtcagcatgatctcatcagagttgtttatagtgatcttcatcctcagagggaaacattcactgcacagaaccggtttgaagtcctgagttttctcatgctgtgttataattctgctattgtatatatgcctgcctcatcttaccaatctctttgtcggatgggttccagggtttgtgtgagtggctttccacggcaacatgaaaaacactggaaagaactctgtggtcgaatagtattggatcctgaatttatggtgcaacttctcacaggggtttattatgccatgtataatggacagtgggaccttggccaggaagttcttgatgatatcatttatagagcccagctagagcttttttctcaaccactattggttgccaatgccatgaaaaactcattaccatttgatgctcctgattctacacaagaaggccagaaagtccttaaagttgaagtcactccaacagtgccgaggatttctcggactgcaattacaacagcttcaatccgtcgtcatagatggagaagagaaggtgctgagggtgtaaatggaggagaggagtctgtaaacctgaatgatgcagatgaaggattttcatcaggggcttccctcagcagtcagccaattgggaccaaaccatcctcctcttctcagaggggaagcttaaggaaagtagcaactgggcgttcagccaaggataaagaaacagcctctgccatcaaatccagtgagagccctcgagattcagtagttcgcaagcagtatgtacagcaaccaactgatcttagtgtagattcagttgagctgacaccaatgaagaaacacctgagcctgcctgctggccaggtggtgccaaaaatcaatagcttaagtctaatccggacagccagtgcttcctcaagtaaatcatttgactatgtaaatggcagtcaagcaagtaccagcattggggttggcactgagggaggtactaatttagcagccaacaatgctaatcgatactcaactgtcagtctgcaggaagaccggctaggtcaagctggcgaaggtaaagagctcctcagcccaggagcccccttgaccaagcagtctcgatccccaagtttcaatatgcagctaatatcccaggtgtagttttgacatcctccctcatctttctgcttaccttttaaactgaacatttcattgtgcaagaagacacttcatcccacattgtgaaaatattggtcactgttatcagatttcatttagtttaggtatcttcatactgtattttgtatcaaaacagcaataaggttttctttatccctctttcctacatcttctcttcacctatcccttgtaaatgtgtttgtgaagcagtataaaatggttgccttttccatgccttcctttctccttgggtgatgtgcaatccatcgtaggctgatcggtcccatttcaacactgtgagactgagggtacattagaggaaatggtgtatatgatccctatgaaacgattctttggcttttgtttaaaaacaaaacgggtttgttctcataatctatagaactatgaagattactggatcatatttttttctcttaaccaggagtgcctcagagattctgctatgactttggacttctctgagtctgtgcaatcattttctggagaagcatggggaaaggtggtagactgctgcactttttcattaaaatgagggtagctctttctccacccccccatctcctttatcccgaagacataaatgttcaattacggaggcatttaaatcaagttgtgaccacctccattggagggcaggactcttgattgtgtaattgataatgcactttctcaatggctgtatagtcattattaacgtgtcttccctcttccccacaaggacatataaggtcatttctgtccttcaagtttggccaactaacaaatcagaatctgaggggcatgttctatttcccaggaatgattgacactttggtgctggggttttgtgggggcggggggtagtttttgtttagcttttgtggagattgtgtgtgtgagaggagatttgatttttttttcttcttttcctttgtgagctgatggctgaagtgtaacagtacatcttcaggtaaagagagggatttctcaatctactttctgttatgtcagactataagagaaaccctttcagctgctttctagatgtacctaaattcagtcagacattttggattaagaaacctaaagtcctgatacattacatactccaaggaaatatatcagggacagacaattggctgaaacactgatacttcaatgtgacacatttttatagaacatttctaccagggggtactgaccttgatttctcctacaaggaccacactgcctttgtgtttaatgtaatgcaatttgtgtaccttctaatcatatatctgcagttcctcatttttataaaactttgatatcatgccagtaagctagatgttgaatgtatgtaagtagcatttggtaactgctaagaggttacaaaaacattattggtaaaaaaaatttccttagttctgatctggttggataagattttatcataacttttctgggtctcaggctctgatgtttgaaaaagaagggaatatattgggttttaaaaaagtgtattgtgacttaaactgttataagttatccttccacagaatacatcagagctatcagtgctttgtacatttagatgtttttacttgattattgtttaagaaaaatatactgaatttatagaaagcaagtattctcctaattagcaaaagttaaaattttatctctaccattaaaattacaatagattttgataaataaccagaaaaaacgcctttttttttttttcacacctagcaatcctcccgtttttattgtaaggactttcttttttccctaagagactttctgttagactctttatatatgagatgcttgtttaaatatggtggtctgtaacatttttccagctcatgtgaaaatggaaaactagaacctgaactagtatctacaacattgccaaagtccagggtaaagctaaaagttgataagtagacaatttattgttttgtgtgtgtctgtgtgtgtgtgtgtgtgtgtgtgtgtgtgtatggtgtgtatatgtatatatcacaaagttgtattttaaatattttaaataccctttcttttaatttaagggatgtcaaataaatgaaaggagtttaaaaatagccaaaataaatgagctataaaggcccataacatactaaaacaggcagtttcaggtatgtaaggaaaggaacattatacttacctagaaagtgagatctaaaaaaaaaaaaaaaaaaaa

SEQ ID NO: 24658 - DNA, 3481 bp, Homo Sapiens
catggaagggtacatcaacaacactctctccatcttcaaagtcgcagacttcaaaaacaaaagcaagggaaacccgtactctgacctgggtaaccataccacatgcaggtatcgtgatttccgatacccacctggacacccccaggagtataaacacaacatctactattggcatgtgattgcagccaagctggcttttatcattgtcatggagcacgtcatctactctgtgaaatttttcatttcatatgcaattcccgatgtatcaaaacgcacaaagagcaagatccagagagaaaaatacctaacccaaaagcttcttcatgagaatcacctcaaagatatgacgaaaaatatgggggtgatagctgagcggatgatagaagcagtagataacaatttacggccaaaatcagaataagagctttatgttctgagaagcactttaaggaatttagctttgtcaaaatatattaggaatcactaatgagaatgtgtaagttaaatcactttggcaaatatgagtctcaactattgccatttcctcatgtattatttttcagtttcagctagcgatgcagaaactggaaaatgtaaaacttagatcatgaagggcataaaacttatcacccggaaaacctcaatgttacctttttctgataaattggaattttacagaaaaagtccctcagtgtgcttaaaaaccaccccttctaaagtagaatggattcttttttttctgtttgattattttcatttctgtctattctcaggcgcatgatctcctttatttttaagccatgtttcatttcttcacttggctagatctgttccagggtcatcttttccttacagtaccatcattatagatttaatttaatagctttcatgtgattaaaaatagctaactagactcaaggattcacaatatttaggtgtattttcaatacctccagaaaggaaacctcagttaatcagaggaaatagtttcagtcttcatttgagcatgtctttccatctcaaaaaaatactcttagtaggttggagtgaagatagcaaggttttgaagcatatttgtcctaatccacagtgacactttttatcttccaggagcactcctaggaggttccgtgcctaatcaatgttgactgctttgcagatctcaagggaataaaatgacaaaagcagggaaagttacagattcaaacagcattttaactcatgttgatctggataattaatcttttctaaagatgtgtagtttcttggaaaacagtgatatcacatgattaaaattacatttttatcaacataattgtctggaaaagataagcccctcaattttctaccagttgacttttattcattagatacagaaggtgcagtattacacatcaccagctgcctttgtgaatggctcactacacagccattggggtacaactgtgtgcatgggcagaaacagcaagtgccctcattgtggtcattgggtggggagtgccttttgtcaaggagtctgcaggaattggcttatttctgtatgccaaagtgatcaacacaccaaagtctctgccataaagaatgtggcttccttgcatcctccatcctgttactctgggcccagtaatttgatgtaactgtctgattgtactagagacaggagtatacccagcttattcataatcaagtaaagagactcagattagatttgattttttagcctcctctagagccaatcaggcagttaagagtaataaaggaaaagggtttggtcacaaaccctaccattatctggagattacttcctgctgcactcctgtcttgccatgcacgtcttgccccctcacttttgctcagcctagcagtctacttcactttattgccttgtaagtgtcaggcctcctgggcgctctggaaaagacagggagccaggccctctcacccctactggtaacaggtcattgctgggtgcacaagagggaggtgatttgcatcatggtcatgctgcatgggcttcactgggatgctgttaaacaccagaggagccaacctatcagaatcccagcagcaaaggaaaactcagattttagaggctttttacaataaagtagcgtaactctaggtcatgattgatttcaaatgcctgccatgaatgatttgtaagtaattatgtaggatccatcaaagcagtattgtaggcttttgaattgtcccagtggatccgggaccccatttcactgtctctcttgatcgtgttaatgatgcaatcagagttcaagacaggccccatgaagtctgactgcactgggatggagaaatgaatttcttcccactgaaggaaactctttctcattcgcagccaagacgggagtgccactgttcctctcttcactcctgagatactgcttctggaagcgggtgtcacttcctctctagtacctcttctcttctctgaagtgtgtgactatctcctagtgtttaaatttggcagttactcgccatgtatgtcagcatagaaaaggaaatgtttttaccttatctcctgtatgtatgatagaacttaaaagaaatgtgcatttgttttcatagccccagcagagaaaatccttttcatagattaaatgtgctgctgtggacaggagggaaaaaaaaaccctctacatattgaaaggcaccaaatgtaatatctgacactgttaagatgcccaaaagagcaaagttgtagtggagatgcagggtcatttccccatgccatccacagtgtttgttagtgagtccacggctgacttgcagtgataaagaaaagcatggagctgtgtctgcagacaatggtggctgcatctgtaagtggcttcagaggcagcagccctggggaaattgatgggtgtggcagtggacctgtgaagagggagaatctagccttcagcctgtccagtgttaaccactagagaaactgagctttatatccttttttaatgcctgtgaattttagcatattgaaacattagagcaaatactcaggggatttttcattaaacatccctcagataatttagctatatatcattagaaagggaaagctatcatttttattttaaaactaaacaaggccatcttataaactgtcaccaaagtcttcccttttttattgcatgtgtgccttgaatttcataaaacattaattcacaatgggggtcagaatgtactcttgttgaaacacttcttgtaccattttatgttcatattatgtttgagagggtaaaaatgtatgagcagcttaactgaagtagaactattcatgatgcttttcacacattgtggcataagatgtaaagtttgtaattaatgttaatttctgtgcattttaatattcttttataattattaatgttaatttctgtgcattttaatattcttttataattatgagcattttaataaattcatttttacaaacaaaaaaaaaaaaaaaaaaaaaaaa

SEQ ID NO: 24659 - DNA, 2818 bp, Homo Sapiens
ccattttgtgaagagacgaagactgagcggttgtggccgcgttgccgacctccagcagcagtcggcttctctacgcagaacccgggagtaggagactcagaatcgaatctcttctccctccccttcttgtgttcggctttgtgagaaaccttaccatcaaacacgatggccagcaacgttaccaacaagacagatcctcgctccatgaactcccgtgtattcattgggaatctcaacactcttgtggtcaagaaatctggtgtggaggcaatcttttcgaagtatggcaaaagtggcttcaattctaagagtggacagcggggatcttccaagtctggaaagttgaaaggagatgaccttcaggccattaagaaggagctgacccagataaaacaaaaagtggattctctcctggaaaacctggaaaaaattgaaaaggaacagagcaaacaagcagtagagatgaagaatgataagtcagaagaggagcagagcagcagctccgtgaagaaagatgagactaatgtgaagatggagtctgaggggggtgcagatgactcctgctgaggagggggacctactggatgatgatgataatgaagatcggggggatgaccagctggagttgatcaaggatgatgaaaaagaggctgaggaaggagaggatgacagagacagcgccaatggcgaggatgactcttaagcacatagtggggtttagaaatcttatcccattatttctttacctaggcgcttgtctaagatcaaatttttcaccagatcctctcccctagtatcttcagcacatgctcactgttctccccatccttgtccttcccatgttcattaattcatattgccccgcgcctagtcccattttcacttcctttgacgctcctagtagttttgttaagtcttaccctgtaatttttgcttttaattttgatacctctttatgacttaacaataaaaaggatgtatggtttttatcaactgtctccaaaataatctcttgttatgcagggagtacagttcttttcattcatacataagttcagtagttgcttccctaactgcaaaggcaatctcatttagttgagtagctcttgaaagcagctttgagttagaagtatgtgtgttacaccctcacattagtgtgctgtgtggggcagttcaacacaaatgtaacaatgtatttttgtgaatgagagttggcatgtcaaatgcatcctctagaaaaataattagtgttatagtcttaagatttgttttctaaagttgatactgtgggttatttttgtgaacagcctgatgtttgggaccttttttcctcaaaataaacaagtccttattaaaccaggaatttggagaaaaaaaaaaccctggttttttatttttgtattttattattgtttacttcaaactttgttttacagcgtcctccacaaaacctctagaatgcactagatatatttttcttggagtcataatcatgatgcataccaacacaacactactcaaattatatttcattgagatgcatgttgcattgaggagtcaacttgacatagagtggagactttttcaaaatggcttttacatcctaatgaaagtttgggaagtatatcctctctgccttttcatcagtgctttgtggtccagttggcaccctttctgaggtttgtgttttgtgctaaatggttttgtccttaaataggagaggctcaaaaacatcaagatttcaggaaaatggcgacagctgcataatggaacccccctgcttctattttgttcttttaattactatttatagccccagttaccttctgaattctgaagtgtatatacctccatgttcctgaaaacaagaaaactcttacttcctgatattccatagactgccttcccaggtgattgagaacatagagaatgttacacatttattttactctaaatgatcttttacccctgttagctaatctttgtgttttcctcaactttattaattacagtgattgcatttttagcatccagttgtaagatgaatatattaaacagctaccagtgttggtgatacctcatccttgaaaggcttagttcatttgtgttttatacttcagtttttccagcatagcagaaaatgccgcttataatttttgtgcacacaaaccttggattcccctgtaaagttgctattgtttcatagcatgcggcactggccttttttcatcctactcattacaggcaaaactcatgtcttatttatgaggattttatagatcattttctgtaacaggtgacaaaagcagaaaagaatgaagaggctgaagtatgaactacccttggagcccatatacatgatataggcaatttcttttgtatgttaattcagtcaaaaatactacccacttgatgttttctaatctgatgtgagctcatgttacacagacttttagtaagtaacccgtgactagaaaataaactggatgcttaggagagagtgtcagatgtataagatgctaataaaacctgtttaatattattgttagctgtaagtttttgggaaatactgaacaaattagtccacaatcaagtgtctacttttcccttcactgtagggcctctccctgcacagagcagtctgtttagctgtgaacaccacaatctgcagatgttcaagtcccttacataaaatggcatagtatttatatgtaacctatgcatattctcctgtatattttaaatcatctctacattaaaatacctgataaaatgtaaatggtatctaaaaaaaaaaaaaaaaaaaaaaaaaaaaaaa

SEQ ID NO: 24660 - DNA, 6527 bp, Homo Sapiens
ggacaaaaaagctcaaggcaggaacagcagcccagggacctgagaccagcgttctcaaatgaaggtgccagatctgctgttagaggagaattcttctgtcctagctgtgtctctgtgatctgtggatgagggtgggaaagcaccactcagtcaattggggtgtacaaaatggagtttgagaaggtctcacatccaggttgttttgaagcaaagtccaagcattgtatcacttcatctgcaaatatttcaataagtacccaaaaggtaaggatgcttaaaatatcctcataatatcattattatgcctaataggtttttttttttttatcaattatctagtcagtgtttacgtttccacaattgttttaaattttgtcattatttattttatagcttgttagaaacaggcttttaataagagctatagattataattgtttgatatgtttcttaaatctcatggaattgtaaattcttcctctatcaattttttcttttaaaaaatataattatttttatttttaaaatagatttagggaatataacttttttcttgcattttttttttgttgctgaaactgcatcatttgtgttctgtgttgtgtcttatataatgtgccacaatctggaatttgctgcctggatccccatggcatcgtataagacattcatctgtcccttgtatttcttgtaaattggtagttagatccagaggcttaagtttattcaggtttgattttttttttttgcaagaagctgttatgcactttcatcactcaaagtttggcagcaattgaagttcatcatctactccagactctctagagcagcattcgctaatacaagtttctatggtgatggaagtattctatatctgttctatctaatatggtagccactagccacacatggctactaagcacttgaattgtggctagtgtggctgagaaattggctttttatttaaaaacttttaattacttttaatttaaatagtcacatgtggctaatgattaccatagcagataatatagctcttgactcattaattcattaatggctaaaaaataataatcttattttataattttttcttcattaattaaaatatttttataaagagaaacttcctcttatcaactgaattgttgccatgagattcagttcatacaatacaggcagaaaagtagtttaattttcccccatatttatcagttatcaaataatgagttgattccctagtattctccaaaggtgacccaaggagatttttttttgttatgaagtcatattttgtattttaattcattgtaattattcttattgatgctcaaattgatctaaccttggccagagagaacctatttcttttgagtgctcttcatatgatcctgtgaatatcagtgtcctgacttcatctacattgttccagggtcatcttatacatggcctgtctcatgtctaaaattagccatttgtccaagaagccctgattccagttagtagtctatttcaagaacatatctggacacttggggtgatcattgctattgggttggtaattcttctagcttgataaaagcacaactagaaatagatttttttaaaagataaactagatcataaatttatcttgatacattcaagttaaagtcaggcaatggaattgtctttgattttaactttttttttgtttttatggtgaaaacctggagttttaataacattaatttagttacccatttcctttatgccacaatatatacacagtaatttcagaataaacaataccaacaataccagcaacaaaattattattgagaaagtataagattttttttttgattttgcataatttttgtccttagggtccttctcatggatgacattttattgtattttaggtttatatgaagtagttcatccttgtgtggttttgccacaaactggatacacttttatatttctttcattttatttttagataaatgagatatctttttaagaaatgtagtttaattttatgattatgtaagatatttataaatgtggtttgagagtaaaatctataaaacaaagtattcaaagatgtttagattctctatctccttaactcaatttcctcactccaaggatttatttaaaaacatttacgatttaatccttcatttattgttattagcaaagatgtgtatgtatttttatccttcttatattaaccatagtatactatataaaatttctcccctactctttgtaaaaactaaatgtatcctggagatcactgaacaataatatgtagagattggtctcatttctttttacagctgcatgtgttctatatttcattcaataattgcctccccccagcaacccttttttttaaagacagagtcttgctctgtcacccaggctggagtgcagtggtgtgatcatagctcactgcaaccttgaactcgtgggctcaggtgatctacctgtttccaagttgcttgactacaggtgctcaccactgtgcctggcatttttgcattgtttgtagagacagggtcctgctatgttgcctaggctggtcttgcactcttggccttgagtgatcctcgcaccttggcctcccaaagtgctgggattataggtgtgagctaccactcgtggctaataatccccttattaatgagcagttacgttgtggaaagtttttttttccaaatgatagctgcagtagcagtagcagcagcagcagcagcatcaaatatgttacctttctccataatctttgcttattcactaggtttatgtaggtattcataaaaatttaaaacataaatacgttatattaatgacccaagacaagtgttggtaaaaaactaaggtacattaatgcaaagttataggtcttggtatcctccaactcaaataaaatattttaattttcattaattatcccattaggggactgattagtatttttctgattttcagacttcctaggatagagcttggaaaggttggaaaagtaaggatgattgaacttgaaaggtgtgaatgaaagaagaattatcttttgggatggagaatagtagctgttttcaaagaagattttattttatctttcatttttggcctataagttttgcagagaatctgtgattagagtatttagtaaagtactatgtaattattgttctgttatttggacacatgtttaaactagaattttgaagacagcaattagcaataattatgtatgttctagccactttattcattttacctcttttaccatatactttaaagatatctatatggtaaaaggtaagtggcaactgaataatcacaaatacatcaacaagtaaagagatgctttgttttattgagtgcattcttatattttctcttttgctggaataataagtggggttttaaactgatctgttctaacattgtttttcctcattttctctctctttagagggtttcagcaggttttcatacattctcagttagaagctgttataatttttaaaataatactctagttctagttattctatcacgagctgattctatttatacaacaaataaatactaattaaaactactctataaccttgaactgtacattagggaagttatacctatggtggatgactgaaaagagagtccaggataaactgatacatctaattgcacatagtagccttcgaatcaagactctcaaatagtaaaatgcactaagccaatatggatgggaatagcctcctgctgttttcccaactatttgaatttttaatatcttctcttatagctatatacttttggttcatttatgctagcggtgttatcagtgaatgtatttttagattctgtattccatattttagattctgtattccatatttaatgaaattttatttataggaaagaaagaatgggtatgcataaggacctaatcaaagaggcctctgacacctgttgagcagttgtgtgagtgtgtgattatccatggaaaagaagatcagagggaaacggtgtttaaagcctttgattagttagcagagagaatgaagcaagccaagtgctttgcacaaagtgacagaaatgaaggtagaagaaacagttacaaatggtggtggtactagaagtaagcttcccataacttctactccgaacttcaagaaggctgtggttttgtggatattcttcctttggcagtctactaaattagaagaactggaatattaatagtattgaattctagctcttcaaaaatatcaccaacacaatctgttgtttataaaagctgagtttattcttaccatcgtaaggaaaagaactgccttgacagagtcttactagtcttggaatgaggatggcaaagttgggattcttaggaggtttggggtctagtatgaggtgagttttcattgtggaggcttgcttgatcaaggttgagtaaggtgggtgtaaacagcaaggctagggcattgaggtgaggaaattcagagtcttgggaggtaaactataatttcatactatgtatggaagagttgaacaatgcgatattaatttaatggggttcttggaaagttcctgggaagattagtaatttgcaacttttatcttactgggctatagtttcttggaatggtaaggtaatgataaaacaaatactatatgtgattattagccaaattaatcaagtttatgatttcgttggttgcttctcagatttttttttaaagattccagagaaatctactgggatgtgagcacaacattcttaacctaaaacagcatatgttcaccctttgtagcttgacattctgtctagagcaatgatccccaacctttttggcaccaggcactggtttcgtggaaggcagtttttccatggacagcggtagtgagggatgatttcgggatgaatttgttccacctcggatcatcagtcattagattctcataaggtgtgtgcaacctagatccctcacatgcacagtttcacgatagggtttgtgcttctatgataatctaatgctgctggaggaggaggtagagctcaggcagtaatacccccttgcctgctgttcacctcctgctgtgtggcctggttcctaacaggccacggaccagtgctggtccacggcctggggactggggatcctggtctacagtgtctctgttctgaacaaaactgcctgtctgatttcatgaatctctcatgtaaggaattctatagacttggtgtcattgtttaactatctcccttgaactatggcctgtaggattctgcctgctttctagtccttttgtaaagcatcaagagaagaggtttgaggagacaaggaattaatacagaaatctccctgaatagttaggttcagtttttcttcttcttaaattaagttttctaatgatctcttttttcttgaggggaaactcatggggcaaaatggactctaggtgatgtcagagatcatgctaaaggtaggaatccatttaccaagataacaatccttgtttaatttttagtaggagcctattgatttttgttcaataaatccaataccagtgactggggactacccagtgatttgattttggtccgtatgtggttatcaaatactcccatgtggttatcaatagtgttttaaagtttggtgctcctcatcaagaatgatgtttcaccaggcaatgacatttgtattgttgaaattatttggtagatataaagcaaaagtgaagtatgtttatttatatgatatgtgaaaatgatacagcctccaaatacataccatctgttttctagttctcttttaatttctatttctgtgaacatttggatataaaagtttttaccctcaaaaggttctagaatattcttttggtggagacaggaatcttcttttctaggtatgatgtgatgctgtgggtaagattaccatctggttgacctgttgtgcattttctagcttaaaaaaaaataacctaagggttgaatccagttacccaagaaactaactgattcactacagggaactggtaccaagggaagctagatgactctcaagtgaaaatgtgcaaactccacgttgattttccagctaatgagtaagttgtagtcacatattggacttataccataaaatgactaagcatgtgaaaagcaacattaagaatagcagccccaaagataatatagaagtaacatagtaggctgggcgcggtgactcacgcctgtaatcccggcactttgggaggttgaggcaggtggatcacgaggtcaggagatggagaccatcctgactaacacggtgaaaccccgtctctactaaaaatacaaaaaattggccgggtgtggtggtgggcgcctgtggtcccagcaactcgggaggctgaggcaggagaatggcatgaacctgggaggcggagcttgcagtgagctgagattgcgccactgcactccagcctgggtgacagagcaggacttcatcacaaaaacaataaaaaaaaaaaaaaaaaaa

SEQ ID NO: 24661 - DNA, 3956 bp, Homo Sapiens
agaacatgaataatttctgccttgctaaaatgtgactgaaatggttttgacttggcatctgaaagtatacaatgtgttcaacaagtcatgcatcagatttgtgggaggtattgtactgaaacctaaatttcagtcaacatttgaaaagaagagctgggcattccttcctggtgatctttacctatagtttatctatctgtttttcttctgtttctttaagattagtttgacttttattattatttttttaattaacttctgtgaagttgtttactctgaaaattgtactggaatattttaagccaagctgatctttcaccaggtgtactgtatgtaagggcttttcctgctagcaagatgcttaaacaggatcatgttattggtcgtctgagctatttagttgttttacaaaaccacagcattgtatcagataagattttgataaaaagttttgtgcacatttccaggggcgggagggttgacatttccctgaaatttcttgattagaatgagtaaatactggtgtttgatacctgtcttaatgaacatgctcataaggtgactgataagttgtaaatatacctgagaaacaaaggggtagttttgatattctggtgtcagtatggaagatcttacacatttatttaatactcaaatgtatgaagatgtttgtttgtagcataacaacagcacagtagccttgacttagtttcctttggttagtactgtaccttttttgccatggccagtgctccccatccctatgaagacattttatttatttcactctgtaacctgaaatgaataggaacaagggttttaaaccatgttacattaacttatttctgacattataaattagcctagaatattacaggaacatgattgttatataatttatatcagaacctttctataaatatgtgcttattacatttgaaatgcttccaatgtactttatttgctgtttgtaattccaaaaaggatatgcaaaccagtctgtctatttcatggatatttaatagtgagatcttccatgttgaaggtaatgtatttttttttaagattttaaaattgctattttgttacaaaatagagacctattaacagtttgagagctccttatgtgccctcagggaaagaaccctctgtgcaacagaactacacaaaacatcttcagcacgttctgagggtgaatatatactacataaattgatcttgtgtatttaaccttatctttttaattttaaaattgaaattttgaaacttggttgtgctctgctggagggggttgggataaactgcttagatgtttgcctacttgtccagtgaaattacatttgcatcagtatatgtatatacctgccaaccttattggtatgtctcagaacatttatattaaaataatgcttgtcttgcagcaggtgatcccataaaacaataactccctgttcttaaaaacttactctctttttcactaacaacataggaattgtttctgtgttgagattattctgtgttgcatccattctctatgtagtggtcaccttctgtctgtcatggtgggcttaatgtgaagtaaagccattggttctctgccactttcgaagaaagggcagttcatctgatccttcttcagaatggtacctactgatatcatcgaggaaaatgttacaaatcagacttaggatatgactttttaaaattgaggcatttcccgtcatttggcctttttaccaacaagatgtgatgtacaaatttggaatcaaaggatacaaagcaacaagagaggaaatgtgtaatgtgggtaaccaaactgcatatgttacctattgtctaatcagaaaaaatagtctgaggtctggaaagcaggaaagtggtggttattttctttcattttttgtgtttttgttttttaatttctaagttccattctgaaatccatgtgccgcattcagttactgtggttgtagcatcagtttttttgtggtttcatttcattttatgaattcagaggaagttacatatatattttttctagttggtacctgaacaaagcagattcccttgcctttgctgccacgtcttattttcaatgccatgtgataaaccagtgtcatacatgaaagttgtgcattgtaattttcaaaaaaaagggagttcattaggccagtggcactgatttttccttcccatcatagctatttattctagtaagaggataataaaagaaatttcctatacaagaactgaaattttccatttgtatggatctagtcactttcagatttcaatttgaggttaagtatataaagcacatcccaattttatatgctgccttgagaaaattacaggatgcacggcaatttgtaggaatttcaaatgggatcatttaaacatttgaaaaattattttaaaaaccatctagtttgcttttggattttagacattaaagcctatgttgtcttgttaacaggggtggaatgtataaccatcagattcagcatgtgatttcacctttgaatctgagtatttcttccctatcttctttgagtcatttttggagcagactgtcaccagtattgataactaagcattaaagggaaaagttgcattgcaactatgcattggtttcctggaagaacttttcttttgttttagtgaatgaagaggcttgatgggatcacttactgtaactccttctacataaggaccccttctgcaagcagaacacaaaagaacatgctcaaggagtatcccattttctggataaattgaagaagtttgctagtaatgtctttatactagcgtcttccttgtatccctttgctggcaagggaatacaaggcgtcaagaccacagatcaaaacaccccacatttgagtggagtcctatttttactccaagagcagttattcccttctagtctaaaattggcagttttttcttttttttaataaaatttttaaaatattcccaaaccagtggaacacagacactggctgcacttagtactgccaaaagccaaggtcatttgcacatattccatcaacctgtcgagaattaggcctcactttataacccaaggcatggaagtgcatgcattctcttagctgggcaaacaattatactgtagttgtgatacaacacatgtggcttttatttgtactgcacatatccactgtacagccacttgggagtatcgtggttagcttgcagcaactgctgtctgcatttatactgtttattgcatattcttttccctggaagtgaaagagaaatgtttttcttgttgcattgattacattttataaatttgcttagctggaaagtttgggaaaagaggcctgtttgtcaattgtacaaccgattgtgaagctctagtgtgaatatttttacgtctgtattagacattttctttgcaaatctattgttcgattgaaatgtaaatgaaattaaagatggtgtacacccatcatgtaaaaagcaggcaccatctctaagatggatttaatgctcatttttaaggcatatactcagcttctatttaaaactataatttaaaataattctgtacaatgaaatggggaatatatatgggaataaattctattccatttatttcaatttgaatttccaaattgtaatgtttccctttgtgctataggaataggattaaatgggggaagactaggatttataaggcctgtatatggggggagggcagagatggaacaatgagggttgtgatgatagtgaatagcaaagagtgaattctgtgtgtttttgctgtagcactgaagtgaagagatattagctttggctgttcacaaaatagagcatcatgattttcagtgtttgagagaaaattgatggaaaaagtttgcagtacttgacatgtatttgcatgcacaaaataaaattatttgtccacctcaaaaaaaaaaaaaaaaaaa

SEQ ID NO: 24662 - DNA, 3188 bp, Homo Sapiens
aatgtgtagtcttctctctctcaccccctttcacccttccccccaagtcaccagagtccattgtattagtcttattttcatcaccgtgggcgtaccctgtgggatgatgttaaacgtactctagactctgttggctatttctctagagttagacctctggagacttctcagatagctcatgggtctctggccttgccctgaaattactgggttctcagggagatgctggagatggcggaggctcctcactctttgggtcctcctgtggctcattttgattgagttcctcattcagctggtcgcagtggccggatagtgtggcctgctcccttcctcaggttttcttgaggcagtggtcttttttgtagaggcttttttttttttttttttttccctggaactcccttggaggtctcccttccctttcaaggttgtcttgggaaccttgatagtgcttctggacctaggttgagacagggcctttctcttcattacttcttgggtattggtgggtgggtggttgacagctaggctggaggctcatggtttcctggttattttcaccagcatctctcaacagtctcagctcgctcattcttaagatgtcagcttaaatgttatctcttcagaggcccccatgttctctcttgcaatggcctgttctattccattaggggactttgccatatatggcatatttgtgtaaaagttccatgagagcagaggttttgtttcctttatccctccatacacagcaactggaacaatacaatgcatagagtaaacatgcaacagataacctgaaggaatgctgtttcatgccttcattccttcctatacattattgctcccctaatgttctctgtgtttggactgccataacctcatctaccttttctccttactaccttctcattcttcaaaattcagctcatccccaaattcctctgagaagtccttcaggttgttcctctccatctaatctgaataagatgtcctttcttggagctctaatagcgtttagactagacactggtcctcagagtgaggtttctgcatggacagcatcaccgtcatctgggaattcattagaaatgcaaattatgaggccctaccctagacctcctgaaacagaaactctgggagtggggccaacaacctgcgttttaacaagccctgcaggtgactgtgacgaacacaaagtttgaggaccactagaatatagtcactgtagaatatatctccaggatctgacacaacgcctagagcaggattattgtgaagatcgacctgaaatctatcttcctgtagcctcatcaatcctggttgagaatatgaaaaactagttgagttgcatctctgttaggcagctttacaacatttgaggatagcgattatctctacttctccacctctcatccctagctcctctggtttaatgtcttttttttcttatgtgctataactttgaatcccttcactttcttccttggacttacctggacaattccaacttacttcatatccatcttaagtgtatattcaaaatatccttttagcttttaacctacaattctgaaaggtggaactatacatgtctgtaatcaccccagcaagacagagttcacaatgaacatagttagaattccatttgtacagttggaggtgttcctaggtgggcggattgcttgaggtcaggagttcaagaccagtctggccaacatgacgaaaccccgtctctactaaaaatacaaaattcagccaggtatggtggcatacgcctgtaatcctagctacttgggaggctgaggcatgagaatcaattgaacccggtagaggcggaggttgcagtgagccgagatcgcgccactgcactccagcctaggtgacagagggagactctgcctcaaaaacaaaccatccctgtcgctcccatcctagaccaatctaattgcaagtatctcacagggagcccaagtatcaatgtttttttgaacagctttatggaggtataatctatataccataaaatccacttattttaatatatgattttagtaaatttaaagacttgtgcagcccttaccacatcatacaaaccagaatgtttccatcacccaaaaagaaacttcatgtctatttagtcactccctgtttctactcccagctctaggtggccattaatctgagtatctctagatttgtcttttctagacctaaacatcaggtttttgtttttctgcagccagagttgagaaccataattctaaatgcattatgagaaataatggtttttaaagattatatataatattttacgtattttcatatttatgactcccatccttacagtgaatgcgtctatcaccagtaagacaaagatcattaatttgataatggaacttaacagaccattctttccttttatacattttagtatcatattcaaaatggcctcccattctgtccccaagttattttaaaacatctccagtcttgcttttttcccctttagctcataaatgaatagtgctggaagatatctcaggagcattctccctgagatgatgtcttcagtaatgatcgcacgtattggtgttgattccatccttgaagttactttcctttatctttcacagtggtgtttcttcactagaggttttgctgtctgattaacttctctgccaaataaatggacttttgcttcataggtacacaaacatttctaaaactttttttggaaaatatatttctttcttaaaaaaacaaatagtgcatgcacatttttaaaaaaataaataaaaaataatctaccccaaaatgaccagttaagatttactttcagacaactctgtgcatatttacatatgcttatatacaactatgcacacctttgcatagatgagatcacactctatgtactgctttgtaacttgcttctttcacttaatcctgagaacatttgtacatgaccatagatatagatttgtattgtttttaatggctgtatagttttgcattatactgaatcttgatgtttaagagctatgtatattgaggacattatttctttgtcttgtgttgcaaattttttaccatgttattattagtcttttaaccttatttatagtttttttgttataaaagttaagttttatgatgtaaactcaaaaaaaaaaaaaaaaaaa

SEQ ID NO: 24663 - DNA, 2890 bp, Homo Sapiens
cgtcgagctgtctgtcgctactacaataatgacctgctccgaaaccggtgagacctggtttgatggcttgtgggaagggtgctggaaatactctcagagtcccaggcaggataccagcagggaggggaggtttcatttaagtctacctgctaggtgacaggtgtcattatatattcagtgctgagcccaccagtccttcaagctaaacactgccccctccttttatagatgaggaaagtgacagttaaagcaagtagcccaaggtcacacagctaataacttgcagagctgggccttgaccacagagtctatgcaggaacttggggagaaacagaggagcagccatgctgcgagagggacttggggtgaagggctggggagaaagccctgtctaggacacaggaggcctgggtttcaggcccagctctgtctccctcatcatgggacttatcttgtctggggctcagtcttcccatctgtacaaaggggaactcaaaggaacctgaaggcacagaggcggctggcctgggatggatgtggagaggacttgctagcagggctggggacagggagctggtcactttcagctctgaggaggtgaggagggcacagtttctgtgggctgggactgtccacagggggcttcctagaaaaggaaaagtcaaacaagggctttgatagttaaacaggggagagggaatccgtttgttcttgtggcaggtggcgcaatataaaattgcacttgtcaggccccctgagcccttgggctcggagagaggcagggccaggccaggccacagagcagagtccaggacagggcgatgaagatggccaggcctctgctcccacccagggctcctctgcagagcctctccccctcctccagggaagagccacagcagaggtcaatgtctccctgaggcctcagtatctctgatttcacaatgagtgatgactgctgacgtccatgccctggcctggcagctcttgagttcaagggtccccattctttccccaggttcatcggcctccagttcttcttcaaaacaggttctgtgatctgcttcgccttagttttggctgtcctgaggcagcaggacaaagaggcaaggaccaaagagagcagatccagccctgccgtagagcagcaattgctagtgtcggggccagggaagaagccagaggattcccgagtgtgagctgtcttggggccccacctggccaagagtagcagccacagcagtacctcctctgagtcctttgcccaagattgggtgtcaagagccctgtgttccattctggctcctccactaaattgctgtgtgacttcaggcaagacattgatcctctctcagcctttgcttgctagtctgaaccaaagagttgtttgggcatttgctgtgttggccatttctggagcaagagggtcttcttcctccttcccccagccagccagctgtcctggggccaggctttcctgggtggaaagaagtatacctttccctggggccctaggatagcaaagtgagccatagtgggccaggctgccctccatgctgggccccagcccaggtctgcactcgcctggatcaccttctttgagccttagccatctcctgtcaggtaggaatgaacttgccagccttcaggctcgttcagctatgaccatctgtgcggtcagggtacactcagctctcctccccaactccagcagcctttaagaagtgtccctttggcgccccctggaggcagagcactgagctggaccctgggtagactcccacagggaggacggagctggcctcaggagtgggacacccagacttggcagggccttcaagaggcctgtgtgggggccccaggaatccttagctgaagcggggagactcactctccatctcaggaaattctagcccttgccctcagggagccacggttgagggtgaggcccaacacctgccttagggccctgggtgggcaagtctgggccctggggtagggagggagactcaggcccacacttgggtattttctaatttcagacaaacacacactcagcgcgcactcactgattcctacacattgccaagatttcacacatgtgaccaggggccaccaaagtccctgtgacctttgtgactaggatcctaatttctctattttctcctgggtgcctgggtctgtgtcacctggggcagtgtggataatgtttagttctgtgacactgttttttgggggtggcacctggttctccgatgcctgggctggtgtcaggcccaggactgtagtgctgggagcagtaaagctcagctctgtgtaatgagtgatgctatggcttgctcgtatcttatgatccaatccttttctacatcagcccttgttttgttttatggctagtcttatctggcctggttatttccttgcggggaggagagggtttgctaatctgctcccagcccaacctattaccaccccacctcgctgggacctactgctcgggaggcagcagacagggagccaccagcagtggcttcctggccctgtgctgggggtggggggaagctgggggcacatgtggcccttgccttctgagcagctcccagtgccagggctttgagactttcccacatgataaaagaaaagggaggtacagaagttccaattccctttttattttgctggttggtatctgtaaatgtttaataaatatctgagcatgtatctatcaacgccaagaatttcaaagtctccttcaacaatatgaggcttttaggatgtttatattccttcatccctcttgtttcccaggttttgcagggaaaaaaagtctggaattatagatacagcttattattaaatttgttcttgcataaaaaaaaaaaaaaaaaaa

SEQ ID NO: 24664 - DNA, 2742 bp, Homo Sapiens
ataaatgtggggagtgctgtgagagaaaaagtgtactgggtttagttcccactgcccaaaaaaggaactggctaatggtaacctgggggaggaagtcgggtaagttgcatggagaaggcaacccttgaacacttgcaaggagctaacaatacctgcttctggagtatttaaacgccagtgggtatgctaaatacttttacctcacttagaccacctactaaccttacaaagtagtccactttgctcacccagttttacagattgatgaaactgaagcagacagatattgttaacctatcaaaggtcaccctgcaagtgtgtgattatagtccaagcagcttgtacttgttgcctatttgttttgcctttcctgtgcatttgccaggcagatgagagtggggtaagacattgcagagaaaaagtaagaaaaggccgtcatgaaacaatttcattttcagaccttataagcacgttacaagtactgatatttatgcttaagttcacgggagtcctggccagaaataaagctggaaggacaagtggggggcagattgtgaaggatccttcaagacctgcttcctctagagaatgggagactacccaagataactaaacagggaagtgatcaggttttgtgtcttagaaaagtgttgcagtgttgatgcaaatgtgactagaagggtgacttggaacctggattgaaggggtgggagatgggagaaaggaatgcagtctggcagcagctacagcagtccaggtgggaaaacccagagcctgaactaaggttgtaactagaggggatagggtggaagagctggattagagatgttgacaagataaagtcagtaggacttaaagactgacaagtaaggattttccaaaagtgagagctgtggaatgaattgtcttaaaatgttgcagtgagttcctcctcatcaatccaagtgctcgatcagaggctagacctttagttagcagtcacgggaaaattccccattctcacggggatttagactaggtcttaaccatactttaccaagattccagtagcaaagcacccaaaagtaatcgcaataaaattccaatttttgtaggccgggcatagtggctcacacctgtaatcccagcactttgggaggccgaggcaggcggaccacgacatcaagagttcaagagcagcctggccagcatggtgaaaccccgtctctactaaaaatacaaaaaaattagctgggcatggtggcgcatgcctataatcctagctactcaggcagctgaagcaggagaattgcttgaacccgggaggcggaggttgcagtgagccaagatcatgccactacactccagcctgggcgacagagcgacactctgcctcaaaaaaaaaaaaaaaaaaaaaaaacaagttttgtgaatttaagtttccctaatggatggtacaggtcaacatttgccatctaatgacacttacattccagttttttccttttttgagtaactgggaaaagggtggcattactgctggcttcctaaaattgaaaagtatactagggtttttaaacctgtgtagaatacatgatatggtagcaaatgtgctgtaggaagaaaagcaatgaggaactactggcctgactaggaggcctagaagtccctcccaggcttgagttgttctgacttggcatgattacatagctgcggcaagtgacgtttccttcaagccttggttccctcatctgtaaaatagggaactaatacctacctcacaggattgtagttagaattaaggatgacttcattaaagcacctctagtggtggaagatgtcccatcctatcccccacccatagctgggagctatgtttggctcattcttcctgactcactggattacactgtgactcagttcaatttcacacatgctgctgctaaattagggtcttggtgagcctttgggaggacagctctgaggaatgaattgtagcactgcagccctgcctgaggaacatgatagaaacaggtggtaggcccagctcttgccttccacctactaagcagtttttctgtggttagctgtgtgacataaactatcggtgtattaatttgctttcactagattcccccccccccccaacaacttagtccaagaacatacctgaattcttgcatttccttgccttagttgcttttgtagggtggacagcaggactgcatgagaatagctgtgcttctggaccctatggtgaaagctctagtgaactgcaattaggcccagggtcccggaggaagaaggggagagaaaaaggggggtagttttccaaaagataagtaggggacaaaaaagtccacggggcctatgagcggtgagactcctgccctgattgcggcaaagcacctggagatgatagaacttcctagggaaaaggctgcatggagtccccagggatgctgggccctggtcaccaaggctccctgggaaggtctcttgtacctggggcacacagaccaacacttctgaatttgcaagcttaagagcatgtatgagcagaacctgtgcagaccaaggcttagagggctcacctcaatgttttgcactgtgtgagaccccaggaccttttcgtgattctggagaggggaacaaaccataataacaacaaaccaggtagcaggatagagactcattctcatctattttggttaaaagaaaataaatgtatttcttccacaaagaaaaaaaaaaaaaaaaaaa

SEQ ID NO: 24665 - DNA, 4801 bp, Homo Sapiens
gaaataacatcagctttgaggagaagaaaaaggttctaattcagaggcaggggaacggcacctttgtacagactgacaaacctctctacaccccagggcagcaagtgtatttccgcattgtcaccatggatagcaacttcgttccagtgaatgacaagtactccatggtggaactacaggatccaaatagcaacaggattgcacagtggctggaagtggtacctgagcaaggcattgtagacctgtccttccaactggcaccagaggcaatgctgggcacctacactgtggcagtggctgagggcaagacctttggtactttcagtgtggaggaatatgtgctgccgaagtttaaggtggaagtggtggaacccaaggagttatcaacggtgcaggaatctttcttagtaaaaatttgttgtaggtacacctatggaaagcccatgctaggggcagtgcaggtatctgtgtgtcagaaggcaaatacttactggtatcgagaggtggaacgggaacagcttcctgacaaatgcaggaacctctctggacagactgacaaaacaggatgtttctcagcacctgtggacatggccacctttgacctcattggatatgcgtacagccatcaaatcaatattgtggctactgttgtggaggaagggacaggtgtggaggccaatgccactcagaatatctacatttctccacaaatgggatcaatgacctttgaagacaccagcaatttttaccatccaaatttccccttcagtgggaagataagagttaggggccatgatgactccttcctcaagaaccatctagtgtttctggtgatttatggcacaaatggaaccttcaaccagaccctggttactgataacaatggcctagctccctttaccttggagacatccggttggaatgggacagacgtttctctggagggaaagtttcaaatggaagacttagtatataatccggaacaagtgccacgttactaccaaaatgcctacctgcacctgcgacccttctacagcacaacccgcagcttccttggcatccaccggctaaacggccccttgaaatgtggccagccccaggaagtgctggtggattattacatcgacccggccgatgcaagccctgaccaagagatcagcttctcctactatttaatagggaaaggaagtttggtgatggaggggcagaaacacctgaactctaagaagaaaggactgaaagcctccttctctctctcactgaccttcacttcgagactggcccctgatccttccctggtgatctatgccatttttcccagtggaggtgttgtagctgacaaaattcagttctcagtcgagatgtgctttgacaatcaggtttcccttggcttctccccctcccagcagcttccaggagcagaagtggagctgcagctgcaggcagctcccggatccctgtgtgcgctccgggcggtggatgagagtgtcttactgcttaggccagacagagagctgagcaaccgctctgtctatgggatgtttccattctggtatggtcactacccctatcaagtggctgagtatgatcagtgtccagtgtctggcccatgggactttcctcagcccctcattgacccaatgccccaagggcattcgagccagcgttccattatctggaggccctcgttctctgaaggcacggaccttttcagctttttccgggacgtgggcctgaaaatactgtccaatgccaaaatcaagaagccagtagattgcagtcacagatctccagaatacagcactgctatgggtgcaggcggtggtcatccagaggcttttgagtcatcaactcctttacatcaagcagaggattctcaggtccgccagtacttcccagagacctggctctgggatctgtttcctattggtaactcggggaaggaggcggtccacgtcacagttcctgacgccatcaccgagtggaaggcgatgagtttctgcacttcccagtcaagaggcttcgggctttcacccactgttggactaactgctttcaagccattctttgttgacctgactctcccttactcagtagtccgtggggaatcctttcgtcttactgccaccatcttcaattacctaaaggattgcatcagggttcagactgacctggctaaatcgcatgagtaccagctagaatcatgggcagattctcagacctccagttgtctctgtgctgatgaagcaaaaacccaccactggaacatcacagctgtcaaattgggtcacattaactttactattagtacaaagattctggacagcaatgaaccatgtgggggccagaaggggtttgttccccaaaagggccgaagtgacacgctcatcaagccagttctcgtcaaacctgagggagtcctggtggagaagacacacagctcattgctgtgcccaaaaggaaaggtggcatctgaatctgtctccctggagctcccagtggacattgttcctgactcgaccaaggcttatgttacggttctgggagacattatgggcacagccctgcagaacctggatggtctggtgcagatgcccagtggctgtggcgagcagaacatggtcttgtttgctcccatcatctatgtcttgcagtacctggagaaggcagggctgctgacggaggagatcaggtctcgggcagtgggtttcctggaaatagggtaccagaaggagctgatgtacaaacacagcaatggctcatacagtgcctttggggagcgagatggaaatggaaacacatggctgacagcgtttgtcacaaaatgctttggccaagctcagaaattcatcttcattgatcccaagaacatccaggatgctctcaagtggatggcaggaaaccagctccccagtggctgctatgccaacgtgggaaatctccttcacacagctatgaagggtggtgttgatgatgaggtctccttgactgcgtatgtcacagctgcattgctggagatgggaaaggatgtagatgacccaatggtgagtcagggtctatggtgtctcaagaattcggccacctccacgaccaacctctacacacaggccctgttggcttacattttctccctggctggggaaatggacatcagaaacattctccttaaacagttagatcaacaggctatcatctcaggagaatccatttactggagccagaaacctactccatcatcgaacgccagcccttggtctgagcctgcggctgtagatgtggaactcacagcatatgcattgttggcccagcttaccaagcccagcctgactcaaaaggagatagcgaaggccactagcatagtggcttggttggccaagcaacgcaatgcatatgggggcttctcttctactcaggatactgtagttgctctccaagctcttgccaaatatgccactaccgcctacgtgccatctgaggagatcaacctggttgtaaaatccactgagaatttccagcgcacattcaacatacagtcagttaacagattggtatttcagcaggataccctgcccaatgtccctggaatgtacacgttggaggcctcaggccagggctgtgtctatgtgcagacggtgttgagatacaatattctccctcccacaaatatgaagacctttagtcttagtgtggaaataggaaaagctagatgtgagcagccgacttcacctcgatccttgactctcactattcacaccagttatgtggggagccgtagctcttccaatatggctattgtggaagtgaagatgctatctgggttcagtcccatggagggcaccaatcagttacttctccggcaacccctggtgaagaaggttgaatttggaactgacacacttaacatttacttggatgagctcattaagaacactcagacttacaccttcaccatcagccaaagtgtgctggtcaccaacttgaaaccagcaaccatcaaggtctatgactactacctaccagatgaacaggcaacaattcagtattctgatccctgtgaatgaggataggagctggaaactcaattagtcctctgtgacattactggagggtggaacattcttctgtcgcttgaagcagaactcattcaatcaaataatttaatttctctgactagtatatgggtaacaaatgaatatgtctgaacctcagctataatactttctactacctttgcaaggagatgggataggaacaatcactcagaggaggcgttgcatggacagggtcatagggggaagaaaggtggtttagctgttttatttagccattcagggggctctccagagaggagacggtggtagagggtgaactagagaagataagaatgtcttcctaggccggatgcggtggctcacgcctgtaatcccagcactttgggattgcgaggtgggcggatcacttgaggtcaggagttcaagaccagcctggccaacatggtaaaacccgtctctactaacaatacaaaaattagcctggtgtggtggcacgggcctgtaatcgcagccccttggaaggccaaggcaggagaatcgcctcaacactggaggtggaggttgcagtgagctgagattgtgccactgcactccagcctgggcaatgaggcaagaccctgtctcaaaaaataataaataataataataataatgtttttctagagtttcagtctaagggaaaatgtgatttagggctttggaaattggctaaaaaaataaaaatggaaaagaaaaaaaaaaaaaaaaaa

SEQ ID NO: 24666 - DNA, 5229 bp, Homo Sapiens
gggtcccaagcattcggtagttcctagtaaaagccagatgaccacctcgtcggagtctctgcaaagctttgcctttggctccctctccataagcagcaaggagacagaagagaaggaggagggggcagctggctatcttgatattaaggagatgccaagaggcccaactgggggatgtataggagtggaggaacaggccagtgccttaaagttctcagtaacaccagcttcctgtcagctgcaacctggtgtaaaaaaggcagagagtagtgaagaacatgttacaccaggagagccacctggaaaacaaaatggatcatttcttgactttcatgtgggtaaccagttccccaccctcattcgaagtttccaggtagtaatttattcaatgatgcaggtctaatgactgtctttggaagagggccagaatctgtcctgtggaggaggtggtggtggtatggtgagggtggtggcctccctgctgttttcaaaatcacagactaaaagcctttgattgtgccaaagaaattcattcagagcaattaactgcatggctagaaatgctttcttctctgataacttaacaaaactccagctgtcagtctttatgaagctggttaagtgtgttcatcttttccttgctcaagtgtgggctatggaaagaggtgaattgcggtgacttctgtggtgaggaggcttcagtgttctgagaccatgcttaaaaaattcaaatactcttaattaaaggggcaactcatcttcttatgagatttcaggccccaaataatttatgtactgcagccacattgtgcagcccaccactcccactgaccccacccacaagagcattcaggatcataggcactgatttcctatgctaaggtggttggccacttaaccttattacaatcaaatggtagtttcagtgtgatttatactcctggggaaggtgagcagatggacaagaaggcctttggtattccactaatgttcattcttctgaaattctgggattaatcaccaggtggtggtagaactgattgtttttttctttccagttttccaaatactgtctcttctcaataactccaaagtgaatctctgacattgatttgaaagaagttaatgaattcgagggtaatgcattccattgccactgctgtttcatgtaccattcgtacttagtggaggaaatgtggctgattttcttaattataatggtacagacacaaggacaaatcaaagtgattgctatttggcaaatcgttttatattcaaattctgaaggtcagtctgaagtgttttatatcaccaatcataactgtctgctcttacagctttccattaagcttatgaaagtgattacagtaatgctgctttttaatatccctcatgatttgacaccttgtcagggttactttggaatactgtcgaagtcttaggcagggtaaacacctttgtagattgagctagctctgtacttaattaaagctaacactttgatcagatcagtgtcagaagattacttctccattgccttcagaaatactctagtaactctttccttactgcttcacagcctcccctggtgaagacacaaactgtcaccatctcagataatgccaatgctgtgaaaagtgaaatcccaaccaaagacgtccctattgtccacactgagaccaagaccatcacttatgaggctgcccagactgacgacaacagtggagacttggacccaggagtcttgctgacagctcaaactatcacatctgagaccccaagcagcaccaccacaactcaaattaccaagactgtaaaaggtgggatttcagagacacgtattgaaaagagaattgtgatcacaggagatgctgatattgaccatgatcaggtccttgtacaagccatcaaggaggcaaaggagcagcacccagacatgtcagtgaccaaggtggtcgtccaccaggagaccgagattgctgatgagtgagctcaggaactaacctaccccaactctgcccttctcccatccaagagaaaccagcaaaatgataaagaagctaacctgccatagtcagacttcagactttcaagattattctaaatcaccagaaaattaatttcagtttctattgggagtttataccaagagattcttctagatctcattgatccttttgaagagctttttctatattaggatatcagaattgttcaacttttcactctatagactgttttaagagttttggggtttttttaattgggtggtttgtaaccccttcagcctagcctctctgcccatttatttccaaccccaacagacactgacagggtccacggaattcttcgggaaatcctccaaggactcttgtcagctgtgttggaggccaaagccagcttagtgggacttccgcgtctctccctagtcttatcccctttggatgatggcagaaacttcatgaaccagccctttctcagagccagtgatgtgagtgtatcagaatgccagggagggcaccagccctgatccacagacctcggaaagatgcccctgttcctttgttgcgggtggttttggtaaggcagagccctctgctgagaatgtagtattgtttttcccctctccctcctgctttctttttggagcttctttgggtcaaagacatggaagttgcttcagatatctgatactgtgaatgtttgaacatatccgtggccttcacctctccagctacccttttacctcatcagaagcagtggctcagctaagtgctccccctagctcccatctcaggagaccaaatctcacagaaaaataggcactttgggccaaaagctctaatggaacatttttagtggtgatttggggaaggaaagttaatgaggtttttaaaataaggttttctagttttgagagtgtgcacttcacacaggggaatggggttacttctgtctgatcctgggcctttctttcatcccaaatgacaaggaatgtggctcagagaagggtttttcttttttgacctttcttctctcaacaggaacctgcctgaggacacccttctagagcaaggaattgacttttaggagccgttctccccacaagacaccacatgacaaggggtataagccccagccctgctcattcccactcaccagctgaggtctgtcaggttttgaaggcttgattttgtggtgggtttggggcttagttttcctttttttcattttgatttttgaaagtgaagatgatgccctaattcctggtaaggatttggggcatagttttttgtttttttgagacggagtttcgctcttgttgcccaagctggagtgcagtggcgcgatctcggctcactgcaacctccgcctcctgggttcaagcagttctcttgcctcagcctcccaagtagctgggatgacaggcgcacaccaccacgcccagcaaattttttgtatttttagtagaaacgggatttcaccttgttaggctggtctcgaactcctgatctcaggtgatccacccaccttggcctcccaaagtgctgggattacaggtgtgagccaccacgcccggccgatttggggcatttttatttaacagaacttctctaaccttccaactgcttcccacaaacacattggcctcaaggctccttagaatcccagttccagcttcctaaaatagacagtgggtatcgggcagcagtcactggggctcaagggcagtgagcaagagaaatgtctaaagctgcttctcccaacaccgtccaaagtctccactgcctgagttttgtttcggctggtttgaactcatttcgggtgtgtgcatttttcttttggtacccatgtgagacatgaacaacaggagggagggaaagagcccaggtgggacgtgggacaggcttaggggaaagagcttgtcctatctcaggaacaaaattataggctgtgggcagagggtctgaaaggtgggctttggggtagtgcccaagcctggtcgtgttgccaggagtggtgacaagaaatgcagcttacatcaaacgaacatgtagtgcatgcccactgcctgatggccagatggcctgtaggaagagctaccagggcttccagacctgtggaacgaagaggatggggaaaaggcagagggcactgagtgtccctttaaaaactaacacactgaatattccgtgtgatctagaacagtgtggcagctttcacagcacaggaccgttcatcgggggcctaaacgtttccctcagctctgtcaccaactcacttctctcggcttcgttgtctgtaaattggatgaaaagagctctaatgcctttcaggctcttagaagccatagatttggacaagcccagcaagatgggtgtccttccaggcctcttcccctttcctccatctctggcaacagttcttggggtttggcaattgtttggattttttttctttctgcagttgtgtgtatgtgtgtttgtgtgaagaaaaacagactctgtccaggtagaaatggtgaggagggggaagagaattacatttccagggtcagaaacttggcaacagttttcctagagtgactcagacacaccacagtaacaactctcgctgcaattttattttaatttgagaaataaagatttcctccaagccacatgaggactctggcacccacccacaaagcaagacctgtatttataagccgagggctcagggagcctaactgcgggacccgtcagggccccgtgacccatccccgtccccacccccccctccaccgctgggcccatcagtgtgtgttggggggatgcttggcagctgggggtgaggagacaacaaacctcgggaactggagccagagctgcggcctgactgacgccttttgatgctcacgggaaatttctgcccaggatctcagccccaggctggttgtttctacaaatctctctcaaatgtattattttggtgacaaaaatgaaggagctttgtaaatttttttaaaattatgaatcatatcaagtagttgtttgcatttcttgaaaaaataggaactcgggcagcagaatcagattggcagaatctttagactacacaggcaataatcaagtctgctgttttggcctttcgtagtagaagtggttgtagtgtttagatatctgtttggtcttgcttcttgtattgcatttttttcaataaacaacaacaaaaaaaaaaaaaaaaaaa

SEQ ID NO: 24667 - DNA, 5413 bp, Homo Sapiens
ggggacgggtgagggcgagggaagcgtcttgggctgggtccagcggcgggtgagggcagagggtatagacagacctagctggggccctgcgcctcccacctctgtgtctcattttgctggttctcctccagctccggtgtcggcgggtggcgcggcgcccccggagggggccatatctaacggggtttacgtactgccgagcgcggccaacggagacgtgaagcccgtggtgtccagcacgcctttggtggacttcttgatgcagctggaagattacacgcctacggtgggcttccgcccgaacaaggccacctagcctgctgacaaaactttcagccacatcgtgcttttcagcgttctcttccatttgctcccctagtcgctcttctgtgtttgccctctgctcacccaaactgtgagcttcctgataatcaggcctatccatttccctcaccctcctcccgctctgctgacagttctcttaattgatttctcagatcccagatgcagtgactggttactacctgaaccgtgctggctttgaggcctcagacccacgcataattcggctcatctccttagctgcccagaaattcatctcagatattgccaatgatgccctacagcactgcaaaatgaagggcacggcctccggcagctcccggagcaagagcaaggaccgcaagtacactctaaccatggaggacttgacccctgccctcagcgagtatggcatcaatgtgaagaagccgcactacttcacctgagccacccaacctaaatgtacttatctgtccccatgtccccacaccagcctgttttcataataaactttattgtgacaggcggggctgatccctcccatgttgggagacaccatgtggcaagtgacaaagctctgagcccgcccctcttggggccacagtggtagggatgggggaaggggatggaccccatggctggggtagtaccatgactggaggcgggggaggcaaccagaggcctgctgctttggggaggtgcattcccccaaccatgtcccgacacctctggagttcaggcaaggaccttccagtcctacttgtcctgcatcttctcaaggataggcacaatcatgtcaaatttgggtcgctttgcagggtcttcattcatgcagatcttcatgagcttacacacatgaggggaaatacctggtgggatggtaggccgaaggccttccaatgccacctgcgaatacaagaaaaaaagcagcctcacaatttgagtctgtcatgtagagagaagccactggcccttgggacaggattactgtatatccgaacaaatatgtgaggagccaaggcccactacagttattttcaccatcaccaaccactcccgcaacacaaatgtatgctgttgtgctctcaccttcattccaatctccatattggagaggtcagcaaagggtacctcccgtgtcaccagttcccacagaagcactgcaaaactccacatgtctgctgagcgtctgtttgtgtcttcaggcttcttctgcagagctggagagatagggcttgtctgttctggcccccttgcctgtcctgtctctgcccccttccactacttctgaggtggtccttttttacctcccgacatgatgacttcactcaccttcgggggctacccaggcaggtgcatacatgcgaccaggacattggaaagagaacttgacatcagccatgctaattcgggcagtcatgtcctcatcaatctgaggaagagaaaacagatagaaggaggtaagtcatagataggcaaagggcttttggggcctgggccaggagtgagcttgtggcctcaccattacactacggctattgagtgcatgtcgtgggatgaggggctctagtgtgtgtaggaaggccatgccccttgccatgtccaaagcaaacttcacagcctggctctggtccacgacgaaatctgagaggaggcaaaagtcaaatagttcagagaggctccctctctgccatttcctccccaaggaaattcaacatccctactcactggtgccttcatgtagtacattgtagagggatccatacggcatccagtgtgtgatgagagtaggatgaggagcaggtggagactggcaggcacctagcactgggagcacatttggatgcgagaaaatcctagaagagggagggagtggttgagacccagtacaaaagatctctttcagtgctattcagggttccttggaactagcagcttccaggttacgccttgcactacctgagccggggacactcttcattgaagtccctgctcttccttgtactccagtctcgaaccttcagcaccttcacgacaatgtcattgccctgccagcggcccttccatagctgcaggacaggcaggggttaggaggcttgaaatgttgctgccacttccttgcccactaactggaggaaaaacttaaaacaggtacaaagcaagtaatttatgggggtttagtgagggaagggcaagaagggcaggggtcacctctccagagtgattctcgttgagcttcgtcaggaagttaagctgtttgaagtcaatgccagagtgtttgttcagggttccatttcctaagagtgtgggcaggtcaggtacccagcttcaccctaacccagccccaagaggccaggattatttccttttacaacccttcttcccacagtggtgactcacggggccgagtgcgggtggtccccttccagaatgtgtccttgtatggaatacggttgagattctggcccatcttctctgcccgctctagggaagaaaaacaacctaagctgtggtacagagggagaagacaggtgggaagggacgagaggacacaagctaggggatggggagatggacctcggagaagctctctcaggggtgccttggctttgtccacaggcatctctccatacttgttacagatgctgacaagggccccatttgccaccaggtcctggaatgaaaaggccattatgatgagagccactgctacctcgctggcagtcactgaaccaaccatgaatgcacaaatgtagaacttaatcctgtaagtgtcacacagtagtactgacagaatgggttgagggttccaaaatctcccaccaaggctcagactttacttcctacccatctcaggaattaagggctgagtactcacctctgccacttgatcttggccccaaaaacaggcatagtgcaggggcacattcccgtgttcattcactgcattgatgtctgccttgtactgcaatagctggaccccatggccagacaaaaagaagaggcagaaagtacagtcagttccaaatgagatactggtgtcagggcatgggaaaagggggaagagcacacatgctttctactgtatgttacagtgcctgtgactgaccctcatggcatgtatgtgatgtggatgacgaaggagtttgtacgtaccttctgtacaatatcacggtgtccatgactggctgccagatgcaggggggtgtcatccccacggttcattacattgatccgtgccccccgcatgatcaacatctcaaccacagcagagcggccctctcggcaggcccagtgcaagggggagaagccatgatcgtccctttgaggaaggggcaatggtcattgagctggaggtgggatggggcaaaggttttgattcctgaaaaactgataattacatactctctgggaaggcttacctctctaggactttgattctcattcatgccagcaactcccaaagctgtccatttcagaccttcccctgagcttcaaaccaaaccaaccacctagatatctcaacaacctctataaaaaaatgtgttatcttcaccatatcccacatctcatttccttaggtggtagtgctcttcccctggtttctcttgcaccccttctgcaacatctattggtcctttctgttttccaccacatcttatatgtccccctacttcagcacttgttgcactggattgtaaaaatctgttaatggactgtcttgtctgttagacctttaagtttcttgagggaatggattgacagcagctgttcagtgcatgttagtgggggagaagggtgtcttggagaaggcaggccacaacttatagaagagggaacaaacttactatttggctctggtactgaaactaacatctaaaaatggaatggaatttaaatgatgttttggaagggtttatgttgaaaaggagaaatgcttttgactactgatgaggtagataacaaaccaccatgcaaagcaggattcccctacttagcaatcctgtgcatagaaaacagaagaaaatgagaatggctgttttgggattaaaactatacctgatttttttcttttccaagaaatatgtattttataaagtaaagtatacaaacaaaacaaaacaattggtttggagctgggcctgcctgacagcctggggccataaaaggaaattccctccagttcggggctgcagattcaaggggcggagcagggggcggtccgtggtctgggccagcagcctccggatgccttagtgttgtggtcacttcctgtgtgcgactctaggcaaggcctggagctgatcaggggtctggccatccagatgcccgtacagctgaaggggttggggggtgtggcctttaagttaatcattttcctccacaacttgctcgcatctgctaacacagaaatagccaaaagcttttccttgagatgggattatccccaggaagcattacgccccctgtttatcagttggtcttgcctcctagacctttaatttgtgccctgacttatcagcttccagtactgcctgtggcgccagggcaggccaaactcggggggcaaaagtatgggcacaagggttctgttcactatcaggctgcctgccacctcagggcctggacttctatctcaagaagacctgcaaggaattaaccccctcttcatatccagcatatagccaactttggcccccatactttactcctcaaaccagcaccacaaccttccagtttcattaattccaccccttttccttctggcagcatcttcctagagtcttcctagactcagctagagtcttcctagatgctaggcccactgggcaactgcctaagcctctatttcctcgccaacaaaacagtaacagtgcttactgtctttatcagggtaccctttgagaattatatgaaaaatggaacaaatgactttgcaaagtattaaagagaaatagtgtagaacctaatgggaaccagtgaagtctagactaagatgacaggtgatcctgacctgtcaaacctaaaaactaaactccaccaattttaaaaaataaagaatttgattttgctaaaaaaaaaaaaaaaaaaa

SEQ ID NO: 24668 - DNA, 2003 bp, Homo Sapiens
aactatttgttgaatgaatgaatgaatgaatgaatgaatgttacaatacatcacatcaaattattgcccacctcactccaaaagtgtttaaatgcgaattcaacttattagatacctttgagttaatgatgctgaagaatttgtagttactttcattatttgtgtttcattaacctagggttcaataatattcccaggtatagtacatgtttgggtaagaagctattgaccgtcttatcttttgatgattccaagaaaaggtatgaagccatttgccttttcataatttataggttaatttgtgtgtaattagaaaagcaggtacattttaagtaagtcaaaccaaaagacaacatcaagaagagaatagtaaatagtcaagtgaaagtgctagcttgtaattccaagagctcatgtatttgagcagtgcctcttcccaggtgacacagggcattttgagttcaggttttcctggtggtatgtacaggagtgggagcggagttacatgctaatgtgaccagagaggatgcagtgctgaggatccagggcaggatggaggcagtgtccccgactggcagcctccaaaaagccttgacctacagatgtgttttgtgtgtcccatgcagacttggctctcatggtgttttgttttttagtttagtgtcaatatttgaaacaaggtcctgctctgttgcccaggctggagtgcagtggcgcaatctcggctcactgcaacttctgcctcctaggttcaagcagttctcctgcctcagcctcccaagtagttgggattacgggcatgcaccaccatgcctggataattttttcttatttttagtagagacaggatttcatcatgttggccacgctggtttcgaactcctgaccacatgtggtccacccaccttggcctcaattatgtgcattttggtatatttacttgtatttcaacatcttgtgagtttgaaaaacctgaaaggccagaatgcttccttttatttctcaccatttgggcagcacctaagtggttttgtaaaatgcagcatctggtgctgtgggtctctctcaggccttgagggacacttccttcctccccactcgcctcctctccactagactttggttcctagagggcgtggggccgggtctgaggttcttgcctgccttccctcccattggtctttggttgctcatccctctaactgcaccccttcttggtccttcctccacagacttcagataatagataagtcattagcaaaccagaccgaatctttagggtgaagagctccccaaagccatctggtgaggtcattgtggggaccagggactgattatttgtcacctggatcacaaagatgggactgtctgctcaggctggtggtgacaggatcctgacccgtggtcctctcccgctccctctgctccaccaggacacatgtataggacactgtgctgtgtgcagtggagaaatctccctgggccaggggaaagttcagacagtgcctctagattgtgttttgcctcctccaatgtagagttgacatctggaccccagagcccagcagggctttctgtcagacatgctagggtggtagaaatgggccctccaggtccccctgcagtgcactgggcagagacctccggaaagccggcagcgggagcgcttcctgggcagcttcccccagcacagtgttcccaaaccagtccatccggaaaacagtctgtacagcaaatgctgtgtgagatcttaggcttttcactttttttgttttgttttgtttttgaaagaaagaaaaaaatacaattaacaagcctcttttgtaaatgggtttcctttctatgtataaaatcgtggtggtcccttgtttttacatgttcatgctgtgtaattttgagatgttactgagatatgttctgaacataatgtgcatttttttctgtacagatgaaatgggagaatttaataaagagtttgcaggttaaaaaaaaaaaaaaaaaaa

SEQ ID NO: 24669 - DNA, 2853 bp, Homo Sapiens
ggggtttctcaccagcgccagcagccctgtggtggcgacgacgatggaccaggagccagtgggcggtgtggaacgaggagaagccgtcgcagcctcgggagctgcggccgccgcggcattcggggaatctgcagggcagatgagtaacgaaagaggctttgaaaatgtagaactgggagtcataggaaaaaagaagaaagtcccaaggagagtcatccactttgttagtggtgaaacaatggaagaatatagcacagatgaagacgaagttgatggcctggagaagaaagatgttttgcctactgttgatccgacaaaacttacctggggtccctacttatggttttacatgcttcgggctgctacatcaactctctcagtgtgtgacttccttggagagaagattgcatctgttttgggtatcagcaccccaaagtaccaatatgccattgatgaatattatcggatgaagaaggaggaagaagaagaagaagaagaaaacaggatgtctgaagaagcagaaaaacaatatcaacagaataaattgcagactgattccattgttcagacagatcaaccagagacagtgatatccagctcatttgtgaatgtcaattttgaaatggagggagacagtgaagtaattatggaaagcaagcaaaatccagtctctgtcccaccataaaatgaaatgactatcaagcttcaaactcttaagttttttttttttaatacaaaaactttcacattctttattcagtgggacttaatacaattatttatattttaaattattaaagtatctggaaagggaaaatgttttcttcatttttaggatctatctagcaaaagccagatctgaaattcagatatttgtactgtttttactgtgtatagaaattagtgctttggttttaaaatgatcttttaaaaaagttaaggacatcctagagccttaatagttaagaagagttaaattatcaagcctatttgtgcatttgctttttttgaaaaaggtaagttgctgattaagtctaattggaattgataattccatagtcttagattaaaatgaggatattttctcctagattttctcatgttatgccatgcatttatatatctaaccattaatttcacactaaggatgcttcaccatataataaaaggagcaagatggaagcactttgaattttctttcattgagaataactgttttatgtaagaatctgtatttataacaccagatattaagataggcttccattttttaatgcaagccacttacttaatcttgtattctttttcaggactcaaataactagctttgaacataatattaaaacactacttatagaatagatttattaatgttaatacctagtgaatatccatgtggtatcctggttatgttatcggttcagcgttaatcctatagaaaagtggtttggaggggattgggggatagtgggacaggtatagatttaatccatcaggagcaattagatattgtataaggtgcaatgatagcctaatgaaattacccgtcattcatcatttagaagtagcaacagtgaagactggacagtttacttgaatctggttggccactcccctacctacttggttatttgtaaaccttacaaatgtatatattgtgaagctaattttgaaaatattcctaaatatggccaggtacggtgctcacacctgtaatcccagcactttgggaggctgaagtgggcagattacttgaggtcaggagtttgagaccagcctggccaacgtagtgaaaccccgtctctacaaaaatacaaaaattagccaggcgtggtggtgcacgtctgtaatcccagctgctcgggaggctgaggcaggagaatcacttgaaccagggaggtggaggttgcagtgagccaagattgcaccactgcactccagcctgggcgacagagtgagactccatcttggggggaaaaaagtatatatatatacacacacacagacacacacacacacacatatatctctaaatgtgtgtatagaaccttttatcagtataacattgatttataattaaatgtgggtgaggaagaatgtgtggagtgtttcagaaattttgatcttaaaagccttttcagaaactcaaagctttcagaaattaatagttatattaatagccttctaaacagcattaagttttcaattttaatatatctatataaaatatagtgtcaaagaaagtaacatcaatatagtgggtctgtaatggaaatctgtcaatgaacatgaactgagttcttcaactacaggttgaaggataattaaacttttcattaggagtgttcagctacatggattcatggaatggtggttcatagtaagtgatggtaatctttttattcatgggtgtaaaccctttataacttagtgcttaaaatattaatcttttgattatataatgtcccatgaattatagtttaccaatagttctaaaacatgctaacctgaccttttccttctaatttgtttttaacttcattcgagatagtacctctcactcacagatatttatttggttatcaagtgaagataggtgtgtctaaaagtgatcttctgaatcctgtctccctagaggtactagtatctagagtttacccagaaaattttatgattgtaacaaaaggaagtagtgacttatgaaggttttgtttcttgaattttacttttgctacttgtccaatagtggctagtttatgtttatcaatatagttattcactgtgccttaagtttatactttgtttatgcaaactataaaatttcccataaatgtaaaaaaaaaaaaaaaaaaa

SEQ ID NO: 24670 - DNA, 3417 bp, Homo Sapiens
tgctcttttttaggacagggagggaccagcaagcttgttcacagcctttccctcattctctgcttagttttccaagaaccttcaggtggaaagggagtccctggagaaaagacctaactcatcaggttaccaaaggagaaatatgcatcctttgtcaattaataaatggaacacctgccttaaaaaccagggagttctgctagggtgaatcactccctacgaccctgacctatgtagggaacataaaaacctggagtttggggacctataatattgaaggccacattgcagttgtggagaccttaccaaagtacagcctttccacaagcaactaccaaacaccagctgcctctctccatggggcacagctgtatctctggctctcgtttcccccggagatgctctattccagccttctcttacattttgtatcccgcacagttcctggcataaggacttacaacatagcaggctgctatgttaatggtgatatactgcagatccaacctgaaattccagcagggcgctttgtgtttgagaaattaaaggggagagaatggacccagcctgctagaatataaaaaatttaaagaagaaaaaaatattaaaataaaattttctcctaaagagcactcaaaagcacacccccaccaatgctggatctatttatctctctcttgcttttttctttctgagatagggtctcactctgtcactcagactggagtgcaatggcaagatcaccgcttactgtagctttcaattcctgggctcaagctatcctcccacttcagcctcccgagtagctgcgattgcaggtgcatgccaccatgcctggctagtttttaaattttttgtagagatggggtctcactatggcccagactggtcttgaactcctgggtcaaactaatcctcctgccttggcctagtgctaggattataggctttagccactgagcccagtctatttatctttctataactcacatattaaatcttcctccttaaatcacctcctacccacccatctgcagggacagcaaacacaggtctcagagggtcaggcaacctacaggagggaatgaggccagagtaatatgggagaccggggggaactgtagcaaactgcaaggtattcacttcaacagttcttcaacactgtgatggtcaaaccaaacacagaaacaggaagcccagttcaatcaccagcagccaatgtgggatatttgatccacatgctacagggcaaactgcttacgataaatgacctggtctccaccaacctgctcttgaagtctagccgctcctgcccaacttcctacactctactgacatgacccacattcacagtactctcctgaaactttgcttgttcactcttttattttcccaacgaatatttttctttttcttttttttactttttttgagacacagtccccttctgtcacacaggctgaagtacagcaggatgattatggctcactgcagcttccatcacctgggctcaagtgatcctcccaccttagcctcccaagtagttgatattacagccatgtaacaccacacccagctaaatttattattttttctttttcttttttttttttttcagacggagtctcgctctgtcgcccagactggagtgcagtggcatgatctcggctctctgcaacctctgcctcctgggttcaagcgattctctttcctcagctacagctactcgggaggctgaggcaggagaatcgcttcaacccaggaggcggaggttgcaatgagctgaggcgctgcactccagcctgggcaacaagagtgaaactccgtatcaaaaaaaaaaaaaaaaaaaaagtttctgccctcgcagagcttatagggtagcaggaaattgatatagcttgaacgtttgtctcttccaaatcttattgaaattgaatccctaatgttggaggtggggcctggtgggaggtgtgtgagtcatgagggcagatccctcatgaatggcttggtgccctccccaaggtaatgagtgagttctctctctactagttcacatgagagctgattgtttaaagagcctggcacctcctcccctctcccttgctccctcttctcaacaagtgacatgccggctcctccttcatcttccgccatgagaggaagcctcctgaggtcctcaccagcagatgctggtactatgctttttttttttttcctgagacagagtctcactctgacactcaggcgagagagcagtagtgtaattatggctcactgcaaccctgacatcccgggctgaagaggtctttttaccttagcctttcaagtagctgaaatcacaggcatgcatcagtgtaccatcatacttggctatttttttttttatttttagcagagacaagatcttatcatgtttcccaggctgcttttgaacttctgggctcaagcaatcctcctgcttcagcgtcccaaagtgccgggattacaggtgtgggccactgctcccagcctggcaccatgctacttgtatagtctgcaggactgtgagccaaataaactgtttttctttataaactacccagcctgaggtgtttccttacagcaatgcaaaatggactaacctaggaatcacaggccaacacttaccagactgtgatgagcacatgacaatagtacagactgggactgaaacattccccaggggcttcttgttgcatcatagagagtagggtgagacatcttggctgaggctaaagatgagcaaagatgagagtgaaagagtgatgatggaggtagggagagggattcctgaaggaccagtgaagtcccccaaggaaactgacattcctgtggctggagggtagggatttggggaggctggtgcaggataaaactgggaaggtgagcagaggccagctcttaccaggccctgtggccaaattagtttggactttgtcttaaaggcaatgggcagtcaccagcaggttttaatcaagaactattttgatccaaatttgccttttaggagaattcctctggcttcagtgaacaggccgaagtgagcaagcctaataggaagacaattggaggccctcacaataaaccagtgtaaaagagaatagggccgggcatggtggctcctgcctgtaatctcaaaactttagaagtccaaggtgggtggatggcttgagcccaggagtttgagaccagccagagcaatgtgatgaaacacatctctacaaaacacaaaaattagttgggcatgatggctcgtacctgttgtcccagctaccccagagtctgaggcagaaggatagcttgagcctgagaggttgagactgcagtgagccaagatcaaaccactgtgctccagcctgggcaacacaggaagactgtctcaaaaaaaaaaaaaaaaaa

SEQ ID NO: 24671 - DNA, 3620 bp, Homo Sapiens
gcagtttgtgaactgtgatcttctcctcccaagtgaaaggaggggacagtgagagggcccctctcctggctggttggagatgcagatatggagactcctcccggaagcccacctggctgtgagccgagccggagcaggactaaccttgttgccggggccttctttctccgcttgggtgtcccgtgtggtggggctgtctgggcgtggctgtgcagtgctgctgagctaaccccaccgtgcttgagatggtgtgctgggtgccgcggtgattcttggacgagcttgtgcatgcgccagcattcttcaaatgccagttataaaaagctgttgtgtgggatgtttctttccctttcaggtacaaggtatcagctggagggttgaaagtgtagcttgggaattgtgtgcatttcataaagtagcataattgcctttttccaggagaatattttagaaatctagcattttagaattcttgggcatttttaaatacaggtgaatatttgaatttggtttgacacaaaatacagaatggatgaagcatgcagatgtttggcgtgtgccccgaagcaccctctactctgtcctctgcacccaccctttgcgcctctgcgtcagccacagctgccccgggagcgagttctcctgaggccctggctgtgctgactctagggcagcgtgagggtggttgtcagctgtgaaggtgccacttacacactaagtcctccttccttgtggagggaagggctcaagtagcaaatattggagcccccgcttggtgctgggagctgtgacaggcagctcctgaagaagcagtttaattggaaccagtgaccatctaaaactgtttgtactctaaaccagattttacagaaatattggaatcgtacctttatacttgattttttcattttagatagttaggcgtaaaggaagcctcctgagggtctggtctgatcctcctgatccttgaagagcttccagcatcattctcccttcatgctccccattttcataagtaactggtggcttgacatgctgggtttggtttgggagccctctgacaaactgaaagggtggatcaggaagcgtctgaccacaccactggtagacacgctctgcgtccaacaagtccttcccagcaacatgtagaaagcaaagtgcatgcttcattctaaggttgttgtctaaatgtttccctgtgtttcctttttgtaggatgtgttcttaatttgcttttcccttgtgagtcctgcatcatttgaaaatgtccgtgcaaaggtaggtggggatttaaaatgtgtatgtaagttatagaatgatcctctcagaaataaatactttaaaatatcacttagcctaggaatttttagttatttaaattggttttagcaatttgctacttaggtacatgattgggttttttttttcttttgagacggaggtctcactctgttgtgtccaggctggagttgtagtggtgacatcagagctcactgtagccttgaactcctgggctcaaacagttctcctgccccagcctcctgagttgctgggaccataaatgtgcaccaccatgcgtggctaatcttaaaagaatttttgtatggctggttttgtagaccctggcttgtctcaaactcctgggttgaagtgatctttcagcttcagcctcccaaagtggtgggattatagctgtgagccactgcatctggcccatcagcagtttattttatttatttctttttgagagagtctttttttttgtttttgtttttgtttttgagatggagtttcactcttgttgcccaggctggagtgcagtgacgcaatcttggctcactgcaacttccgcctcctgggttcaagtgattctcatgcctcagcctcccgagtagctgggattacaggcatgcaccaccacgcccggctaattttgtatttttagtagaaatgtggtttctccacgtcagtcaggctggtctcgaactcccgacctcaggtgatccgcgcgtctcggcctcccaaagtgctgggattacaggcgtgggccaccgtgcccggctgagacagaatcttgcactgtcatccaagctggagtgcagtggcacaatcttgggtcactgcaacctccccctcccggttcaagcaattctcctgcctcagcctccttagtagctgggattacaggtgcccgccaacacacctggctaatttttgtacttttagtagagacggggtttcaccatgtttgccaggctggtctcgaacccctggcctcaagtgatccacccgccgcagactcccagagtgctgggatttcaggtgtgagccactatgcccggcctaatacgtggatttttaaagcttcaggttctggttcagaagtttcctgggtctcattaaaataatgaggcactcagaattggtctaataaaaataacgaccatttctttctactccagtctctttcacaaacttcttagtgaaaatgacaagtgaggcccttcagtaggggcattttcagtggagataatagcggcagacctgagaccttgggctaggtagtttattctcatttctgaacagatgatgaattttctcagatgaccctaagaaattgttttaccaaaaacaaagtgatctatttgctttgggaggaactcccttccttttgtttctcttcccttccccccttcccctgcggttgtagagcccgttctgtccggtcgtggttctgtccagccatgatccgggagtcctagcttgctaatggaacacctgagatgttccttatggctcaaggcttgaattgaaggtgggaaccacctgaagcctccgtggggaggccttgcctgaggttaggtgtctggcatgagtgccgccggctgggtgtgatttaggtgaaggacatctgtaaaggagcgtgtcacaacctctgttccttcttcacatctagtggtatcctgaggtgcggcaccactgtcccaacactcccatcatcctagtgggaactaaacttgatcttagggatgataaagacacgatcgagaaactgaaggagaagaagctgactcccatcacctatccgcagggtctagccatggctaaggagattggtatggaatcctgtgtttttcctcctccttgtacctcttttattgtagtgacagagactggagtccagtctgggaaaggagggtgtgtgtctcccactcagggcctggtgtactcttggggaaccagctggcaaggccctctgggtcttaacgtcagcgttggaaggtggaagcagggctgggagccggcagaaggcgcccgggccccaggagctgcctcccgctggtggtgtgatcagaagagagtggggtcgagtgtacattgccgtgtggtcgtgtttcctgtaggtgctgtaaaatacctggagtgctcggcgctcacacagcgaggcctcaagacagtgtttgacgaagcgatccgagcagtcctctgcccgcctcccgtgaagaagaggaagagaaaatgcctgctgttgtaaatgtctcagcccctcgttcttggtcctgtcccttggaacctttgtacgctttgctcaaaaaaaaagaaaaaaaaaaaaaaaaaaa

SEQ ID NO: 24672 - DNA, 8644 bp, Homo Sapiens
gtaccaggagtggggtactgctataaaaaataacctgaagatatggaagcgactctggaactgggcaacaggcagcaattggaacagtttggagggctcagaagaagacaggaagatgtgggaaagtttggaatttcctagagacttgttgaatgactttgaccaatacactgatagtgatatggacaatgaagtccaggctgagatggtctcaggtggagatgaggaacttattgggaactggagtaaacgtcactcttacatgttttagcgaagagactggcagcatttttcccctgccctagagatctgtggaactttgaacttgagagacatgatttagagtatctggcagaagatatttctaagcaccaaagcattcgagaggtgacctggcttttcctgaaagcatacagttatatgtgctcacaaagagatggtttgaaattggaacttatgtttaaaggggaagcagagtgcaacaaaagtttagggagtttgcagcctgaccatgtggtagaaaagaaaaacccattttctggggagaaattcaagctggctggagaaatttgcataagtaacgaggagctgaatgtgagttgccaagacaatggggtaaatgtctccagggcgtttcagaaaatcttcagggcagaccctcacaacacaggcctggaggcctagaagggaaaaatggtgtgagccaggcccaggcccaggccccagctgttctgtgcagccttgggacatggcaccctgtgttccagccactccagctccagctgtggttaaaaggagccaaggtacagctggaccattgcttcagagggtacaaatcccaagcattagcagcttccatgtggtgttgggtctttgggtgcacagaagacaaaagttgagctttggaagccgctgcctagatttcagaggatgtatggaaacacctcgatgtccaggcagaagtctgctgcaggggcagagccttatggagaacctctgctagggcaatgcaggggggaaatgtggggttggagctcccacacagagtccccactggggcactgcctcatggagctgtgagaaaaggaccaccatcctccagactccagaatggtagatccaccaacagattgcactctgcgcttagaaaagctgcaggcactcaatgccagcctgtgaaagcagctgcaggggctgtaccctgcagagccacagaggtggagctgtccaaggccatgggagcccaccccttgcattagcatggagacaggggatcaaaggagattttggagatctaagatttaatgaatgccctgtcgagtttcagacttgaatggggcctgtgacccctttgttttggccaatttctcctatttggaatgggaacatatacccaatgcctgtacccccattgtatcttggaagtaactaacttgcttttgattttacagactcaggcagaagggacttgccttgtctcagatgagactttggacttgaacttttgagttaatgttggaacgaattaagacattggggttctgttgggaaggcgtatttggttttgaaatgtgagaaggacatgagattttggaggggccaggggtagaatgatatggtttgactctgtgtctccacccaaatctcatctccaattgtaatccccatgtgtcaagggagggacctgatgggaggtgactgaatcataggggcagtttcccccatgctgtttgcatgatagtgagggagttctcatgagatctggttttttggtaagtgtctggggcttcccccttttccctctctctcctactgccttgtgaagaaggtacttgcttctcctttgccttctgccatgattgtaagtttcctgaggtctccccagccattcagaactgtgagtcaattaaacctcttcctgcctattctcaggcagttctttatagcagtatgaaaatggactactacagaaagtgtttaactttaaactcagtagcatccaaagaagtaatgaaaatggagaaacgaacaacaaaatcatagtacaatatggtgtatgtactaggacaggaagagcccttttaagaagagatctatgtatttccatttgtttatctctgaaagaaagcaactttgccttgtattctgaaaaagaaaggaatattttattttacttgtaaaaatcttacaaggatgctagtctaaatatagttttcctaatttgccagagaatccatgaagatcgagttgataacaagatcagtgaagtaaaggtcagtgagttaatctcacagcagctgcaggctaattccatttccagtgaaaaacgtcttgattgctcaccacatatcttttcaccacaaacagtttcagtcttaagatcacatgttgcaatccatgagaagtaactattaagccttcaactatgactggagggctcctcgccctttctgataaattgactggacaaaaactcaattttaaaatgacaagaaatagaagatgtataaatgtactttaaatgtgaccaaaatgggttgtgaaaacacaagacacaatatccaaaaatgctggcaacacagtacactgtagagtattggttgtttatttacccttgctattgtgtggctgagcttactgccactgcccagcattgcaagggcatcaaactgcctatcactagcctgggaagggatcaagattcaaaattctaagtgcggtttctactgaatgcttatcacttttgcaccattttaaggtggaaaaatcagtaagttgaaccatcatatatccaagattgtctgtatataaatattatacatctttctctcacttttaaaacaaaataatactagccaatactaccattctcaaaagcacttgtgtcaacagcctttaccccttaaagattttcctcacaattttaaaattgttacttactattttctttgaaatgttgaccaaacctggattaaaagatttgggggttttagtgactgtatttcacaaactctcttattgattctgcagcctcacttctgcctcctaaaaagccctcaccaaggtcacgggggatggctcttttcagcctcttcctggcatttggtccagtggcatttggcattctaggacttccctctttgtctttgataactccctctcttcctgtgttcctccttgctgtgttcacttgcttcgctttcttctttctgaagcatgtttacacagtgttttctctgattgggcctgtgacgttctttaggtcatcttttccacaaataatgcttcaactggtacttgcgtgccagtgactccacgtcccactcatgagctctgaacctagtaccagcttctgctggacatctacaatgggatctctcacaggcctctctcattggtaacatgccccagcctgaactcatctcccacccatctatccagccatgctctctagttcacctgaacacttgggtgtcatcctagatgctttcccttcccagtcttctgtgatcattctgcctcatcagaggctctctaatctgtcttctttcctatatcgctcttgtccctattttaatcctaatcatctatttcctgacttattcattccttaagttggtcagtaatttaattaaaaacagatttaggccctgaccttaaatgtgataagtgatatgaaaggagatgactggggaaaaggatttccctcaaggaagacctctgtgaagcctgaagcaagaatgaaaacgagtcagacgaagagagaattgtatgaatgaaggctctgaggcaggaaaacactcagatcattccagaatcacttagaagccaagtgaagccagttcctggagagcagatcatcaaatgaagatggaaaggtgaccaggggccagacctgtagttttggtgggccttggtgagggatttacagtaggacaccccatggtttaagtatgaaagtgacaagattcctttaagttttaagaggcctcgaaatatgaaccacagattagatggaagctactctccctgtgtctggactttttagaatttccaagagctgctgtttctggaaccagattaatacaagtcagtcttccatttatttatttatgtatttatttgagacagggtctcactctgtcacccaggctggggtgcagtggcatgaacacagctcactgcagcttgggggctcaagagatcctcctgcctcagcctcccatgtagttgggaccacaggcacctaccacccagctaattttatttgttgtagaaatgaggtctcgttttgctgcccaggctgttcttgaactcttgggctcaagcgatcctcctgcaacatcttcccaaagtgctgggatcactcttccatttaacatgctatctcaacgtcaagataaactttaaaatctttagataataggctggcattttacttaaacgatctttacttcttcagaactgccattccctataaatatctggttcttcaaccacatcaaaccacttgtgatctcaaaaagcctcagcgtacactgtcctttctgtcattctaattcctcctcatccttcaaaatcaactcaaggaccagatccagggagaagcttagtggtgcccacccgaaccggccccctccttcgagttgtgctgccattcgggcccacctcttcacacagggttgtcagaccagaccagctcatgcgttcaccgcccttgcagggatgggatgcagctgtgcacctctcagtgccgacacctggagagtctcacgaaatgttgacaacatggcctgtttccatttcttgttcactaggacttctcatttactaacacacagaatttcctgtagtatgtccacttaatcagttcaagcccaataattccttgatttgggtatagtgctttgcatttatatactgatggtccccaacttatgatggttcgatttatgatttttcggcttcatggtgatgtgaaagtgatgcgcattctatagaggccgcgctttcaattttgaattttggtctttttccaggctaccatactctaaagatagagccacagatcccagtcagccatgtgattatgagggtaagcgaccaatactctacagtgtattgtattgccagatggttttgcccaactagcctaatgtaagtattctaaacatgtttaaggtaggccaggctaagctgtgttgctcattcagtaggttaggtatattaaatgcattttcaacttatgatattttcaatttacaatgagtttatcaggatgtaactctactataagtcaaggatcatcttgtatagcacttttaatttatagagtcccttcaaatgtttgtttgtattttatttccactgcatccctgtgaggataccataagttatacagctaacaaaacagttagttttcctgtgcaaagtgatggcttcatcttgtggcagattacctggaatactgtggccaaggcatcttagttctactgtctttatatatctagtacagttatatttttatggcagctctgatttcttctttggcccaagggttattaagagagggaaaaaatttaatttcttaacagatatatatatctatgtcaagtcatatatttaattcaaacccttaatattcctaggtaatttttgtctactttctctgtcaaagattgaaaggtacagggttttaagtttccaactgtaattgtagttttggtaattgttttattactaacaggtattgctctgtatattttgatgttctgttattcaatacataagaattcattacagttgaatcatcatgtatagtataatttaccaatgtaaaataacctttttatcaaactgagtattcaccttataatgtcctctgtcagaggattataataccacttaaaaccttttaaaaaatattttgttcctgataattttagctttgagtggttttcttataacaattctagagatgcgtttttattttttaaccaagatttaaagctttgtgatttagtaagagtctaaaccattcacagttcatgcttttttgtcaaatttctattatttagtattttcctctcttttatattttcctgttattttccatttctattcttttgttagactggaaattttttctttgctttcttttatcctagtgatttgaaatttatgtaatatatactattctacaataccctttatttgttttcaatatttgaacctatatttttcaacattattaagaataaaatagtatttgttgctattttgaaatgatagaccatgtttttaaggcaggttggtggttgttaaggcaccagtatcggccaggcacgatggctcacacctgtaatctcagcactttcggaggccgaggtgggcagatcgtttgagcccagcactttggccgatactgtggtttactgtattttgttctagtttattttatggaaaatgggaattcagtggttaagacaaggattaaatagcagaagaaagatgtgtacatatgtacagatgtatgtgtcctttatatgttttttagtactcttgtctcctttctggtcctcatttaaggttatctatttcatgcagtaaatttttcttcacaattcatttcatttagagagtgaatgctaccttccaagtgggctttctccagttttcctttcagggacttaaaggagaagtgatgttaacagttttatatttccattgcattttacagtgtgcagatgtcttcacatatatttccccatttgagctttacaaaagcccttagtattattctcattgtctagattccaaaatcaggcttagaggagttaaatagttgtccaggatctcaagatgcaagacccacaatcatgaacagaggcagatgttcaggatggaggcaagctgaaactcaaaaccaaatcattatgactccaaattcaggagtcttttagctgccacctgcatgggctcttggtgtagctgaccaccagagtttgtagagctgtcattcaggtgtgccatggactttcctgggacctggcacaggagaaggactgagttaatgtttgctgattaaatatctgttacaggctgggcgcggtggctcacgaccgtaatcccagcactttgggaggccgagcagggaggatcacttgagctcacaagtttgagaccagcctgggcagcatggcgaaaccccgtctctacaaaaaatttgaaaattagctggccatggtgatgcatgcctgtagtcccaggtactcaggaagctgaggtgggaggatcacatgagcccatgagattgaagctgcagtaagctgagatggtgccactgcactccagccttggccatagagccagaccttatctcaaaaaaaaaaaaaaaaagttacaataatcttcccttcaaagctggaaggcattatttacctgtctgtccagcagatggtgctacataaccaagggaatctgttgcttgcccttggtgaagctattaaagccaatacagatcttgagaatttcaaaagcaaaaatcaatactggattatgagtgctctaggaaaataaagagataaattttcaatttacatacttatatatagttataccatatttgtaaataaaaatatataaataatttatcaaaattcctttttaacagcaacaaccacagtaaacccacaggttaaaaactccacaacagtctatattaatcagtcaatgcaaagtacattccaattccaagttaactgaaaataatcaacttaatcatttggttggctctgagcagccttcactgcttgctcttgtgtcatgtttctttctgtcctcgattggctatagacttacagacggcttttgcagaggacagtgtactcacgtccatcctttgcatcctttgtgggagttggctaggcagcactctccctggggacactatgaactcctcttcttgagtgcagagatcacgtcttgttcatcttcatgcccaataccttgttccataaatatgaatggattagaattctaaactcttaactctgccccaagacagttctgagaggtagtaagtcatataacacctgaagaggactgttcttgtcctaattacattaggttataagatgacaggtgagggagccaaaccagggggcctggaaattattcatacatctctagatacagtatacaagttgtgtgtattatgtgtatttactctgtaattgattgcttgagatgaacccccaaacacactcgtgtttggatcattattatctacccttctccttaaataatcttaatttcctatgatgcttgaaagggaaagaggggccaggtgtggtggttcacacctgtaatcccagcactttgggaggctgaggtgggagcatcacctgaggtctggagttcaagaccaacctgaccaacatggtgaaaccctgtctctactaaaaataaaaaatcagctgggcatggtagcacatgcctgtaatcccagctacttgggaggctgaagtgggagaatcgcttgaacctgggagggggaggttgcaatgagccgagatcactccattgcactccagactgggcaacaacagtgaaactccgtctcaaaaaaaaaaaaaaaaaaaaa

SEQ ID NO: 24673 - DNA, 7815 bp, Homo Sapiens
gggacacagtgagaaaccactgtatgaagtgtttggggctcagatggcagtgtggtggcaggacacacaagcaggggcaacaaagccggagtcctgggagagacttcgggaaagaaaccatggagcagagtccagagggtgaatcgcagttggtcaggtgggctcggaagtgcttagaggaagaaaggaggggaagcctccctgctttgtgattggcctggtgcttttgatcattggcagtttgtctggaatgacaggcatggaatggacaaagtggagaagagcctggctgtgaagcagcctgttcaccatggaaaagagctgtggctcctatcctgaaggtcgtggagccacagcaggatctgcggagggaggtgctgggatcctccctcctcagggatgtgcagattttcatattgtatctttctggataccacagggagaagggcatattcggcggagagagaccaaatgaaaccttttacaacctcagacagaagtagggtggtggcctaaactaggggaagcagaattgggaatggggagaatgggaatgatgtgagaaatcacatagagaagactcctccagaactctcagtccattgaactgggatggaggcgattttctgggctgggcatcttggtgaaagatgcaggtggtcctaggccctgaggaccacaagagggaaggagcactgtgggtgcaggtgggcaagggaggtggggctgtgagagcagggaggggatgagtttgcttgtgtgcatcctgatcttgagatacctgcagaatatccaaatgcaaaagtccagtcgtagatgcacggtgtgaagtgcagaagccagaaatgcagattgggtaggtattcacatgtaaatggcaatggtcctggagtgaacggaggagctcccacaggaagagtgtgtgaaggaaaacaagaaggaccaccacccaagccacacatgcagtgaagggatggacagagaaacagaaactctgtaaggaaggtgaataaaaatagaataaagagttggaggctgatttgtggcacttggaaatgtatctcatacattctgtcaaaggacatctggggaatttctgtttggttctggtggttcacatcagattcccaagggatgacactgttctaaaaagaaaatgatttctctcatttctattttgtctttacagtaaggcctattagtcaggcatatggcatctgaagcagagctgtccaaaaccagccactggccagttgggactgttgagctctgagatgggactgtgcaaattgagatgggttgtgcgtggaaaacatgcttacatgaatttcaaagacttagtacaagaaagaaaataaaatattaataattatattgattacatgttataatccctgtctaatgtagtgttaaaattaattttataagtttctttttacatttctaatgtggctacgaaacctttaagattacatatatagttcacatagaaatatatgggacagcgctgctctggagtctgggctgaaatctcagttctgccatgtactttctgtttaaacttagataaggaacctaattcctctgtgcctcagttttctcatctataaaatgggaataacattcccaggtaccctatagggtttctatgtgataaatttgtgctcagaccagagcctggctcataaaaacactctcagtcactgtgagttcttttttttttttttttttttttttttttttgagacgaagtctagttctgttgcccaggctggagtgcagtggcacaatctcggctcactgcaacctccgcctccccggttcaagcgatcctcctgcctcagcctcccatgtagctgggattacaggtacctgtcaccacacctggctaatttttgtatttttagtagagatggggttccaccatgtcggccaggctggtctcgaattcctgacctcaggtgatccacccgccttggcctcccaaagtgctgggattacaggcgtgagccaccacgccccacccactgtgaattcttatgattcatttcaggaaagctttggtgagcctgcacgctcctctgtgcgctcaggagctatgtgtctagaataactgacttccttttttttcccctaggaaagttattttcctgcacaagggattcagggtttccagaacttagctgtcaacttagactgtgctttttttgcagatgtaatgatccccgagagccctgaggcctatgtaaaactcacagaaaatgcaatcaaaaatacctccggtaggcacaacaagccggagccagcctccctccctcccccgtagagcaatcctcctctcttagcacatctgctgtctctctcccagctttgtggctctagcatgttaaggcacagccttcctctcttactgctgtactagaaaaaacagctggttaaatccacaccgagaataagatttcactaatcgagcgaaataaaataacttctcaacttgttaaatggtgattggtctcattaggtatagacctctcatgtccattaactgcagaaaatatgagaaggaaaacccagtcatcagcctctgcgccctagtgttctacgtggtgtggtaatttcagcttcactgcatgcagacctacctgtggctggagactcagggtgcaggctctggtcccaagtccgccagcctgcatgagtgacctttggcccatccaccactttatcctcctcatctcaagaatcccgtatgagacaaggggtgagatcagatttcagctctaaaaaatatatgtaattttaatttaagaggtcgtaaaagataatttgaaatgaaaaatgtatttcacggtatgctgagccatagataagaacagaactattcctgaaacaagaagaattaaagaaagaaaaatggaactagttttgcttagtgttgtgttagacaaactgtagtgcaggagttcaggatcagtgatgtgggatgtcggcggggaatagagtttgaacgcagtgatatgatattgaatcacggagttactagtttacgcttcagtttttgaagaaaatcaaaaggacagaaagcaaagtaacattactgagagggtgattcccagggagggacctctcctaggtgtatctagaaggcctttttttagaaacaaataaaaacatttaataaagcttactaatatttgttctgctttcaccccatgctagcttcactgatgatcaaatgttcctgtgtagttcgaagactttgacacacacacacacacacacacacacactcagtaattttacaaagaaatgttacaactttgagaggagaatgagccagaattctaggctatgagtaagaacctgcctagatggaaatgttaaaatcttagctttctcctggttttgtttcagatcttagataaaaagcaagtcgttgctagtttgatatctctgtatatatctattctgaggcactcttttcttgattaatgaatttatgccttcagtaaatgatgcagcaacctgagccttccgtgacactatcttcccctgaggtgcatgaagaaaaatcagagggaggatcttcccctgctcactaagcgatagcagaaagaacatgagaaaaagaacagctttctccttactgagatgcagtagacaccattgcagatttttagaaaggccttccacactgacaacattcagatgatcaggggttcagctggaagagggtcaggtgcacgaagctgttcaaaacggactggagagccgttttgcgacgtccgatctgctagggctctcagtcaagcaccttcattggtttggccattttaatgtctaacccaccggcacgatggtactaaatttgctttgtaattacccacacctgccatttctatgctgctgtaactgaaatcatttctgaaacttctccttgaatatcaagctttaaataagtcaaatagtttgtccagtaaagattcttatggttgccaccgcaggggaccacagtgccctagagtcacagatccgacaactgggcaaagccctggatgatagccgctttcagatacagcaaaccgaaaatatcattcgcagcaaaactcccacggggccggagctagacaccagctacaaaggctacatgaaactgctgggcgaatgcagtagcagtatagactccgtgaagagactggagcacaaactgaaggaggaagaggagagccttcctggctttgttaacctgcatagtaccgaaacccaaacggctggtgtgattgaccgatgggagcttctccaggcccaggcattgagcaaggagttgaggatgaagcagaacctccagaagtggcagcagtttaactcagacttgaacagcatctgggcctggctgggggacacggaggaggagttggaacagctccagcgtctggaactcagcactgacatccagaccatcgagctccagatcaaaaagctcaaggagctccagaaagctgtggaccaccgcaaagccatcatcctctccatcaatctctgcagccctgagttcacccgggctgacagcaaggagagccgggacctgcaggatcgcttgtcgcagatgaatgggcgctgggaccgagtgtgctctctgctggaggagtggcggggcctgctgcaggatgccctgatgcagtgccagggtttccatgaaatgagccatggtttgcttcttatgctggagaacattgacagaaggaaaaatgaaattgtccctattgattctaaccttgatgcagagatacttcaggaccatcacaaacagcttatggtaagatgtgtgaactctggcagcctccagttatttttagcagggttgcatttcatttacagaaaatgaatataagtggtaagtgttgtttctttttttttaactttttgcattatagtctctactttacacttttttaactccctgtggtttccaatctttgtaaagcaaacatgtgcatagaagatgatatctgctagctttagaatctgattctaaagttgttgctcagttgtaaaaatcttagtgttctcaagcaatcttaattagcttgtgttgtttattaaggcagcttaatttaaacttcatgttacatctatggcccaaaagtatatttggtggcttgtagtaaaaggtcattaaaatattagaatagaatgagacaattaagtcttttgtttgtttttgttgtcgttgttttttgagacagagtctcactctgttgcccagggtggagtgcagtggtgcgatctcggctcactgcaatctccgcctccgggattcgagcaattctcctgccaattctcctgcctcaccctcccgagtaggtgggactacaggtgtaagccaccacgcctcgctaatgtttgtatttttagtagagacagggtttcaccatgttggccaggctggtctcgaactcctggccgcaggtgatccacctgcctcagcctcccaaagtgctgggattacaggcatgagccaccacacccagccgagtctttcaaagaggaattaaatacatcagattaaacatgaacctgagcatcaagttttctgaaagccaagacaaaatgggaaacaaggagtaaacttactttcattatctggcaaaaacaaaacataccacttctcaaggaaggagaaactttttctagcactaaattcaagaggaaattaactggtagactcttatacaaggatctttggacaatataatgtacagtatatttaagtgactttatagaagataaggaagcatatttgagttccattagaagaaaatattatgcactttgtagctctctgtatttttaaaatgttatgtcttaacatttaacactcacctaaactacagaattggtaccttttaattcagtaccataatagtcttagaaacctagaggaaatagctgtggaactgcatttttacttcactttgacctctggcatcaagctgtgaatgacgaatcaccccttttttttttcaaatcttgactagatatcagaggatacctagacatacttctgcttcgctatatttaatgttgtgcttttctgtttaaaagattatcttacatctcacttgcatactaatctatattttaattactgtcatatatacattaactaatttgaaccttccaataatactgtggaccaggcatcaaatcaaactgagatcagagacggtcaggggtcttatagaatatttttggcagaggcaggattagaactcaggccgtgagctgctgcatcctttagtgtgtgagctccacgtttgatgctcaggtataatttcccaccaagttaagttgattgcattctgcacttttggagcttttgccaattatcaaaaatgcttagaaaaattaatttgtttttgtatgcatagcaaataaagcatgagctgttggaatcccaactcagagtagcctctttgcaagacatgtcttgccaactactggtgaatgctgaaggaacagactgtttagaagccaaagaaaaagtccatgttattggaaatcggctcaaacttctcttgaaggaggtcagtcgtcatatcaaggaactggagaagttattagacgtgtcaagtagtcagcaggatttgtcttcctggtcttctgctgatgaactggacacctcagggtctgtgagtcccacatcaggaaggagcaccccaaacagacagaaaacgccacgaggcaagtgtagtctctcacagcccggaccctctgtcagcagtccacatagcaggtccacaaaaggtggctccgattcctccctttctgagccagggccaggtcggtccggccgcggcttcctgttcagagtcctccgagcagctcttccccttcagcttctcctgctcctcctcatcgggcttgcctgccttgtaccgatgtcagaggaagactacagctgtgccctctccaacaactttgcccggtcattccaccccatgctcagatacacgaatggccctcctccactctgaactaagcagatgccatctgcagaagtgctggtagcataaggaggatcgggtcataagcaatcccaaactaccaacaagaggaccttgatcttggcgaaagccctcggtgtggcagctttagccctcctccagatcacatgtgtgcaaattatggcttcagaggtggaagataaacagtgacgggggaacaaacagacaacaagaaggtttggaagaaatctggtttgagactctgaaccttagcactaaggagattgagtaaggacctccaaagttccccggactcatgaattctgggcccttggcccattctgtgcacagccaaggacttcagtagaccatctgggcagctttcccatggtgctgctccaaccatcagataaatgaccctcccaagcaccatgtcagtgtcgtacaatctaccaaccaaccagtgctgaagagattttagaaccttgtaacatacaatttttaagagcttatatggcagcttcctttttaccttgttttcctttggggcatgatgttttaacctttgctttagaagcacaagctgtaaatctaaaaggcacttttttttagaggtataaagaaaaactagacgtaataaataagatcatggaaggctttatgtgaaaaaagttgaatgttatagtaaaaaaaaaagatatttatgtatgtacagtttgctaaagccaagttttgtttgtattgatttctttgcatttattatagatattataaaataaaaaaaaaaaaaaaaaaaaaaaaaaaaaaa

SEQ ID NO: 24674 - DNA, 6513 bp, Homo Sapiens
cttctaaaattgcttacacctgcctcatctgctttgcttaatgagcatgccatcctttgattaacctaccctggagttgacccatccttgactgtcacgttggaagctgggatctggactctgcaacccaacgcgtgccttgattatgttttagcataatctctaacatctccacaggcttcaccttgagggtccccttgccccatgagattggcaccctcacctgccctgcacctatgccccagcatgctggtaccacagtgttctttgctcaaaggtggccacaagtcttgactagccagcccattggttaatttttgctcttcacaattctggactctttggcaatgtctcagctgtagagtaaaattgccacatcctaagcgtgcctaaccagcttgaaaggttatattgtgtcttcaacacacatcatccacatacaccctccagcagcaagcacaggcagtctccttaattatactctagggcagactgagtgtattttagccaacaaaaagctaaaggtgtctctcggggtcatttctgcaaccatgaattggggatcctgtgatttttttcaggcctgtgattatggttgctggcctttttgttactcatcagtggaaaccaatagctcttggggatggatgtggtcctatttcagactcagccaagggtggagtaaaggtgaggccaggcagctccttaaacctctcatctctgtcctcaggcttggtggagccagtgaacatggtggacaatggagatggcacacacacagtaacctacaccccatctcaggagggaccttacatggtctcagttaaatatgctgatgaagagattcctcgcagtcccttcaaggtcaaggtccttcccacatatgatgccagcaaagtgactgccagtggccccggccttagttcctatggtgtgcctgccagtctacctgtggactttgcaattgatgcccgagatgccggggaaggcctgcttgctgttcaaataacggaccaagaaggaaaacccaaaagagccattgtccatgacaataaagatggcacgtatgctgtcacctacatccccgacaagactgggcgctatatgattggagtcacctacgggggtgacgacatcccactttctccttatcgcatccgagccacacagacgggtgatgccagcaagtgcctggccacgggtcctggaatcgcctccactgtgaaaactggcgaagaagtaggctttgtggttgatgccaagactgccgggaagggtaaagtgacctgcacggttctgaccccagatggcactgaggccgaggccgatgtcattgagaatgaagatggaacctatgacatcttctacacagctgccaagccgggcacatatgtgatctatgtgcgcttcggtggtgttgatattcctaacagccccttcactgtcatggtgaccgaagaggcctatgtcccagtgagtgacatgaacggcctgggatttaagccttttgacctggtcattccgtttgctgtcaggaaaggagaaatcactggagaggtccacatgccttctgggaagacagccacacctgagattgtggacaacaaggacggcacggtcactgttagatatgcccccactgaggtcgggctccatgagatgcacatcaaatacatgggcagccacatccctgagagcccactccagttctacgtgaactaccccaacagtggaagtgtttctgcgtacggtccaggcctcgtgtatggagtggccaacaaaactgccaccttcaccatcgtcacagaggatgcaggagaaggtggtctggacttggctattgagggcccctcaaaagcagaaatcagctgcattgacaataaagatgggacatgcacagtgacctacctgccgactctgccaggcgactacagcattctggtcaagtacaatgacaagcacatccctggcagccccttcacagccaagatcacagatgacagcaggcggtgctcccaggtgaagttgggctcagccgctgacttcctgctcgacatcagtgagactgacctcagcagcctgacggccagcattaaggccccatctggccgagacgagccctgtctcctgaagaggctgcccaacaaccacattggcatctccttcatcccccgggaagtgggcgaacatctggtcagcatcaagaaaaatggcaaccatgtggccaacagccccgtgtctatcatggtggtccagtcggagattggtgacgcccgccgagtcaaagtctatggccgcggcctgtcagaaggccggactttcgagatgtctgacttcatcgtggacacaagggatgcaggttatggtggcatatccttggcggtggaaggccccagcaaagtggacatccagacggaggacctggaagatggcacctgcaaagtctcctacttccctaccgtgcctggggtttatatcgtctccaccaaattcgctgacgagcacgtgcctgggagcccatttaccgtgaagatcagtggggagggaagagtcaaagagagcatcacccgcaccagtcgggccccgtccgtggccactgtcgggagcatttgtgacctgaacctgaaaatcccagaaatcaacagcagtgatatgtcggcccacgtcaccagcccctctggccgtgtgactgaggcagagattgtgcccatggggaagaactcacactgcgtccggtttgtgccccaggagatgggcgtgcacacggtcagcgtcaagtaccgtgggcagcacgtcaccggcagccccttccagttcaccgtggggccacttggtgaaggaggcgcccacaaggtgcgggcaggaggccctggcctggagagaggagaagcgggagtcccagctgagttcagcatttggacccgggaagcaggcgctggaggcctctccatcgctgttgagggccccagtaaggccgagattacattcgatgaccataaaaatgggtcgtgcggtgtatcttatattgcccaagagcctggtaactacgaggtgtccatcaagttcaatgatgagcacatcccggaaagcccctacctggtgccggtcatcgcaccctccgacgacgcccgccgcctcactgttatgagccttcaggaatcgggattaaaagttaaccagccagcatcctttgctataaggttgaatggcgcaaaaggcaagattgatgcaaaggtgcacagcccctctggagccgtggaggagtgccacgtgtctgagctggagccagataagtatgctgttcgcttcatccctcatgagaatggtgtccacaccatcgatgtcaagttcaatgggagccacgtggttggaagccccttcaaagtgcgcgttggggagcctggacaagcggggaaccctgccctggtgtccgcctatggcacgggactcgaagggggcaccacaggtatccagtcggaattctttattaacaccacccgagcaggtccagggacattatccgtcaccatcgaaggcccatccaaggttaaaatggattgccaggaaacacctgaagggtacaaagtcatgtacacccccatggctcctggtaactacctgatcagtgtcaaatacggtgggcccaaccacatcgtgggcagtcccttcaaggccaaggtgacaggtaacgaacaaccaccttcggagttactctcccttcctggggagctggttgtgtcagatcaatcatagtggaaactatggatggttttagatgtgttaaagctactttgaactttgaatgtcagtaaatagtatgagatgtcagagggcagtgtttgaaacttacaaaagtccacagagtggagccgtgcagaagttgagaaagcatgttaggatgttaggtggttttctatctctaacaggaaagaatacatattgaaatcttacgtatttgtttagatcagggcctgaaaaatcccctgatttctaattttcacttgaaaaataatcaaaaagttttcctatacttataaaaatgtgtctcctccaaaacactggaaaaaataccaaactatgaaaaccacttcacagccaccacccaaggtaaccaccataaacactgtagtaaatcccttccacacgtcatgattcactgttacataaagaatgtaggttcatcgcaggaaaattagaaaattcagatagaaaaatcatcctttctcatccacagaatcattttttgatatttcattatatgtcgtcccaaacttttacactgcttatacatagactattttatgtcaatagaaagatgtgaattccacaggcacgtctttggtgggtagggggtggggggattgggagggtccttggccttgtcagccaaggccagactcatccatttgcccagaaagccagatcctagttgtatgggggtgggatcctaggggtttagaagacattatgggtgtgagatacaggtgtggtggcttttgtgttggggtgcgcgggctctcctggggttactgtgtagggtactcgcctgtcctctggctgagagacccctcttgatctggccattcatgcctgtccccctccctcctgtatcttaggccagcgtctagttagccctggctcagccaacgagacctcatccatcctggtggagtcagtgaccaggtcgtctacagagacctgctatagcgccattcccaaggcatcctcggacgccagcaaggtgacctctaagggggcagggctctcaaaggcctttgtgggccagaagagttccttcctggtggactgcagcaaagctggctccaacatgctgctgatcggggtccatgggcccaccaccccctgcgaggaggtctccatgaagcatgtaggcaaccagcaatacaacgtcacatacgtcgtcaaggagaggggcgattatgtgctggctgtgaagtggggggaggaacacatccctggcagcccttttcatgtcacagtgccttaaaacagttttctcaaatcctggagagagttcttgtggttgcttttgttgcttgtttgtaattcattttatacaaagccctccagcctgtttgtggggctgaaaccccatccctaaaatattgctgttgtaaaatgccttcagaaataagtcctagactggactcttgagggacatattggagaatcttaagaaatgcaagcttgttcagggggctgagaagatcctgagtacactaggtgcaaaccagaactcttggtggaacagaccagccactgcagcagacagaccaggaacacaatgagactgacatttcaaaaaaacaaaactggctagcctgagctgctggttcactcttcagcatttatgaaacaaggctaggggaagatgggcagagaaaaaggggacacctagtttggttgtcatttggcaaaggagatgacttaaaatccgcttaatctcttccagtgtccgtgttaatgtatttggctattagatcactagcactgctttaccgctcctcatcgccaacacccccatgctctgtggccttcttacacttctcagagggcagagtggcagccgggcaccctacagaaactcagagggcagagtggcagccaggcccacatgtctctcaagtacctgtcccctcgctctggtgattatttcttgcagaatcaccacacgagaccatcccggcagtcatggttttgctttagttttccaagtccgtttcagtcccttccttggtctgaagaaattctgcagtggcgagcagtttcccacttgccaaagatcccttttaaccaacactagcccttgtttttaacacacgctccagcccttcatcagcctgggcagtcttaccaaaatgtttaaagtgatctcagaggggcccatggattaacgccctcatcccaaggtccgtcccatgacataacactccacacccgccccagccaacttcatgggtcactttttctggaaaataatgatctgtacagacaggacagaatgaaactcctgcggctctttggccggaaagttgggaatggttgggggagagaagggcagcagcttattggtggtcttttcaccattggcagaaacagtgagagctgtgtggtgcagaaatccagaaatgaggtgtagggaattttgcctgccttcctgcagacctgagctggctttggaatgaggttaaagtgtcagggacgttgcctgggcccaaatgtgtagtgtggtctgggcaggcagacctttaggttttgctgcttagtcctgaggaagtggccactcttgtggcaggtgtagtatctggggcgagtgttgggggtaaaagcccaccctacagaaagtggaacagcccggagcctgatgtgaaaggaccacgggtgttgtaagctgggacacggaagccaaactggaatcaaacgccgactgtaaattgtatcttataacttattaaataaaacatttgctccgtaaaaaaaaaaaaaaaaaaa

SEQ ID NO: 24675 - DNA, 6604 bp, Homo Sapiens
gttttccacactcagtgcactctcattatatatggaatgtaaaatttacttttcctaaatataatttttttcctttattaaggcatcaatccagtctttggcagaggatacattgggctgtatttattggcaatattattatctacttaagcaaagagaaaagaaatcagagccatttaatgaggttcaaagacaaggaagtccctggagttccctttggtctctgccttttcaaattgcagttgaaactattattccgggtaaagagaaacagaacccaggattccctttgaagaagggaaaccttgtgcttcttgcctcttgaggacatctaccagcctctctcatgcagaaggaaggagcacccctgtgcccaatcagatgttaagttcgtcccctgcatatttggcagagtttgcttctttttgtttgggagacatagctagcctaactaatcatcagtctggggccaagagtcaggcttccccatatcacacacccctacaagcctgcttccttgcaaagaagtgtgccctgaggttcagtttattctggctggctcacactccacagtgccccagcatgttaagaaagagagagaatagagcatcaggacatgggaaaattatgacatcagactctgggaaagtgaccgaaagcctccacagccacataagttagttcatatttttgtaaagcttaccactgctttcataccctcacattagttcacttgagctgccaagatcccaagtagattaggcaatatccatttccatttatgacaaaaactgtctgcattcacttttgcctgctaggagattggtatatttcatacaaagtgatggctttttttttaactttaattttaggttcgagggtacatctgcaggtttgttatataggtaaacttgtgtgatggaagtttgtcatacagattatttcatcacccaggtattaagcccaatacccaatagttgtcttttctgttcctctctctcctcccaccttccatcctcaagtagtccccagtgtttgttattcctttctttatgctcatgagttcttatcatttagctcccacttgtaagtgagaacaaatggtatttgggtttcttttcctgcatcggtttgctaaggataatagccttcggctccatccatcttcccaaatgacatgatcttattcttttttatggctgtgtagtattccatggtgtatatgtatggcattttctttatcctgtctgtcattgatgggcatttagtttgattccatgtctttgctagtgtgaatagtactgcaatgaacattcacatgtatgtgtctttatggtagaattatttctattcctctgggaatatacccagcaatggtatatataccattcagtctgtcagttgaggctaaaatcatctcacgaccctactagggcttacacatctgcttccaagctcatctgcgtgattggtatatacagagaggaatagaaatcattctaccataaagacacatgcacgtgaatgttcattgcagcgctgttcacactggcaaggacatggagtcaacctaaatgtccatcaatgattgacagatcgaataaagaaaatgtggtacatatataccatggaatacccagtaatggtatatacccagcggaataggtatattcttatacctggggataagagtggtatcctattcttgggataccaaatagataacctgggttatctattcctggaatcctaggaataggatacagaaatagaataggatacaggtaacctgggtcgaatggtagttctgcttttagctctttgaggaattgccacactgctttccacaatggttgaactaatttacattctcaccgtgtatgtgtcccttttctccacaaccttgccagcatctgttattttttgactttttaataatagccgttttgactggtgtgagatggtgtctcattgcggttttgtgactttttgttgaggaaataccttagtgaggtgaggctgagaaagaaaaagcccgctaggcatagcctaagtagcaggggtgagttgagaaagcacgaaattgtttgtattatcttggagaaatctggaagcctggaaattggaaacacttggcatacacccttttaatagatggggtagctgagctcagagaagttaaataatctgcctaaaatattttagaaatttgagtaagaacattaggccttggtccaaatcttctttctgctttgggttgttctctgccccttccttccttccttccttcgttccttccttccttcattccttcattccttcctttgttcctttgttccttccttccttctttctttttcttcctttcttttcttttcttttctttttcaagatggagtctcaatatattgtccaggctggattcaaactcctgggctcaagtgatcctcctgccccagcctcctgaagtagctggaactacagacatgcaccaccatgcctggtttctgtcctgcttatttgttttacaggtggtcaccttttgtctcttccttcctaggctctgaccacttctgtttgggctatggcctcactttattgaagtgcaaaataaacagaacaatatggtgggttcctaaatgacaatttactaaactaccgtgaacaccttattctcaaaggaagagctagcgctcatcacgaaagtgtggaattggggtgaggggagcaagggaagcactggattgggaagcaggagacttgagatcttacttggtctctgccccatctcattgtttgatcctgggcgagtcacttctcctctgtagatctcagtctccctttggggaaggtgaagaggtcaaatgagttaatgtctaatgtcctgtgaaaaatctttcatcattcctcctagtatctgtagctcttggggtgatcactcatcccagtttgcttgagactcagaggagttctcatgatacagactttctgttttaaaactgggacagttccgggcaaactgggatgagttggacaccctggtgaacctaatcctcccagaaccatttggatgggtgtggagccagtctccaagaggatgccctatgatcctcactgcctgctattaaagtagtcccacattgtaccaaggttggttgggatgaccaatagcatatggcagaagcaatggtattggttatagtgtcttccatctgtcatgagctctgctgtcttagtcaatctctctctgtctctctgattactcactctgtgaaaagctagctgccatgctgtgagcagccttgtgtagaggcccatgtggtgaggaactgaagtctctggccaacaatcagaaaggaactgaggcttgccaataatcatgcagatgagcttggaagcagatccgtcagccccaggagagtcctgagatgattttgccatcaattgaaagattgacttcaatctcatgagaaccctgagcctgaacctccagctaaaccacttccagattcctagacctcagaaactgagagataataaatgtttgctattttaagctgctaagttttagggtagtttattagataaaatagataatgaacagataagtagttatgagaaaattctcagaaaaaaaaccaaacagaattccaatgctcttatatggacaggatagggacttatttccctggctatagtcaatggtttgggataagcatctgatctagcactggtccaatcagaatgaacttggatatactggtacacaaattctcttttctatttggcttttggtgctaagttgtgagccataagaacagagcctggaactgtccaggatgcggggaggtgtggaggtgaggggttagaggaggacagtggaggtgagcatgtgaaagcaaagcgagcatggattctagtcatgtgtgagtcccaggtcagattgcacctgaagtagacccttggcctgttcagctatttatcccatcgactccctgttgttttattttaacaagttgagtttgattttctgtccctaaggatgtctgtctgattcagtgagtatttccattttataggtgaggaaactgaagttcagagcagtgaagtaactatcccagggttatgtagcaaacaggtgtcagggtcagaattggttccaggccttcctgacagagcacctgctgtttttatgaagccattctggccgatgaattagcttctgagaactctggtttctaggagcttgaaattcctggaaagattaaatagatcagaatgaaaaaaaactatgaggcgggtaaagttcattcaaaatgaatcagtagctccttttgggttctggctgccatccttggcagaggaaatgaccaggccccagagagcctgtgcatgagcatgttttcagttttcagtggaggtctgagagcagagccacagcatctgtagcaggttttaaaaaaaaatttttctggcattggctctggagcaagaggaaagcaacttacaaagggtatatgagtttctataggccagtgttctaatatgagaaaagtttatgtcttgcttataaaagccccctgcagatgtttctggtgggacagctcttctgggccagcttccatataagcactgactcagaggttcaggctttttccaacctgtagttcagccaccttcaacacttggcctccaagttactatggagggagaaacatgagtatagaggaggcacctttatttctaactgctctggactgaaagtgatgcatcatgacggttcactttgcattggtgagaacttgtcatatgggttcatttagatgtgagttgggagatgcagcttagccacatgcccataaagaaggaatgggcttggtgagcatccgccaaggttgtgccgtttatacccagcagaggtgggtggctagagcaaaaatccagaccttgtttctcttgccacgttgtttttcctggtagagggtcacatcaatccataggaaaggaaacctgcttcttctcacaaagggataacttttgttttcctcatgagtcaacttgaaggataactttaaaaagttggtccatgcagcagagtgagactccgtctcaaaaaaaaaaaaaaaaaaaagtgcatgcagaagactatctttttccaatttgtataagggaactatgtaagttcactgtagctctgggtatcctcaacccacagatctggcaggcagcttgcagcccatcttcagaggagggccaagtgtccattcagactcgggtatttccacactagctgtctttgagttccatcaagtagatagagaacttctgatccaagggattttatagagattacaacccttttcaagctttatagaatgtctgaactaggattggttttagagattacgtccttctccttcctaattttgcaattgaagaaacagtgcacatcatgtgtttgctgttattgttgttattgctgttattattactgcttccatatgagaagcatatgcgggtcaagtctcagatctgtattctaagggcaaatcgagaggcccatttttctctgtccctactattttggtacccagtggattatgagatagaaatcttggtgctgccgatacaagcgcatcttcagagtactcccgatgtctacctgaatctgaggattactatcttttatcggttctgaaaaattcttagatattatatttttgtatacttcctatcctcattctctctttccgtagagtagctgctctttctggaaccccagttacatatatgttagaccttttcactctctcttccatggctgccaacctgtctttcatattttcatatcttctatttctgtatatttgtatgtacttttctgcataatttctgccttctgtcttctaattgacccatttatttttcttcagctgtgtctattctgctgctcaaactatagatgaatttaaaaccttaattcaccctttttttacttcatttttttttcttttcttcataactacttactccttgtttataatctcttggttcatttatcatattttggcatccacttttatttatcaaacacatttgctttatgttatgtaaatgatggatctgattctgctattggtgatttctgctgccttttactcatgatggcacatttctagcgtgttttatgatttatcattgggaaaatcttggggccttagccacagaacagttttgaagcttggttctaacacatgttcatcaagagacaacatgaatttccttttaccagatgtataagagcactactaacttttggcccagcgtggtggctcatgcctgtaatcccagcactttgggaggccgaggagggcagagatcacttgtggccaggagctggtgtgcagcctggccaacatggtgaaacctcatttctactaagggtacagaaattagctgggtgtgatggcacacatctatggtcccagcttctcgggaggctggggcaggagaatcacttgaacccaggaggcagaggttggtccacagcactccattctgggtggcagagtgagactctgtctcaaaaaaaaaaaaaaaaaaa

SEQ ID NO: 24676 - DNA, 6918 bp, Homo Sapiens
cagtgagctgagattgcgccactgcactccagcctatgtgacagagcgagcctctgtctcaaaaaaaaagaaaaaaaaagggaagataggtcacatttatgctgtagtttctatcctggggctaatctgatacccagtttgaaactttgaagtgtttattattttagatgtataagctggtaggctgggcactagagctaaacagccacttctagagccttttaatggtccaagccaaagactgttgagagaactgtattttctttgctgatgctcttttcttctctggattttatgtactgttcgtttattcctctgccctgtctctggagctactgcatactggtatagcttagtccattatagaaaaatcaagaacaatgtacatttttggtgaaaagatttttgtgagtatatgttaagagttgcgtatttagtcatgttttctgttgaatgcaaccaatgtacaatattgacagctttcacctggctttctggagtaaacagtgaatttattggtgttctagaatcattaaattcgctagagaatttgctagtgaatttggattgctttctgaacatttttctgttcttctgtagtgctccctctgagcattgtagaagtgttccagcacccctatgaagaccacattcattttgtcagggagcctttagtccactatcttgaatcatacatgaaggatctagtgatacacttttttaaagatttgtattaccaacttctctgctcatactgcattagtactagcaggtgcattggatatttattgactccaaaacttgaatgtattttgtaagtaagtccttttaaatttaaattatacgctaaattctagaagtctccgttatctggaatgtgaaaggctttttgtttttagggaaaatggagctgatagtatcctggatcttggattagtagactcctcagaaaaggtacaggtaaggaacattttattcatgtgctgataatcacagaatttaaattacaaggaaatttcaataaaggggatgaaagcaggatttctgaagaaactgtctttataaataaaatgaatgtttacagtagagagacagaagcaaagataaatatatcggtattatgcatagaatcaaataataagcttggcttaattagggctcagtataaccccacccattggttggcatccatttgagcacagcttgaattaagctttactttgaataagtaacaaattgaagaacagagagggaaagatgtatagaatcctaggactaattcaccaggtgtggtggctcacgcctgtaatcccagccctttgggagaccgaggtgggcagatcacgagatcaggagttctaggactcctgggactcattcttcaaagaagtagctggtgccaacattgcaaaaacaagtgacatatcatgctatagcataaggaagcctttttagttggcattgaaacaattgcacatagaaggtgagacttccaatttgaacctaagtaggttgattgcctactaaattcatattaatttactaagactcagagttttcacaactaattcacaatgcccaggatacactctaaaattactcagcctacaaagaaccaggaaaaactggatccacctctctcaggaaaagaaccaatagatggcaaccacgagatggcccacttgttggaattatcaaagactatcccatgttctgcaagataatggtgaacactggtgaatggaaagacagaggttctcagcagacacacacaggaacttcaaaagagaacaaagggaaatttttagaattaaaagggcaatatctaaaagaaaaaaattcacaggatgcatcaatagctgaatgaaggtgttggaggaaagtgtcagtcagcttgaagatagatggaaattaccctttctgaagaacagatagagaaaatattttaaaacaaaaggatagtttcagggagacctgtgggacaacttcaaaagatctaacatatatgtcactgaaatactcaggggaagagaagaaattgctatagaaaaaatatttgaagaaataaatcatggctgggcacttcctaaatttggtaaaagacatagatttccagattcaagagtcagtgaactcaacagaataaactgaaagaaaactatgtccagatacattataatcaaacttctgtaaaataaagaaatgttattgaaagcagccaaagaatggttctttacctatagggaaacagtgatttgaaagagtggatttctcactataaagtatgaaagccaaaagtcaacaaactcatcaaagtgatgacagaattctgtatccagtgaaaagaattttcaggcaataaagtgaaagaagcttatccgagtttcattaaatgactttattttaacaacagagacgttaaagacctaataatacacaagctttgtgtgtcacattctgaaagggcaaattaaaagttcatttacctttaatattgttatacacatatatttaaatatttatgttgctcttcctacctgacttcatttgaatgatttgagagaaccatttcatatgttttgttttttcagtgaatcttggggcttactctctgatattctctgttagcaggaaaaccgaaagcgccatggctctagtcgaagtgtagtagatatggatttagatgatacagatgatggtgatgacaatgcccctttgttttaccaacctgggaaaagaggattttatactccaaggcctggcaagaacacagaagcaaggttgaattgtttcagaaacattggcaggattcttggactatgtctgttacagaatgaactatgtcctatcacattgaatagacatgtaattaaagtattgcttggtagaaaagtcaattggcatgattttgctttttttgatcctgtaatgtatgagagtttgcggcaactaatcctcgcgtctcagagttcagatgctgatgctgttttctcagcaatggatttggcatttgcaattgacctgtgtaaagaagaaggtggaggacaggttgaactcattcctaatggtgtaaatataccagtcactccacagaatgtatatgagtatgtgcggaaatacgcagaacacagaatgttggtagttgcagaacagcccttacatgcaatgaggaaaggtctactagatgtgcttccaaaaaattcattagaagatttaacggcagaagattttaggcttttggtaaatggctgcggtgaagtcaatgtgcaaatgctgatcagttttacctctttcaatgatgaatcaggtaggacatttaaaaaaaatgtttaaagaatgaactatatagataggtcagtcagcattttctgagtttctagttcttaaggcctgtttatagggtttgggaaattgctgtattactcaagcattaaaacaattttttacattgtttttaaaggtatgtttgaagtaaatagtattttgatggcttagcattaggctattcttaactcttttactgcttaatttttctaggtttcaaaaaatatgaatacaaacaaaaatttttcatggtgagcaactgtgtaaaaaaggatttgtatatagtggttaagaaaaagtaatccatgtgacaactctctgggcttttctgattcatgttgcttaaactccctaatgaaagaatttgtatgatgattgctctatagagctggacccaaatcacacttctaaaaacacagtagcacacaaacacttcctagattcctagaatctaggaagaataaggagtggtagtgaaagtcctcttgaaagaaaaacttttatctccagtgtttgatttgctgcaattctttcttttgaaagtcctatggtctaggaataggctttttagctgtgactgtacattagaagctccaagaagttctctgtgaaaggattatacctatattccaagattattatgtacacaaaggtactgatttttttcccctttatttttcctattttgcaagcagcttcagccaaattatatattgtaatagtttttgtgctaccttgtaatacagtttttaatactaataagaatttgtctcatttacaaaccaaaaatttaggaaggaaaacagtatccaaataaactgcctaagatcttgccactccaagtatgatcctcagatcagtagcattggcatcatctgaaagcgttttagacaggcagaatctctggtctcccctctctgcattccccacccagtgaatgaatgagaatctgcatttcttgagatcataagaatactgacatacagatgagataaaactcatgtgaatatcagttttaaggctggtggttcatttgttttggtcatattgagtcaggattgactaatgaactgtagaggttttgcattatgcaaatgctcttaatttcttgtattaggaattagacgctcccccccaagtcttaaataatgttttaatctgtatccttttattataagaagattagtaatattctacagataataacaacaactggtatagtatattttatttacattcttcattcttaggagaaaatgctgagaagcttctgcagttcaagcgttggttctggtcaatagtagagaagatgagcatgacagaacgacaagatcttgtttacttttggacatcaagcccatcactgccagccagtgaagaaggattccagcctatgccctcaatcacaataagaccaccagatgaccaacatcttcctactgcaaatacttgcatttctcgactttacgtcccactctattcctctaaacagattctcaaacagaaattgttactcgccattaagaccaagaattttggttttgtgtagagtataaaaagtgtgtattgctgtgtaatattactagcaaattttgtagatttttttccatttgtctataaaagtttatggaagttaatgctgtcatacccccctggtggtaccttaaagagataaaatgcagacattccttgctgagtttatagcttaaaggcctaaggagcactagcaacatttggctatattggtttgctagtcaccaacttctgggtctaaccccagccaaagatgacagcagaacaacataatttacactgtgatttatctttttgctgagggggaaaaaatgtaaatgttctgaaaattcactgctgcctttgtggaaactgtttcagcaaaggttcttgtatagagggaatagggaatttcaaaataaaaaattaagtatgttctgtgttttcattttaactttttttatggtgtttaatttgtggttggctgcaactgtgtatcatgtatatggaacttgtaaaaaagttctcgacattcagatcttaagagatgaaatcacttttacctataaaaaccacttttattgcggtttgactgcattgagctctaggatattaaatgatatcactaatattttgcatgtaatttgctcatttgagtgagggcactttttttgtacatatgatggggccaatgcacaatacttttatcacaatcaactttttctttgtatccctatttcaatgagcagtcagtctcaagaggttactgcacttcagttctaactagacatttgtactaaggtatttcagttatgtaaactcagcctgggcactttctgataactgtaaaatgttttataagatcatgattattgaagatacattttggaaaattttaaatgttcgtgagcagcttaactacttttgtatctagccttttttaagtatcttgttacatttacttttttaaataaagaaattacagaagaaatgtcaagtaatattgaagaaacaatagtttttatttatgtagttgtacatttttaaactaagggcaatacactgacatggttatgtgcataaaaattttgacttaaagaactggaagtttatatacacctggactataagaaacagaagaaaatcagtccacattttacagttagcagagaatcctaaatggcactggcctggccaccttttcattttacaaatgggggaagtgaagtgtgaccccttacttggcataggaagttaacttacacctaataactgacaggtttttgttttgatgacctattaattatgtagcctaggattaatatcccaaaattactctggtttaagtagctttattcagtggcataataacactgttttcttccttaagccttcaatgaagtgacttaaaacagtcactttacatattaaaaacgaggagagcaattctctggaatctctcttttcagttcctttgtaggatttctggccttgaggatagtcttcatgttcaaaggcactatgcttttattatataacttccttcagaagactgaaccacatgatattctcagccctgttaacactaaaaatatttaaaactgaatgatagtagtgactcattgtattacttaaaacttatataacacgctgtattagatgtgtgtaaattagccaaaggttattttacaaagtgagacattggtttttatgtctaaatgctatttctgaataaatgaaatagtaattagatcaagagctgattagcatcaatgtgtttgaaagatataaaatttatacatcaccttaacctctgtatgcacatgatgggattgataaaatattaaatgagaacaaactagatatgattaggacatttgaaaccctaattgtgaatttatttttaatagttactgaaatgaaaatatttaaaataatgcacaatgtcttaagtcttcctaaatcaagattttggttaaaaaatacttctaataatagtaaaagattttttttttaagtaaatcataaaacggttctaaatgtaaaataaagacatgtaaaataaaaaaaaaaaaaaaaaaa

SEQ ID NO: 24677 - DNA, 7180 bp, Homo Sapiens
gaacattcacatgtacatacttcacctgattccagtgctcagtttgaaaaggaaatttaaatttctattatgcagtttgttgaccatggctaatcctccattttaacaaagaaaaaagtttccagcagaaagaatcagagactttaatcttgaactcacagcgttcttctctccctttttccccttccaggaagacaactgttagttttgtggcttactgctgctccacccagtgtctgcagacttttgacctgctgagttgataaacactcaagaacctcaggagcgctgccagcttgacactggggaatccagccagtccagcacactcttccatcctgtcctgtccaatgcgggggcactgcagaactctctagaaatgtcatgattgagcttcagagctaaaatgccttcacccttcccccaagttggaatatatcctcccccaaattaaggacccatttgtcttctgtgtttttcctttttatgtgagtgtgtcttttacagaaaccatttagattgatgggcctccccaaatctaatttaaagcaagtttccggtccttggagaacagtgacttgatcatctagccagattcccttttgaacacacataccttcagtgatgcttcctctcctctcccttgccttccccagagagttatttccctgagaccatgttctccacagtgtctccagtggaaacttgtcagtttttgaggagtttcagcaaaccccgtggcctcaatggtcttgagtagcagggtggggcgcctgagttggcagcaaagtgaggctcccatggaggctcagtgagggtcccagagcacacaccctctggaaagttccagccttgtttatacgttctacagtgtagcaacagacttttgtgagggattttaaaaacaaaaatgtagattgtaatgaaatacacttcctgttttttaaaagtgtttgcagaaaaatgatttttgaagtttttaaatttcctgataagattttttttatatgagaagaatttgaggaatatttgaagctttacaagatctgattttttttctttctcaatataaagtttccatacaatgagaaagggggagaaaacacacattgaaataagacctccgtgttcttttttgatgggtttatgattcagtttatactgactttgaaatatttttgtcacatgtgaaaggcttcagctacttccactactggttttttttttgttgttgttgagacggagtctcgctctgtcgcccaggctggagtgcagtggcgggatctcggctcactgcaagctccgcctcccgggttcacgccattctcctgcctcagcctcccgagtagctgggactacaggcgcccgccaccacgcccggctaattttttgtatttttagtagagacggggtttcaccgtgttagccgggatggtctcgatctcctgacctcgtgatccgcccgcctcggcctcccaaagtgctgggattacaggcgtgagccaccgcgcccggcccactactggtttttaacaggatgattcaaagtacagcccgtgcacatttacttcgtcacctggtgcaccacactgtcttcatgttggccctcgtttcttgtatacttagcttactgcccagatgcaactgagaaaatacaggaaaagcaggtccaaattcagccttcgacttctgcaaaagtccataaacagaaagtctgtgagcctccaccctgccagaaagaactcttcatgaagaagtcacgtatttgctcttcctttcaaaggatggcattttaatgttgctttgctgccagatgttcatctgcttgctgtgaagtgattctttttttaaaatgttttttaatgatgtaagttttctaaaaggcagggctgaatggagaaccaagaatttgcttggtagaaaaattattttttttttaatttcagacctatcaaaaatttggttgagggaatttttattagctgccctgactttataatgctacgctcttaacagtgccaaaaatcctacatagttactgacaaatgtgtgatctttttacagtcacaacacctgctgcccggaaagcacaccgtccacgtagaatggagaaggcagaaagttaccgtgtgttcccactgtatctgcactgttcttacttcctcttgtcccttttcatatcttggtctattcagccttaacatttcaaaggcttatagtaaaataggaactgaagatctgtatcaaaatgtaacactttcatcctttggaataattgaagtttaacataacctctacatgtatataagatagctggtgaaaatgtggcatgaaacttcacaattgtgcttcaggcctaagtgactgctacctatgatttaagtgacagtaaatgtcttgctacatttttctatttcatcctctacaatcatatgtcatggaatggagctatgaaatgtgctaacttggtattcaggattctcattgtgataaggtgatacattagttttaccttgtttgaaattttacaaaaatgcttacaatccaggcattctttctctacctattatgaactacggtgtgttaaacaacagcagtgggctgggcagacaacctttgggcagtctcaaccttaatccttgggtacagcacctgaacttaattgatgagaagtggaacttaagtggtttccctggtgctgttcattatggaaattttatgctggatttatcgatgtcattcttaatcttttgatactataaaggagtcttaccaactggagaaaatttgcctacatgctatatatttgaattgtgtccaaagctttgcagaaaagcaaatctgaagttattatatatgttgttttcttgagcaacagttacactaggtagaaaagtattcacacaataatagtaatgcaaaaaaagtgagctacttggaaagtatcatctctgttcaggtaagtttacttcagtgaactcttgtgtggttagcgataagttttaaagtccaggatagcctcatgagcataggccttcctatgaagtagtgcaaagggggccgattttagtggattaccctatcagtgttcttcagtatgtccaattgttatcataccaaaaaccttaattacataacattgtgtggatgaaatgctgcatcttcagttaatacatgttttgagcacattcttaaaatacataataattaaatgatccctattcaaaagaaccctggcttgggtggaggatccactctggctaacggataagagtgatgaacttctttgttacctgacccttctcttctggaaaagtgaggtgtacattaaacatcttttggtcaccgtgcctcactaagacctttcacattccagcttgtccgactagtgtaatgtacctctcacttctgttttacgttgagcattacgaattaaaatctttacagtctagggggaaaaaaaggcttcaataccagttggcttatgaggctctgcatataattttctctaaaatatgtaactattttgtagtctgtggggactttcaaagccaatttttaaaattggtagtagtaaaggtttttccctttcctgaatgaaaaatcagaaattctaatctttgctataaagtacttaaacacaatacattgcctcagcataaataaaaacatttttattaagatgatttatgaacatggatttctaactggaccaacactaatgttgcaacctgataaaatttgagatgtaaattcatttcacagactcataaacacactctctttaagactcttctttaaatggatccttacattaccctgcctgttttattatgccttcatttttgtggttttcattcactcctgcttgcttctattgaggttctcctacatttcccagaaactcagtgaatatcttgccttttcttcaaacaaagggggtttttataaagtttgtatttttgaaactagctctatgtctatctaaaaatcaagtctcggcagtggctcatgcctataatcccagcactttgggaggccgaggagggcagatcatctgaggtcaggagtttgagaccagcctggccagcatggtgaaaccccatctctactaaaaatacaaaaaattagccaggcgtggtggcgcgcacctgcagtcccagctactcgggaggctgaggcaggagaattgcttgaacccggcaggaagaggttgcattgagctgagatcacgccattacactccagcctgggcaacagagcgagactccgtctcaaaaaaaaatcattcaagtttcactgtgcctacagtgaggagctacctccttgtgtcatcagctaatagatctgaaagtgatgccggtgtctctaggaaaggaattgatcatagccaagtgactgacattctctcggtcaggaaaagagcttgcttcacagcctttgaagtatgactgtatgtgtggtccccttgtactttggagacagaaggtactggcagcgagtgtggtggatgggcagaaggtgtagcattcggagattatttctgtatgtaattaagagactttcaagggttagccagacttttttccactcaagtgtggattatctttgctacctgtgttaaagaatatcaggttttgtttcttattgtgatttttgagtctaaatgatccaagatttttaaaatagatacataatgaaatccaggcctctgaaaaattatggcaacattcatttggagtgtggctaaaaactcatactttatccaatttggttgcctctctcagttactgcagtttatagaataattgagcttgaaccatgtgaatgctcagaatgtcaatggtggagtatttattcaagagaaatggctgaatctcgatacgaacaacgagttttgtggtgttttaacttgccctattcctatctcccccttccgtctctgttgtatccttgaaaaccaacagtatacaatgaaggtgaaaagtagcagcctggaagccactagagggggcagaatggggttagaactccttcaaagcctcattcccagagaattgtcattatttgacctggcaggcaggtccctggaagacctcatttgcaagactgtctttattttaccggattggagcttgccaggtgtgaaaagcctttttcccagggacattagtcaagagagactcagaggcaattggttaattttgtggttgcctcaagtggtggctaagctttggagcagacaataggctaaccaaaaacgtaaaaggaaaagcttgggaatgagatgtccatagggaccttgaaaagctctggtattcttgggaattcagatggtcatgtgtatgtgtagagctttgcatatgccaagggttatactcctgctcaggaaagacttaagaacatcttgagctgtcaccatcggttgaccctgacacacaagcagaaagtgaggccaaaggcagcttccttcccgtcgtcttcctggctcagtgttgaaggggtgctccaacatgcacccagagcccttagcacagacttggagatgtagcacagtaagaaaactcccttagcggcatttagggaaatttctgtccaatcattagctgaccactaaacaaccctagcagagacttcagtatccacgcactataaagaatatagactttactgaattagttcagaatagtcactaaacaagccaaaaacccagcaagtacatcaaacccttagcaaggaaataaaaagctaggtatgatttccagagttgccacattgttctttgaaatgtccagttttccacagaaaaattatgagacacataaagaagaaagtatgttccatacatgggaggaataaaaaatagacacctgaggaagtctagacattggatttttagatgaagactttaaattggctattttaaataggttcagagaactaaagaaaaataatgtgtaaagaactaaaagtatgaaaatgtctcactaaatagaaaatgaaaaattatttttaaaagaaccaaatataaatcatgaagttgaaaatacaataactgaaatgaaaaattcatgagaggaactctatctagtctgagaaacagaaaaaagaataaagaaaaatgaatagagcctcagagagctgtggcacaccatcatgcataccaatatatgcataattggagtcccagacgagaggagagaaagaggtagaatattttaaaaaaaaataatggccaaagactgaaatttgatgaaaagcattgatttacatacccaagaagctcaatgaaccttaagtagtataaactcaagagatccgtgcctggatacaaaatcacactgtgtaccaaagcatcttggaagcaaagagagaagtgactcgtgtactagggatcttcatcagaaactatggagtgtagaaaacagtgggatgatgtattccaagtgctgaaagtgaatgactatcaaataagcattctatttccagcaaaactatccttcagaaatgattaggacatgcccagataaacaaaaacagaatttattagcaaggctgctctacaagaaaaacagagaacttaaaggctgaaacgaaaagataatagtaactcaaatgcacatgaagaaatagcactggtaaaggtagttatattggtaaatataaaaggcagtacaaatgcatttttggtaactttcctcctatctgatttgaggcaactgcataaaacaataattaaaaatctgggcataaggtgaaaaaacaatttgtatgacaacattacaaaggaaggaggagggaagagacttaggaagaaaatttttctatactgttgaagttagcattattccaaactaggttgttataaattgaaatgttaataatccgcaggaaaaacactaagaacatagctagagaatatatagtaaaagctacaacaaagaaaatggtacactagaaaatagctgctaacaaaagaagatatggaagtaacagaggaataaaggaacaaaaaagacaaaagacatagaaagcaaaaaatctggtcacagtggctcatgcctataatcccagcactttgggaggctgaagcaggaggattgcttgagcctggggagttcaaggccagcatggacaacatagtggggccttgtctctatcaaaaaaaaaaaaaaaaaaa

SEQ ID NO: 24678 - DNA, 5110 bp, Homo Sapiens
aagaaaatgtcaggggaaaatgtcaggatgctccagaccctattaaaagatgcatatatcaagttagttgcatgctctgtgcagagagcatgttgtatcattgtatgtcagactcagagggagatttttctgatccctgttcgtgtgacactagcgacgacaagttctgcttgcgatggttagccctggtagctttgtctttcattgtaccatgtatgtgctgctacgtccctttgagaatgtgccatcgctgtggtgaggcatgtggttgctgtggtgggaaacataaagctgctggatgaaatggtccagtgccaaaatgagcttaaaatctttgtttccaggaattagctaacttggatttgtggaagcttttggcaagcaatatggaatcttgcctggtatcattgagcccacacatggaggaagcagaactcatcagttcttggcgtttcacgccatgcctaacttttcccttgagtgcatggcatgttttgttacaggttgtagagtatttgcagaaggaaaccatttctggttatttggctataaaaagtcagcataaaatatgatccaactaaaagggattaatttttggcatttttgtatatttatgcattaggtgatgggacttttaaaggtttgaatttattaggacacgaactaaaaataaaagtgcactaggggacagttgatttcaatctaagaaaagttaacacttgggaattacaagaagtaaaacaagtgcaactaaatcatttattagttgttttttgaaagcagttttatgtataaataacaaatgtttatatttaactaaatgtaaggtacgaattattacatattaaacttttcttccccttcctagttctgaagtagatatatatatatatatatctactgtcacattccatatattttgaatatttaactcatctagttaataatgtttttattccatgcgaatgatttgatattttcatccttatttctctttggctacaatttatattgagttatatctgtacattctggtaatctaaaatccttaaaaatactctaatagccttgagtgaccaactttttttttaaagcacagatgtaattgtctaatgttctgatgggaacgtaacacttatttttatataaaaagagactgagtaaacaaacattatagaaaaaaagtgaagttttttagttgttttttgtggtattcaaccagcaagttgttttctttcagagtttcctccttcaaaaagttatattgcatttacaaatgttttacaaggcagaaagtttgactggatagttagtgtaaaagcttcatgttgagatcttcacgtatcattctgctaaaccagaatatgttcagctgtgttactaatttttcagcttaatcctcagtgcttattatttacataacaataactttttatcagttacattttatttttatttaaactggccaaaagcaaaattattttatgttaaaatgtgtgctaaactatcccaggaaagtacttaatccaacattgtaaatgaagtatcttgtacatataaatttatttcttttgcagagcattatattactggatgtttaatttacaaaatagttgggtaaatgttccaacaaactttaaagtaccttgaagtcaaattgtctgtttttgttttgttgttgttgttgttgttttcttaagtgttacattaaaactctaaccaaggaaagggttctttaagaacattcccttagaggggtaaagttgagaagtgtgccttttttttaatggcttgaagtttcagaggtgataaaaattaaaatcacactactatttgaagctctttttctatgcaggtttttaaacgtcatttatgtatcattctttttatatatcacacttaagcttgtgttagcttttttcttttgccccagatcaaactgaacaatgtatataacactatctgtctgtaaaatactttttttaagaaagcatttatatttatatgacagcttgaactgacaacattgtgtatatagatcatcttgaggcattatttcacattgaaaagaagaaaatatattgataactatagatgttatgaagaagagggtatttctagttttgtactaaaaatcaattggatgaactaaatccaaaacatgacactgtaggcagcagttttaagtcttatttttactgtttatatatttgaatgctgctacaacagatgatcttcatccctgaagttttcagctaaacttggtttcctagaatagactgttaactttcaaaatttttattggtgaaatggaaatactgtttttccttgtgaatgaattttcatatttgtaagtgctaagtttataattcaggtttgatcaaggtgtgaataactgaagaaaataacttgctggctatataggaaaatgctgtggaaatgaactgtgtatatacttctgggaggaacaaatttaatcatttcttctgttaagcactaatcagtatagtgcaactcctggttctgtactgtattttatatgcaacatatatgctttaatattttaatgtttgtgcattaatattttcaatttgtttaaccactttgctgctaagattttgccgtcccattcccattttttcctttacaattttaaacaagtttcttcattaaaaactatggtgatgaaatggtttttattttaccttggatctttatagttaacatacccagtttcttaatcagtctacaagactaactgatgatataatgttctctgaatccctatatggaaattttcttttgagtaaatgagaattcctttgtgaaagcaaatgggtagtttaaatcactgattcttaaacatgtgtataggcaccttcaggaacattttctcattctctgtacagattcggcactgccaattggcttttcctctaaaacttttctttgtttttatctgatataagcagatggctcaagacaactgcttgagtaatagtattgaaaatggaatcatctagacggcatgacaagcaagactggtctgatgaacttgttcagaattgataattcttaaatatttctcttggcttcaaaagggacatcatttgatttctgaagaagtatgtcatgtggagcttcagcaccacctactggatgatttccaggccagagacatgagatggcaatagggatctgacagggttcatcactactaccattaaagggctatttatgtggtgaccacctctaccagggaaaccaggaataagaactgtctcaaaggaattgtaaaatggttatttacctaatgtgtcttgttggcttgctgaaagattttaagcacttttttcttacatatcctgttttaaaatatttgttgatatttgggactggcaatcaaacttaatggatgtactgaggcatttatagaaccagttgctttaactctcaaaagccattaccaaaatggtatttttttcctccttccgccagtcagggagaatttttaaaaataataatcaaaacatgaaaaaacataatcacacctgtattttatcatgacagcttcagagagtgtgtgtgtacgtttttctctcttttatttgagacggagtttcactcttgttgcccaggctggagtgcaatggtgcgatctcagctcactgcaacctccgcctcctgggttcaagcgattctcctgcctcagcctcccaagtagctgggattacaggcacccaccaccatgcccagctaagttttggtattttagtagagatggggtttcaccatgttggccaggctggtcttgaactcctgaccttaggtgatccacccacctcggcctcccaaagtgctgggattacaggcatgagctactgcgcccagccgtgtgtatgtttctgaaatgatgatggggtggggttaaaatctaaagggaaaaacttgaaactacctattttcattggttattcagcagtgcctaaaatgagcttttgaagtaatgtaaatgcgctttcaattcatgtgtatagtgccatctgatatcttgggtaagtcttgctttttcttttctttttcctctcccctgcccccttaattaaatggcacggaaatgtttcttaatatacacgtgagtctccagagtacaggaaatgtgctttcctctaaatggtcaatgtaaagaatcttaaggatattccttgtgttgaaatttacattcgattttgtgattacacttggaaatatgtgttaaattgggtttttaattgtagcctaaaggtgcattaagcaagtgtaacattttttccacataaaacttagaaaactttagttacctgaaaagcaaggattctttactaattattatgctcattcttgatttgacttccatgttcacacttcaaagtgtaagaggaagcactagaaactggcattattgttgcactaaaaaagtctataaatcataatagcaccatgaggtgttttgcaatgagacaaacatgaagaatgaatttctttaagagagaaacacaaccggaggtgatttatataaaccaaaagaaaaaaaaaggctttaaggtattaggtactgtttgcctagcagccaggtggttataaaagattcatatgctttggtacactgataaatgttagccattattcctgaaagcttcttaaattgcatcagttgttttgaaattttttcaagaataaactagttgaaaagtctttgtattaaaaatacacatagatttttgtgaacatttccagtgtgtagtgtcgtttgctttctatttctgacctcaaaagtgcctcacttgtatattatttccattaaaagcttgactgcattctttctaatgaacaatgaaaaactgtttaactcatgtcataatgtgtctcctcagatatagttaactagcttgatagttttgagtatataatgtaaataatacataataagtttgtaaccatttctgttacttcatacccgtgtaattggacatagcagatgattatcataagaatttgttttaatggtttttttccctcctggaattacctgattaaacctgtcatgaattataaaaaaaaaaaaaaaaaa

SEQ ID NO: 24679 - DNA, 5036 bp, Homo Sapiens
gaacaggcacagggcctgcagctgcagcattcagtgcatcccagaccctccagaggcccagggcagggtcagatcagacagacctggcagcacagacgtgaagtgtaaacggcacacagccccctggacttgggttgattcttgtatcttgctgctcaccagctatgtgacttgagccaagttctttaacctcttcaggacctcagtctcttaatctgcaaactggaggtattagtgcttatctcatgtacctgttatgagagtcatatgaaaaaagacattcagagtcttcaaagagtcctgagcaatggtaggtgctcagtaagtgtttgtgcatttccttgacacttgtagctaaaaacttacctggaatcagacttccactcaggagtcagaccaggctcaagaaggcaacacagtctggcccctttttgtttccatctttggttctaggccaaggctggacttgcctcatggccctggcatctgagagagaaactggataggttcctcatgctcaggatggaggaaacagcagtggcttgcattgttgattgcaggggtgatgtctaatctcctgaagaaaggaactctggagtcacagagattgattcatacaatcaacacacactgggcacccatcccgtactacaggcacaagaggcaagacaggtctctagttagagacgttttcccacggtgtggtcagaactgtgacagtaggaagcatgagtactgcaagagcataaagccagccccttagtcagccaggtggggaggttttggagaagacttctgcaggtggtgactgaacttaaagttgagcgttgaagaacaagtaggagttgtctggaagacaatgaggaggagacatcagaaggggtggcatgtcacggtaacctcaacccaaaaggtttgtgtgcagcgggtaagtggggtggtgacaagagaagccaggtgaaggggccgggccaggtcacagaaggtcttacctgcacagctgaggagctcagacccaggcttcttaactccactgcctcctcctgggcaacactgccaggctgttgggaaaggagaaacactcctgcctccagggtggggaagttggcaaacaccaaagcaatatccccacccagaagatcctgggcagcagaacaccccagcctgcctggatgtgtcaggtctgctgcctttcacctctagggtcctggggagcccatcccagattttagaagctgtacttatttccaccaaccctcacccacctcccacctacactgccagaggaatttctggaaacttatcattttatcttccatttacccagtgagccaaggaggctgggaggaaagaggtaagaaaggttagagaacctacctcacatctctctgggctcagaaggactctgaagataacaataatttcagcccatccactctccttccctcccaaacacacatgtgcatgtacacacacacatacacacacatacaccttcctctccttcactgaagactcacagtcactcactctgtgagcaggtcatagaaaaggacactaaagccttaaggacgggcctggccattacctctgcagctcctttggcttgttgagtcaaaaaacatgggaggggccaggcacggtgactcacacctgtaatcccagcattttgggagaccgaggtgagcagatcacttgaggtcaggagttcgagaccagcctggccaacatggagaaacccccatctctactaaaaatacaaaaattagccaggagtggtggcaggtgcctgtaatcccagctactcaggtggctgagccaggagaatcgcttgaatccaggaggcggaggatgcagtcagctgagtgcaccgctgcactccagcctgggtgacagaatgagactctgtctcaaacaaacaaacacgggaggaggggtagatactgcttctctgcaacctccttaactctgcatcctcttcttccagggctgcccctgatggggcctggcaatgactgagcaggcccagccccagaggacaaggaagagaaggcatattgaggagggcaagaagtgacgcccggtgtagaatgactgccctgggagggtggttccttgggccctggcagggttgctgacccttaccctgcaaaacacaaagagcaggactccagactcttcttgtgaatggtcccctgccctgcagctccaccatgaggcttctcgtggccccactcttgctagcttgggtggctggtgccactgccgctgtgcccgtggtaccctggcgtgttccctgcccccctcagtgtgcctgccagatccggccctggtatacgccccgctcgtcctaccgcgaggctaccactgtggactgcaatgacctattcctgacggcagtccccccggcactccccgcaggcacacagaccctgctcctgcagagcaacagcattgtccgtgtggaccagagtgagctgggctaccaggccaatctcacagagctggacctgtcccagaacagcttttcggatgcccgagactgtgatttccatgccctgccccagctgctgagcctgcacctagaggagaaccagctgacccggctggaggaccacagctttgcagggctggccagcctacaggaactctatctcaaccacaaccagctctaccgcatcgcccccagggccttttctggcctcagcaacttgctgcggctgcacctcaactccaacctcctgagggccattgacagccgctggtttgaaatgctgcccaacttggagatactcatgattggcggcaacaaggtagatgccatcctggacatgaacttccggcccctggccaacctgcgtagcctggtgctagcaggcatgaacctgcgggagatctccgactatgccctggaggggctgcaaagcctggagagcctctccttctatgacaaccagctggcccgggtgcccaggcgggcactggaacaggtgcccgggctcaagttcctagacctcaacaagaacccgctccagcgggtagggccgggggactttgccaacatgctgcaccttaaggagctgggactgaacaacatggaggagctggtctccatcgacaagtttgccctggtgaacctccccgagctgaccaagctggacatcaccaataacccacggctgtccttcatccacccccgcgccttccaccacctgccccagatggagaccctcatgctcaacaacaacgctctcagtgccttgcaccagcagacggtggagtccctgcccaacctgcaggaggtaggtctccacggcaaccccatccgctgtgactgtgtcatccgctgggccaatgccacgggcacccgtgtccgcttcatcgagccgcaatccaccctgtgtgcggagcctccggacctccagcgcctcccggtccgtgaggtgcccttccgggagatgacggaccactgtttgcccctcatctccccacgaagcttccccccaagcctccaggtagccagtggagagagcatggtgctgcattgccgggcactggccgaacccgaacccgagatctactgggtcactccagctgggcttcgactgacacctgcccatgcaggcaggaggtaccgggtgtaccccgaggggaccctggagctgcggagggtgacagcagaagaggcagggctatacacctgtgtggcccagaacctggtgggggctgacactaagacggttagtgtggttgtgggccgtgctctcctccagccaggcagggacgaaggacaggggctggagctccgggtgcaggagacccacccctatcacatcctgctatcttgggtcaccccacccaacacagtgtccaccaacctcacctggtccagtgcctcctccctccggggccagggggccacagctctggcccgcctgcctcggggaacccacagctacaacattacccgcctccttcaggccacggagtactgggcctgcctgcaagtggcctttgctgatgcccacacccagttggcttgtgtatgggccaggaccaaagaggccacttcttgccacagagccttaggggatcgtcctgggctcattgccatcctggctctcgctgtccttctcctggcagctgggctagcggcccaccttggcacaggccaacccaggaagggtgtgggtgggaggcggcctctccctccagcctgggctttctggggctggagtgccccttctgtccgggttgtgtctgctcccctcgtcctgccctggaatccagggaggaagctgcccagatcctcagaaggggagacactgttgccaccattgtctcaaaattcttgaagctcagcctgttctcagcagtagagaaatcactaggactactttttaccaaaagagaagcagtctgggccagatgccctgccaggaaagggacatggacccacgtgcttgaggcctggcagctgggccaagacagatggggctttgtggccctgggggtgcttctgcagccttgaaaaagttgcccttacctcctagggtcacctctgctgccattctgaggaacatctccaaggaacaggagggactttggctagagcctcctgcctccccatcttctctctgcccagaggctcctgggcctggcttggctgtcccctacctgtgtccccgggctgcaccccttcctcttctctttctctgtacagtctcagttgcttgctcttgtgcctcctgggcaagggctgaaggaggccactccatctcacctcggggggctgccctcaatgtgggagtgaccccagccagatctgaaggacatttgggagagggatgcccaggaacgcctcatctcagcagcctgggctcggcattccgaagctgactttctataggcaattttgtacctttgtggagaaatgtgtcacctcccccaacccgattcactcttttctcctgttttgtaaaaaataaaaataaataataacaataaaaaaaaaaaaaaaaaaaaaaaaaaaaaaa

SEQ ID NO: 24680 - DNA, 5961 bp, Homo Sapiens
caaggttcgctgcagcacgcgggatggctctgcccagtctggtgtggattattacccaaagagccgagtcttgaagttcagtcccggtgtggatcatatcttttttaaagttgagatcctgtccaatgaagaccgggaatggcatgaatctttctcactagtccttggcccagatgacccagtggaagcagttcttggggatgtgactactgccacggtgacaattctagaccaggaggcagcagggagcctcatattgccagcaccacccattgtggtcacacttgctgactatgaccatgtggaagaagttaccaaggaaggagtcaagaaatccccctccccaggctacccactggtctgtgtcaccccctgcgaccctcatttccccagatacgctgtcatgaaggagcgctgcagtgaggccggcatcaaccagacatctgtgcagttcagctgggaagtggctgcccccactgatggcaatggggcccggtctccctttgaaaccatcactgacaacacaccattcaccagtgtcaaccacatggtcctggacagcatttacttcagccggcggttccatgtgcgttgtgtggccaaggctgtggacaaggtgggccatgtggggacccccttaaggagcaacattgttaccattggaacagacagtgctatctgccacacaccagtggtggctgggacatccagaggcttccaggctcagtccttcatcgcaaccttgaaatacctggatgtcaaacataaggagcatccgaacagaatccacatttcggtgcagatcccacaccaggatggaatgctgccccttatctccaccatgccgttgcacaacttacattttctactgtctgagtccatctacagacaccagcacgtctgctccaatttagttaccacctatgacctgagaggcatctcagaggcagggttcctggatgatgtggtctatgatagcactgccctggggcctggctacgatcgccccttccagtttgaccccagcgtgcgagggccgaagaccatccagctctacaaacacctgaacctgaagagctgcgtgtggacctttgatgcttattatgacatgactgagctgattgacgtctgtgggggctctgtaaccgctgacttccaggtgagggactctgcccagtccttcttgacagtgcacgtgcctctatatgtgtcctacatctatgtgacagcccccaggggctgggcctccttggagcaccacaccgagatggagttttctttcttctatgacactgttctctggagaacaggaatccagacagacagcgtgctctctgcaaggcttcagataataagaatctacattcgagaggatggccgtcttgtcattgaattcaaggcccatgccaaattcagaggacagtttgtgatggagcatcacactctcccagaagtgaaatctttcatattgactccagaccacctaggaggaattgaatttgacttgcagctattatggagcgctcagacttttgattctccacatcaactctggagagccacaagctcttataacaggaaggactactcaggagagtacaccatctacctgatcccttgcacagtgcagcccacacagccatgggttgacccaggagagaagcctttggcctgcactgcacatgccccagaaagattcctgatacccattgcattccagcagaccaaccgccctgtgccagttgtgtattcacttaacactgaatttcagctctgcaataatgagaaggtgttcctaatggatccgaatacatctgatatgtcattagcagaaatggattacaaaggagccttttcaaaaggtcaaatcctttatggccgagtactttggaatccagaacaaaatcttaattctgcttacaaactccagctggagaaagtctatctttgtacgggcaaggatggttatgtgcctttctttgatcccacggggacaatctacaatgaagggccccagtatggatgcattcagccaaacaaacacctaaaacacagattcctgctgttggaccgcaatcagccagaggtaactgataagtacttccatgatgtgccttttgaggctcactttgcctctgagttgcctgatttccatgtggtcagtaacatgccaggtgtggatggatttactctaaaagtagatgcactctataaggtggaagcaggacaccagtggtatctccaggtcatctacatcattggccctgacaccatctcagggccccgggtccagcgctctctcacagctccactcagacgcaaccgaagggacctggtagagcccgatggccagctgatccttgatgattccctcatctatgacaatgaaggagaccaagtcaagaatggcaccaatatgaagtccctgaatctggagatgcaagagttggcggtagctgcgtccctgtcacagactggggcgtccattggcagtgccctggctgcaatcatgcttctacttctggtgtttttggtggcttgttttatcaacaggaaatgccagaaacagaggaagaagaagcccgcagaggacattttggaagaatatcctctgaataccaaggtagaagtgcccaagaggcacccggaccgggtggagaagaacgtgaatagacactactgcactgtgcggaacgtcaacatcctgagtgagcctgaggcggcttacacgttcaaaggtgctaaagtcaaaagactgaatctagaagtcagagttcacaacaatttacaagatggaacagaagtttaatggaggagacctatgtgtatttttttctaaaatcatttttataaaatggggggaaatactggtatttttataatctcgcagataaaaaagggaaaactatagctttgagtggcagacagcacacatcacatgcatcaactcacaactgagctacctcattcagcaaagaaccactgagaaccccagagtattacagttatttccgtagatccctttaatagtgtcaacaactgtacacagctccttctgtaaggctggtcttagaaaacaagtactttagtatcaggacaggagttgaacaattaggttagcagatggagatgagaggactgggtagagtaccatggcagatctcagagagaagaagtaggtacgggcctttggttccctcccccagccccagctttctcctacagggcttttcctgagtccccagacagcagagtatgaactgctgacacccggattccattaaaaattctgctaatcgacacaacacatatatttgctcatgatttcacttgacagcgtatgctccttggcctctaattgtactttgcttttccagagccctttttacctggggatttcagtgtgcttaagtaaaatcctctgaaaaccacgggagcccctgcctcctcagccacagagaactccctcctacaaagggggagactgaaacccgagttaaggaggggcctggcaggcgtatcagagcacattagtgatgcccttcaccccagggaggtgtctgttcccaactagtttatgtggcactgagacatccatccctgaccaaggatgctgcgaaacaggatcaatgtactacggccttttaattcaacattgccataaatgctttaaagaaaacccaccacactttcctcctactccggtctttgcccgttcctgtaacagacaatcccatgtcctaggtatggttttttattctgttagtgcttcgggaaagtaagtgattcatttgaataaggcaaattaggagaaagcccaggttggggtgaaatcagacttaacagatacatgctggttctccttgctgtgtgtgacacagcagacagaggcactattcctggtgcagtatttcagggatttctctttgaggggttcttttctggtagctcaggcaattatttttaccatatcagcacatgacaaggccatgaacacatggctctaaaataatttagtgttcaagtatcagcttaactattttgtgtaggctacacacagcttgcttttgtttctcttctgtttctgccttattggcggaaacataagcgtgcatgccatgttgttttgaattggaggcacaatttcattattcgagagtaaaagacatgtcctcttctgatgcatggcacaccatagtcaccaagcaaataacagagccttcacattgtgtaatatttgtatgagaatgactcaagctctttgagaacattccaaactagtaacatttcgctactaaaagctagaaaggatgaattgtgaaaggttctaggcagctctgtgagactccaagctccttgaaagtaggacctttgtgagccacgcctttcattcttcaacagtgccttgcatgtaacaagcactccagaaatgtttgttgaatgaatgaatggtgtcatgggtgaatgatggggagtaaatttaggaaggggaagtgagagagtatggtggcaatatcacaagggaggagagaggaaaacaattatcttctctacttggattatgagataaccttttcttggaggaaagaaacaccgctttacaaaggcatgactctggcggtggtcctaaggaagcatgagcagaaaattcataaaaatgtatcatcagcaggagatgagactatgaattggcatccagaacaggagatttagagcaaaatctaatttagcattctgagatgagtgtcaggttttcaggagagaatgagttggggtgagcccagagtctgaaactcctgactggtcaggtgctacttaagaccagcttgggcaattcagggcagaactcctgtatcagcctcatggacacccagaattggtatctcatggctggagagctgatcagccaggcacagaatctccagaacaacctagagagtgaatgctaatttgtagagcgaatttccatttggcccattatttgtaactgtgtaactgctccaagtgccagaatgcttacacgttaaagcagcacctttccatttgcccacatattcttcttgcacaccccttccattactgctgaataggacattgcatgggaagagtacagaggtggcagaatgaagctagagtgggaaggactaaagactgagccccagagtgctcccagcaaccgccacgtacaaggtctgaaatgacaagggcaagagtgagataggaaactgtgtgtgaaaggaaagcccttgcagtatttctgcctccctttctttctgcctttcaccccactaaatgtacgttattgaatgccagtacttctctagtggatgcacacttgttaaatagtgttaagagatgtggagatgagatatacccctttgatgtagaattattcatttggtttgtttcatacttcattataggaatcaagtaatttgatgactaatgtggattatatttcagtcaaagctctgctttcaatttctctgatttgctcactaatgccttatgtgtgttttactaaccttttatatcttgccttcaagtgagaaggaacaaacaactctcagtggttactacttgcttttatatgctggctgtgaaggttaaaagaaagaatggtctgtaccattttttctgctttgctgcccttttattgtaccccaggcctcctagaggactcctgcagattctattgttgggtgggaaatagtgttggaatgtgtttgcacagtcttatgatattcagtctcagtctgctataggtatttgttattcttggatactacacacctgctcagactgagtaaacatttgtggtgctgtcaacctgatttcttgactctcaaatgatttttgtatttccaatatgaatttgtgtgttatgaatttctgatttctccaatagtatatgccactatataaatttgtattaataaatgaaaaaaaaaaaaaaaaaaa

SEQ ID NO: 24681 - DNA, 5586 bp, Homo Sapiens
ggtagcacgttgacgcagcagcggcggcggtggcggcggaggggccgtgcggtgggtccgtactatcttttcccagtctcggttcgacgactccattttcctcggtgggggcttagcgcactggaggagcggcgggcttcagacaggctggagtgcagtggcgcaatctgcaacctccaccttccggattcaagagattctcctgcctcagcctcctgagtagcctggcttttgccttctttttgaaattgtcttcaggcagagtgagaagctgcagcaatgtctgattttgtggaaagcgaggctgaggagtcagaggaagaatacaatgatgaaggcgaggtggtaccccgagtcaccaagaaatttgtggaagaggaggatgatgatgaggaggaggaggaggagaacctagatgatcaggatgagcaaggcaacttgaaaggctttatcaatgacgatgatgatgaagatgaaggggaggaggatgagggcagtgactctggtgattcagaagatgatgttggccacgagaagagaaaacgcacctcttttgatgaccgcctggaggatgatgattttgacctcattgaggagaatttgggtgtcaaagtcaaaagaggacaaaagtaccggcgtgtcaaaaaaatgtcagatgacgaggacgatgacgaggaggaatatggcaaggaggaacatgaaaaagaagctattgcggaagaaatcttccaggatggggaaggggaagaagggcaggaggccatggaggcccccatggctcctccagaggaggaggaagaagatgatgaggagtcagatattgacgacttcattgtggatgatgatggacagcctctgaaaaaacctaagtggcggaaaaagcttcctggatacacagacgcggccctgcaagaagcccaggaaatcttcggtgtggactttgactatgatgaatttgagaaatacaatgagtatgatgaagaactggaggaagagtatgagtatgaggatgatgaggctgagggtgaaatccgagtgcgctccaagaagaccaccaagaagcgtgtgagccgtaggagcatctttgaaatgtatgagcccagtgagctagaaagcagccacctcacagatcaggacaatgaaatccgagccactgacctgcctgagaggttccagctccgctccatcccagtcaagggggctgaagatgatgaactagaagaagaagctgactggatctacaggaatgcttttgccacaccaaccatttctctccaggaaagctgtgattacctagaccgagggcagccagccagcagcttcagtcggaaagggcccagcacaattcagaagatcaaagaggccctgggcttcatgcgaaatcagcattttgaggtgccttttattgccttctatcgaaaggagtatgtggagcctgagttgcacatcaatgacctatggagagtctggcagtgggatgaaaagtggacccagctgcggatccgtaaagagaacctaacacggctgtttgagaagatgcaggcttatcagtatgaacagatctctgctgaccctgacaaacctcttgctgatggcatccgggctctggacaccactgacatggagaggctcaaggatgtccaatcaatggatgagctgaaagatgtctacaaccattttcttctttattatggccgagacatccctaagatgcagaacgccgccaaagctagccgcaagaagctgaagcgtgtcagggaagagggagatgaagaaggtgaaggtgacgaggcagaagatgaggagcagagggggcctgagctcaagcaagcccctcgccgagacatgtacaccatctgccagagtgctgggctagatggcctggccaaaaagtttgggcttactcccgagcagtttggggagaacctgcgggatagctaccagcggcacgagacagagcagtttcccgcggagcccttggagctggccaaggattacgtttgcagccagttccctactccagaagctgtgctagaaggcgcccgctacatggtagccctgcagattgcccgtgagccccttgtccggcaggtgctgaggcaaaccttccaagagagagccaagttaaatataacccccaccaagaaaggtagaaaggatgtggatgaggcccactatgcctattccttcaagtatttaaagaacaagcctgttaaggaactgagagatgaccagtttctcaagatatgcctggctgaagacgaagggctcctcaccactgacatcagcatagatttgaagggagtggaaggctatggcaacgaccagacatattttgaggagataaaacagttttactaccgagatgagttcagccaccaggtgcaggagtggaaccggcagcgcaccatggccatcgaacgggctttacagcagttcctctatgtgcagatggccaaagaactcaagaacaagctgctggctgaagccaaggaatatgtcataaaggcctgtagtcgaaagctctacaattggttgagagtggcaccctaccgaccagatcagcaggtggaagaagatgacgactttatggacgagaaccaagggaagggcattcgagtcctcggcattgctttctcctctgccagagatcaccctgtgttctgcgccctggtcaatggtgaaggagaagtgacagacttccttcgactgccccattttaccaaacggcgaactgcatggagagaggaagagcgggaaaagaaggctcaagacattgaaacgctaaagaaatttctcctgaataagaagcctcatgtagtgacagttgcaggagagaacagggacgcccagatgttgattgaagatgtgaagcgcattgtacatgagctggaccagggccagcagctgtcatctattggggtagagctggttgacaacgagttggccattctctatatgaacagcaagaagtcagaggcagagttccgggattatcctccagtgctgagacaggccgtctccctggcccggcgcatccaggaccctctgattgaatttgcccaggtgtgcagttccgatgaagacatcctgtgtctcaagtttcaccccttgcaggagcatgtggtgaaagaggagctgctcaacgccttgtactgtgaatttatcaaccgagtcaatgaggtcggggtcgatgtcaaccgtgccattgcccacccttacagccaggccttgatccagtatgtttgtggcctgggacctcggaaagggacccacctcctgaagatcctgaagcagaacaacacccggctcgagagccggacccagctggtcaccatgtgccacatgggtcccaaagtcttcatgaattgtgctggcttcctcaagatcgacacggcctccctgggggacagcactgactcatatattgaagtccttgatggttcccgtgtccaccctgagacttatgagtgggctaggaagatggcagtggatgccctggaatacgatgaatcagccgaggatgccaatcctgcaggagcccttgaagaaatcttggaaaacccagagcgactgaaagacctggaccttgatgcctttgcagaagagctggagaggcagggctatggtgacaaacacatcacactctatgacatccgggcagagctgagctgtcgatataaggacctccggacagcctaccgctctcccaacacagaggagatcttcaatatgttaaccaaagaaacaccagagaccttctacattggaaagctcatcatctgcaatgtcactggcattgcccacaggcgtccccagggtgagagctatgaccaggcgatccgcaatgatgagacagggctgtggcagtgccccttctgtcagcaggacaatttccctgaactaagcgaggtgtggaaccactttgacagcggttcgtgcccaggccaggccgtcggtgtcaaaacacggctagacaatggtgtcaccggcttcatccccaccaaattcctcagtgacaaagtggtaaagcggccagaagaacgagtgaaggtgggaatgactgttcactgccgcatcatgaagattgacattgagaagttcagtgcagacctgacctgccgcacctcagacctcatggacaggaacaatgagtggaagctgcccaaagacacctactatgactttgatgctgaagctgcagaccacaagcaggaggaggacatgaagcggaagcagcagcggaccacatacatcaagagagtgatcgcacacccatccttccataatatcaatttcaagcaagcagaaaagatgatggagaccatggaccagggtgatgtgattatccgaccaagcagcaagggcgagaaccacctgacagtgacctggaaagtcagtgatggcatctaccagcatgtggatgtgcgggaggagggcaaggaaaatgccttcagcctgggagccactctgtggatcaacagtgaggaattcgaagatttggatgagattgttgctcgctatgtccagcccatggcatcctttgcccgggaccttctgaatcacaagtattatcaggactgcagcggtggggaccgcaagaaattagaggagctgctcatcaaaactaagaaggagaagcccaccttcatcccttatttcatctgtgcctgcaaggaactgcccggcaagttcctactgggataccagccccggggtaaacccaggatagaatatgtaacggtgactccagagggattccggtaccggggccagatcttcccaaccgtgaatggactgtttagatggtttaaggatcactaccaggatcctgtaccaggcatcacccctagcagcagcagcaggacccggacacctgcctctatcaatgctaccccagccaacatcaaccttgcagatctgacacgggctgtgaatgccctgcctcagaacatgacttcacagatgttcagtgccattgctgcggtgacaggccaaggacagaaccctaatgccaccccagcccagtgggcctccagccagtacggctatggcggcagtggaggcggcagcagtgcttaccacgtattcccaacgccagcccagcagccagtggccacaccactaatgacccctagctactcctacacgaccccaagccagcccatcaccacccctcagtaccaccagctccaggccagcaccaccccacagtcggcccaggcccagccccagccctcttccagctcccggcaacggcagcagcagccaaagtccaacagccatgcagccatcgactggggaaaaatggcggagcagtggctgcaggaaaaggaggcagaacggcggaaacagaagcagcggctgacacctcggccctcccccagccccatgatcgaaagcacccccatgtccattgctggcgatgccaccccactcctggacgagatggatcggtagggggcctgctcctcggactctggttacctctgaggctgggaaaggcctggctgcccactgcctccctccctgcccctccttttatgtccataaagtggcgtgaagtgaaaaaaaaaaaaaaaaaaa

SEQ ID NO: 24682 - DNA, 3112 bp, Homo Sapiens
gcttttaaaaaacgattgacactctggaggggcgggggaattgataagttgggacgaccggacagcttctcaggttgctaagcgacgaggcgggagcgcacgcacaccctggctgctttgtagcacctgaggaaactgtggcggcggcggcggcgtcctggagacccaagagaccaagcgagcgtgtcgctccctctcgggtccgaggacctagcctaggaaccttctgcccggggtagtgtctggtgatgaggcgagagttttgctgggacgcctactccaaagcggccgggagtcgcgcttcttccccactcccaagacaggatagagattccttctgccatcagatgtctttctgcttgactgaactgcacctgtggtctttgaagaataccttacacattgcggatagagacattgggatctaccagtattatgacaagaaagatccaccagcgacagagcatggtaacttagaaaagaagcagaagctggcagagtcacgagattatccttggacgctcaaaaacagacgcccagaaaaactccgagactcgctcaaagagttggaggagctgatgcaaaacagtcggtgtgtgctgagcaaatggaagaacaaatatgtctgtcagctcctttttggttcaggtgtgctggtgtctctaagcctttctgggccgcagctggagaaagtggtgattgacagaagcctggtggggaagctcatctcagacaccatcagtgatgctcttctcacagacagttttatcatcttatcatttttggcacaaaacaaactatgttttattcagtttaccaagaagatggagtcttctgatgtaaacaaaagactggaaaaactctcagccttggattataagattttctattatgaaatacccggcccaataaacaagacaacagagcgacatctagctatcaactgtgttcatgatagagttgtttgctggtggccactggtcaacgatgatgcttggccttgggcccccatttcttctgagaaggacagagccaatctactcctcctgggttatgctcaaggaagactagaggttctgagttctgtccgcacagaatgggacccactggatgttcgctttggcaccaaacagccttatcaggtgttcacagtggagcactccgtaagtgtagacaaagagcccatggctgacagctgcatctatgaatgcattcggaataaaatccagtgtgtgtcagtcaccagaataccactaaagtcaaaggccatcagctgctgcaggaatgttactgaagacaaactgattctgggctgtgaagattcttcgctaattctttatgaaactcaccgtagagtgactctcttagcacagactgaacttttgccttcattaataagctgccacccaagtggtgccattctgctagttggcagcaaccaaggggagttgcaaatttttgatatggctctatcccctattaacatccaactgttggctgaagaccgcttacccagggagactctgcaattcagtaaattatttgatgcctccagcagtcttgttcaaatgcaatggatagctcctcaggttgtttctcagaagggtgaaggtagtgatatctatgatctcctcttcctcaggtttgaaagaggacctttgggtgtgctgttgtttaaactaggcgtcttcactcgaggacagctgggcctggtagacatcatcttccagtacattcactgtgatgagatctatgaggcaataaacatcctgagcagcatgaactgggacactctgggccaccagtgctttatcagcatgagcgccattgtaaaccatcttcttagacagaagctcactccagagagagaagcacagcttgagacaagccttggaaccttctatgctccaacaagaccacttctggattccactatattggaatatagagatcaaatcagcaaatatgcaaggagattcttccatcacttgctcaggtaccagaggtttgaaaaggcatttctcctagctgttgacgttggtgctcgtgacctctttatggatattcattaccttgcactagataaaggtgaattggcactagctgaagtggcaagaaaaagagctagtgacattgatgcagaatcaataacctctggggttgaactcctgggacccttggacagaggggatatgctaaatgaagcatttattggcctgtctttagcacctcaaggagaagactcatttccagataacctccctccctcttgcccaacccacagacatattttacaacaaagaatactgaatggctcttctaacagacaaataattgacagaaggaatgaacttgaaaaagacatctgttctggatttttgatgactaatacctgtaatgcagaagacggagaactgagagaagacggcagagaacaggaaatcagagatggtggttctctcaaaatgattcactttggtctggtgtaaacattaagaaaaaaagaaaactgccttcttcatatctaaacttttcatggcctgatacagacttaaaatcccccgtgtggatttttaacaagagacagtatgaatcatataaattagttaagagttttgagttgagtgtttgttttcaaaataaagttttattatttcaaaaacatgcagcataacagcaaagtgatcgtaagtaaaagtcttcaacctacttattttcaataatgtaaaattttgaaagtgtcttaaattgtatgttaattaggtgctacaaaaatagaatatttaaactttgttctcccaggtactttaaaaaaggggcagtagggggcaggcatagtgctcatgcctgtagtcccagtgctttaggaggccaaggctgaaggatcacttgagcccaggagttcaagactagcctgtgcaacatagtgaaacgctgtctctagaaaaaattttaaaaattagccaggcatggtggtacatgcttgtgaagctgaggcagaagaattgcttgagcccaggagttcaaggctacagtgagctgtgatcgcgccactgcactctaacctgggcaacagagagtgaccctgtctccaaaaaaaaaaaaaaaaaaa

SEQ ID NO: 24683 - DNA, 3425 bp, Homo Sapiens
gaggcgacgttgcgggccctgggcgccaggagagcttcccggagtcgaccttcctgctggctgctctgtgaccgcttcccggctctgccctcttggccgaagtgcccgctgccgggcgcgggcctcagacaatacaatggtgggtgaagagaagatgtctctaagaaaccggctgtcaaagtccagggaaaatcctgaggaagatgaagaccagagaaaccctgcaaaggagtccctagagacacctagtaatggaattgaagccattttttatgaaggaagttggcagtcactttgatgattttgtgaccaatctcattgaaaagtcagcatcattagataatggtgggtgcgctctcacaaccttttctgttcttgaaggagagaaaaacaaccatagagcgaaggatttgagagcacctccagaacaaggaaagatttttattgcaaggcgctctctcttagatgaactgcttgaagtggaccacatcagaacaatatatcacatgtttattgccctcctcattctctttatcctcagcacacttgtagtagattacattgatgaaggaaggctggtgcttgagttcagcctcctgtcttatgcttttggcaaatttcctaccgttgtttggacctggtggatcatgttcctgtctacattttcagttccctattttctgtttcaacattgggccactggctatagcaagagttctcatccgctgatccgttctctcttccatggctttcttttcatgatcttccagattggagttctaggttttggaccaacctatgttgtgttagcatatacactgccaccagcttcccggttcatcattatattcgagcagattcgttttgtaatgaaggcccactcatttgtcagagagaacgtgcctcgggtactaaattcagctaaggagaaatcaagcactgttccaatacctacagtcaaccagtatttgtacttcttatttgctcctacccttacctaccgtgacagctatcccaggaatcccactgtaagatggggttatgtcgctatgaagtttgcacaggtctttggttgctttttctatgtgtactacatctttgaaaggctttgtgcccccttgtttcggaatatcaaacaggagcccttcagcgctcgtgttctggtcctatgtgtatttaactccatcttgccaggtgtgctgattctcttccttactttttttgcctttttgcactgctggctcaatgcctttgctgagatgttacgctttggtgacaggatgttctataaggattggtggaactccacgtcatactccaactattatagaacctggaatgtggtggtccatgactggctatattactatgcttacaaggactttctctggtttttctccaagagattcaaatctgctgccatgttagctgtctttgctgtatctgctgtagtacacgaatatgccttggctgtttgcttgagctttttctatcccgtgctcttcgtgctcttcatgttctttggaatggctttcaacttcattgtcaatgatagtcggaaaaagccgatttggaatgttctgatgtggacttctcttttcttgggcaatggagtcttactctgcttttattctcaagaatggtatgcacgtcagcactgtcctctgaaaaatcccacatttttggattatgtccggccacgttcctggacttgtcgttacgtgttttagaagcttggactttgtttcctccttgtcactgaagattgggtagctccctgatttggagccagctgtttccagttgttactgaagttatctgtgttatttggaccactccaggctttacagatgactcactccattcctaggtcacttgaagccaaactgttggaagttcactggagtcttgtacacttaagcagagcagaactttttttgtggggctgggtggggggagaagaccgactaacagctgaagtaatgacagattgttgctgggtcatatcagctttatcccttggtaattatatctgttttgtttcttgactctgtccaatcagagaataaacatcatagtttcttggccactgaattagccaaaacacttaggaagaaatcacttaaatacctctggcttagaaattttttcatgcacactgttggaatgtatgctaattgaacatgcaattggggaagaaaaaatgtagaatgatttttgctatttctagtagaaagaaaatgtctgttttccaaagataatgttatacatcctattttgtaatttttttgaaaaaagttcaatgttcagttttccttagtttttaccttgttttctctataggtcatgatttctgtgaagcaaaaagatgccttttaccatgaattcttgagtttacatcaataatattgtatattaaggggatcagaagtaggaaggaaaaaataagagatagcagaggaaaaagaaaaacatttcctcttataacttctgaagtaatttgtaaaaaagatttgtagagtcaatcatgtgtttaaattattttatcacaaacttaacatggaagatattcctttttaactttgtggtaacttctttgaagttatttagaaatatcctttggaacaattattttattgtctaataaatattgacttctcttgaattattttgcagactagtgagtctgtaccataagtattaatcacctccactcatattaaagtgatcattaagaatccagaagctggcttctgcatttgctcagttatacttttaatggtagtatgtttttaggtggaataaattaatatgtgattggtttcaaggaaatgtactctattatgtaatacttccattttataagatgcccatttctaatacagtgtgtgtaggaattatttgtatgtatgaggtatgattgtaaagattgagcattggaaggggtatcagagaccatgtagttcaactttccactcaaagtaagatttatgaattatttaaatgatagttgttacttggaacagccacttgagaggctctcttggtattgtttggaattgttttaaagtcagtttgagtctcacaagaaggtaagtagagtttcttaatagtcacaacttaatttgaaccacaagtatccagcttaatcacgtatcttactcacgataccactggtccagatgagtttaggtaattttcaaacattaaatccaacttcaacggaaacaaatacactcaagggaagttatttttaaaaaggtactctgcatgttcccgcagtaatgttctgcacaacagtattgtaattgtaatggaatcataacctgctaactagtttgctttaatatggcttgtaattcttgacatttttcttaaaattaaaacgaatttttattttgaattcaaaaaaaaaaaaaaaaaaa

SEQ ID NO: 24684 - DNA, 3365 bp, Homo Sapiens
gaagaaggcatcgtcaaatcagggacaaataaccatgtaacagtggcaatagaaaattgagtaccacttgttcataactaaccatttgaataagagcaaggtgtatgaaaacattatagactggtattttcaattttcatttgcaagaaaatgatcagtggaatgaaataactgaagtataacagaagatatattttttaaaacggaaagcctttgtacagttcctgggattcacagaagcactactccagagcagaatgatgccttaatcttaagtgtccatttgtgcagcattgacttagagctacaaaagtgacttaatgttattctggaaataatacttacctgttatgagttgctataatatgagctgtcatcacattttaacatgcatatgtattttttgatacctgaattacattattagaataagtatccatatacattttcactccaaaaacacaagcttaaaaactttaaagtacatctagggcaaatggtggctgaaagtgaataatattcaaattactgttgcttgtactgtataaggaaaactgcttttttaaattgggtatttgctaatttataattactattttatacttttcaacatttttaataactttttttattgttggctataacagaaggattcagatatctaaatatcatttagaacatagaacacattggtctaattcatcgaaagcttagttatgagcattaatacaaccatgtagtagagcaagtgcccaaggtttaaagggaacttggcagtataagaaatattttgggttctctctgctattttatagctttttttgttgaactttcaggggtatgtacatgggcagagaaacacaaaggtacatgtgctggagaatactggacacagtaggaagaagtataggtgtccagaagaaaatctaagaggaatattgtaatttgttaaaaaaaatagttttgagttttaacagcagttagaataaagcatgctgttgacttcactttcaaatttcagtgtaggtaatgactaaaaattactttgaaactttttacagtaatactgtaatagcttaaacagtgatttaaaatgcaatttaaactaggcaaaaaaaactttagagtaagttttcctcctggctgtcagttggaaattctaacctgagtggtcattttacattcccagtctcttgagaagtggattctactcttagacgcacagtctgaagtctgacttcctaacggcaacccctttatgactagacacatttctcctttttccttttaaaatctaagcgacaggaggtgttgcattaactccaaggaaaagtacagaataaacaatgtagaaatgtcactcctcatttacaccttttagacagacagacacacacacacacacaccccccccaaaataattgattgcttccagtgagtgggtggagatgaatctcagcagcatctgtgagtactacaggttggagcttcctgtctgtaaaatgggactgcaggggagggggtgttgtgaataagttggactggatgacttctaacattctgtgatgcctaattttgcaaaatcacttttcattcacccaataaatttttttcttcttttttccacagagttttgctctgcactccagcctgggcgacgagtgaaactccatctcaaaaatatatatatatatcaattaccaactaaaaacataactccagtttggcagtttgcatattataaggagataaatgttaaaacatacttgactactttcagaaatgttctcctggtactttttgcatttctacattcagataaaaagatttgcatgcacctggctaacgccaagggaacttcatttttttcttcactattatgcactttcatggtatagtctttctcagttcttttaatttttgttatttaacatctttaatagcacagcaaacatcttttcagaaattttcagttaaagcctttgaattacttatctttgatttaatttacagccagcattttgccacgttctaaataatatttagctcaactgattcatacgtattaatgaccattctagcaaaggcctacaagtggtgtgggaatcagggaaaggctgcctctttggtatctcaactggtattgattattgctatcaactatttggggagaaaaaatcaaaatgaagccctgtcaaattttagaagtactatctttggtccttcaaacactttgtgatgacaccttaagaaaaataaagttgaagttcaggtcttgccattgccattacagacaaattaggagacttggtttacctgggaacaaatttacttgaatattcagtacctgaaactatgccaaaccaaagagcagctgcagtacattcgttattttaaatgaacaagtttacaaagtttattttcatctatacgtaaggatgatttttttaaaactttttacatattagtggttatgatccaatgtgtcatgagtgaatttaactgtaaggtggtttaaatcaaatatgcaatgtttacttgaattgtatttctattagcagattttgactatgtttacaggacggtttaaattaaggattatcaggcatgtgagatctttcagttatctttaaagtagatgtatattaagggcttagatttaggatctacatattctgggcattgaataggcagtaacttacaaataagttttgcttaccttttgttctagggactagcactgctatcaatggaaagtatttttaactaatctgttattaagaaagtcatatttttgcatttcagccaaaataaagaccgcctgtaataatctgttagaaacagataatacatgtctgaaatccatatgtttcatatgatctaaactgtattttccaatttaaattaaaaatgtaatatagattcagaaaggttcatatttttctaatgacttcattctatattattttgttaggttgcataaagaagcaaggaattgtacttgtattaaaagatgaagaaagctattaggtatatttgtacatgactgcaaatgagtctatgcccgtttaaaagaaaagatggacactattttaaagtgagctttaatatgcttttatataaacaaatttgaagtacagtttagtttggttgtgtttacctaacaagtaccataagccttgtgtttgttcttatttgtataatcctagcctgtgacttaatgttgatgctttgctttgtcttttggctggcctaacctacattgacatgtacacagaacattttaaaactttttttttcaaaagtcataatgaattactttattaataaacaaagtcttgtaaagaaaaaaaaaaaaaaaaaaa

SEQ ID NO: 24685 - DNA, 2017 bp, Homo Sapiens
ggcgcgcgcggccgcgtttgaatggccctgagtgggactcggcccagaagccgagggactctctaggctgccgggcgctggtcgtcagcgccgaggctgggctgaggcgccgcggtaccatgaggcgccggtacttaagagattatggcatcagaaacccacaatgttaaaaaacggaacttttgtaataagattgaggatcatttcattgatcttcctagaaaaaagatctctaatttcactaataagaacatgaaggaggttaagaaatctccaaaacagttggctgcttacataaatagaacagttggacaaactgtgaaaagcccagataaacttcgtaaagtgatctatcgcagaaagaaagttcatcatccctttccaaatccttgttacagaaaaaaacagtcccctggaagtgggggctgtgacatggcaaataaagaaaatgaactggcttgtgcaggccacctgcctgaaaaattacaccatgatagtcgaacatatttggttaactccagtgattctggttcttcacagacagaaagcccatcatcaaaatatagtgggtttttttctgaggtttctcaggaccatgaaacaatggcccaagttttgttcagcaggaatatgagattgaatgtagctttaactttctggagaaagagaagtataagtgaacttgtagcttatttgttgaggatagaagatcttggcgttgtggtagattgccttcctgtgctcaccaattgtttacaggaagaaaaacaatatatctcacttggctgctgtgttgacttgttgcctctagtaaagtcactacttaaaagcaaatttgaagaatatgttatagttggtttaaactggcttcaagcagtcattaaaaggtggtggtcagaactatcatccaaaacagaaattataaatgatggaaatattcaaattttaaaacaacaattaagtggattatgggaacaggaaaaccatcttactttggttccaggatatactggtaatatagctaaggatgtagatgcttatttattacagttacattgagagatttcatctactaaagagcatttggtttttcaaaacatccctgaactgtataatttacaaaaaaaaaagtctcgtctgagaactgtgaactgtggaagaaatcaaaactattttttcttttaaaaagccacgtaatgaaaccactaatgaaatcccagcaatctgcttcacattgaagtggaaaaatatccaaaaggagcagcttcaatttcattgaggtgaaagtgcactatgaagattgttcacctttgctgcatttgggagttatatggttatttggtaacattaagaactactggattttaatgcaatcctgcataaaaatataatttatactatgtgaaaaaataagacaggacttaccactaggaaccaccaagaccaatcatcattaacttttttaagattgtgttttattaaaaaaaaaaaacacttaaatgtgtgcagctattttcttatgttgaaaagactgaaagtttaaaacatgaaaaaaatcaatattaaacattttttgttcacactgagatactgtgtatgtaaaatgccttaattattaataagccaatgtgttatgataccaatatctgttttaaaaaactaaaaccaaccatgcttctggcatgataaaatcatggaattaaatcaggggtttacattcttgtagagtgttcttgaaacactctctgcaccatttttaaaacttgagaatagttttagtatctctgatattttttgccagaatcatcatgtcatgtatgaatgtgttatccctatctaaggaaaaaggtgaatatgtttttgtatgaatgtttaactggaaatgtccatggacttggctaatttatatttactttttattgtacatagatttctaatatttttcattcctgtatcatttaaacttccttcatttgagtaaattcactaaatatttctaaaaaaaaaaaaaaaaaaa

SEQ ID NO: 24686 - DNA, 2538 bp, Homo Sapiens
ggagagggtgcgcgatggcgccagctggagtgcggctggcggaggaaggagcctggcggcgggttgggggctgggtacataaataaaggataaaatattttatgaaacaaatcttcaatcaagtataacattttgatgcttggcatctagactcccttgtgccctcactatgccagcggcaactgtagatcatagccaaagaatttgtgaagtttgggcttgcaacttggatgaagagatgaagaaaattcgtcaagttatccgaaaatataattacgttgctatggccaccgagtttccaggtgtggttgcaagacccattggagaattcaggagcaatgctgactatcaataccaactattgcggtgtaatgtagacttgttaaagataattcagctaggactgacatttatgaatgagcaaggagaataccctccaggaacttcaacttggcagtttaattttaaatttaatttgacggaggacatgtatgcccaggactctatagagctactaacaacatctggtatccagtttaaaaaacatgaggaggaaggaattgaaacccagtactttgcagaacttcttatgacttctggagtggtcctctgtgaaggggtcaaatggttgtcatttcatagcggttacgactttggctacttaatcaaaatcctaaccaactctaacttgcctgaagaagaacttgacttctttgagatccttcgattgttttttcctgtcatttatgatgtgaagtacctcatgaagagctgcaaaaatctcaaaggtggattacaggaggtggcagaacagttagagctggaacggataggaccacaacatcaggcaggatctgattcattgctcacaggaatggcctttttcaaaatgagagaaatgttctttgaagatcatattgatgatgccaaatattgtggtcatttgtatggccttggttctggttcatcctatgtacagaatggcacagggaatgcatatgaagaggaagccaacaagcagtcatgacatgaaatagtccttttatttttatttcgagctacacacatgcttgtatataggttttatctctggttgaatccctcgaacaatagacagtacctttcccccccctttcatggcccattttattgtctgcctttcagtactaagtatgaccgttcctatctcagatcttaataaaaagaaaaaaaaaaacgcattcaggttaaatttggccttaatttaatatacttgttagcaagcgtgtgtgacagagagtggggaaagctacatcattgaatattttgataaactttaccgacttgagtttggtttatttttcccttttcctaaattaactagcactgactgtaatttatttccctgtttcacgtctctcccttccattctgcaggagttttagctatttgagatcgtggaccatcagttttgcactttagagagtgtttctgactctaaacctgttttatcagaaaatttgttttttcttgatcttagctggaaaaatctgccaactttacacagtatttacttggttttgacccacagaatatagcacgttgtgcaaactgtcgattcagcgaaacttaaaaaagacaagaaactactgaggagcttagtaactgctgtttctgtacgtagtgtttaatcttccaagcacatctagtgtctgtcagtttctaattggcatgtgtaggctgctctgtgactgaagaattttcaaaccagctttacacccttcaggaaaaatcccttgtgattggatgtttactatctgccaggaaactggtactcaagatgttgaagctacagttattttatgatagcacacttcccttgatctgcttatttttattccatcaccatttaccctttttttttttttaaattttgtagccattcttatgatgctcttgatttgttggttacacaaatcaattttattaaaaatccaaagataagtctttaggtatattttgtaccaaattaaattagaagacaaaaattgtgctttcatagttgctacaaaggtaaataatggagagatttggtacaaaacaacaaaatatatacatattctcatatatatatatatagctgataaaattacctgaggagtgtaatgcttatttttttgtgtatatctttgcaatctattttatatatattgacaaaagagactgtgaaatacttagccatgcagaatatgtgaccagaccagagcatgtgtaggaagactttacagtaatcattaactctaccccgaaatgatggactacaagttataatgtgtgttacctacacttcaatcagtaatattagcaaatctccaaatgttagtcacattggtttgtctcccttgtacattctttattcatgatattacagtgctgtaactgggtggtcctttttaaacaaaacattatttgcaaaacagagggtattatttgtttttaaagcttttgtaaataaaggcttcaaaatgttttcttataaaaaaaaaaaaaaaaaaaaaa

SEQ ID NO: 24687 - DNA, 1827 bp, Homo Sapiens
gactccctccccagcctatgggaaggtggaaatttcaggcaagaggggatgaagacattcagttgagggcattcagttgtctttttccatcctgtctgtttccctgaaaaaaaaaaaaaattcatattccagtgcctatccgtgggatccttcacgttctttgacattaaccagaaaccaaaaagagaactcacctcgcttttcccaccctgtgcccctctggtactggcgaatgcctctccctccccccacatgcacgcacgcacacaccccagtggtggggttcctcgagatggcatccccatcagggtccatgtggtggggacagtgccacagcctgtggtccccatctgagagggcgcggtggtggccaccactcccacaagacctccacaactcttggctggaccctgtgtttgaccagccccggacacgtctccactgacgacggacagaggagagacaccactgggagccaccctgccctcctgctattgtggaggccaacaaagttttgaaccgaaaaccaaaaaaacagaaacaaacaaacaataaatttaaactagaaaaaaaatttatatatatatataaacatatatatatatatatatataaaagggaaagaagatgaggactcttcaagaataagatggaaccgcgaggcggagccaagcccctgcaccggtggtccaggcccttgttccccaaggcggatggaaggacggatgcttctttctcttcacaaatacctcatggacgttgtctttgggaaagccggagggggcggctggggcagggcctgtccctcggccagggcagatggaagcgggtgggcggggctgagagagggtatcagggacaggggtgaagagccccaaactcccctcccaaatcaactgaaaaagctttaaaaaaagacaggaaaaaaaggagtaagaaagcaaaaagaacagatgaaggaaaacttaacaacttttgggtggtttgattcctcctttgatttctttttcggttctcttttgtctgacctctctcctcccctccttcctctctcctcccctccttccgctctcctctcctccttcctgtctcctctctctccctttgctctcctctcttctctctcaatcttgttctttctgtgtctctcctcaaaccaaagtgttgcagtgaaggacacgagccattgaaatcagggtggggcctgacagccgtagtgtggcccctgccccttgttgggcaggagcagagagagaggagagccctgagaccgcagggctttggcctgggcagcttccactttctgccggacactctgaggagaggcagatggagctccaggcctcagcgttctcttttttccttgtctcccttctcccacccgggaaatgaaactgttgggctgggcgacggaggcagcagagactcggccattgcaggggcctctgggtgccttgtccgggcagtggtgaagtagccgcccctcccaccccggcacgatggggcctggcacctcgtctacccaacctcaccggaatgtaagcatctccgctgaacgactccctgcccttaccctacctctgagtttgtccatgtttatttcctgaagagagaagggactggcaagagggcttgggccccagcccaagggtggagagggggccaagggctcctgaccaaataggaaggacatttgagcagagcaaaatgaaaggaattacaaccaaaaaccccctccgagaagacaggcagcatggaaggcatggtggagatgactcaaacaaaaactatgattctagaccaaaaaggaaaaaaaaaaaaaaaaaa

SEQ ID NO: 24688 - DNA, 2311 bp, Homo Sapiens
aaccagagcagtgacagtagcaaccgccggaatggcgaaagcaacaacaatcaaagaagccttagcgagatgggaagctttcactgtctacaaactgcattgaaaaaattgccaacctgaatggcttaaaaaacttgaggatattatctttaggaagaaacaacataaagaacttaaatggactggaggcagtaggggacacattagaagaactgtggatctcctacaattttattgagaagttgaaagggatccacataatgaagaaattgaagattctctacatgtctaataacctggtaaaagactgggctgagtttgtgaagctggcagaactgccatgcctcgaagacctggtgtttgtaggcaatcccttggaagagaaacattctgctgagaataactggattgaagaagcaaccaagagagtgcccaaactgaaaaagctggatggtactccagtaattaaaggggatgaggaagaagacaactaatgccacgctttccactgtgtgttaacttatttaaatgtcataagaacaatagataaattttatataattgtctattttaaagattctgtatgggacaaaagtttcttaagataaaacagatcactcattctcatcttttttttcctttaacttattcagtgtttctccccaaaactggtaatgccaaccttatatatcctatttctctttttagaaaccacaaattttcgatttttgtcttcagtctcagttacgtactgtgtagccccatctactaaaacaaaacctttgtagaccagtcatttttaataacaaaggaacaaatgtttttttcagtttgttcattttttttaggttagacattttaaaagatgtacatttgaaaattcagaacatttttcctgaaggtctgtctctgtacaattcagaagcacatgcctttagctcagaaggcagcatggtgatgggaagagttcctcttagaaatacagcaggtccggaaccaagactccaaagttccattggaaaagatatggtgaaaaaaggaaaaagtagtatctcagagaccttctagtctatattatacttatttgtttttccaaaaatgtgcacattgtcaactggaatttaggttgtttttatatgcatggccacttgagtcattgtgtacagtcattctgtgatctcagttagtggttaaaatgactgtcatgatcatttctttgactgataatgtggcaatgttactcatgtggacctcgccttaagcacacattttggttttatagttccttatgtgtttaaagcattagttatatttgaattcctagactaaatgctggccattgatgtatgtcaaaatttaccctaattatttggtctggtgaccctcattgttgggaaaagtgactaccatggttataagtaagggtataatgaaacttagtatttcaaaatatattttttgagaagttctaagttaaacagctcttaaaatgtattatgtacgtggttgtggagggaagggagatgtttcattatgagatcccaggcaaatggcaatatgtttgaggattgtctcctacataaagcagtgtaggtgatttaacctcaaaattgcaaagcaatagttagatgcagaggttagaatttatcatgtaaacaaaaaatccttcaggaaaatgtaagacattgtagtcagtaagcagatgaggtcataggaggccatggctggatcactattagattgcagaaaagaagtcaggggccctctgccaaattgtgcctaaagtccctcagagactgttgattctggtttccccatctacttgtgtgattttacttgcataaaatcacagtgaaagagggaagaatcatctttaaaaagtgattgcataagtagtcctgggtttcagaagatttcagctatcatttacataggaattacttgatttttctaagttactctgatcaaaagggaccactgctttgacaatcaactctaaatacaaacaagaggccaggcgtggtggctcatgcctgtcgtcccagcactttgggaggccgaggcgggcggatcgtctgagatcaggagttcaggaccagcctgaccaacatggtgaaaccccgtctctactaaaaatacaaaaattagccagtcctggtggtgggcgcctgtggtcccagctactcgggaggctgaggcaggagaatcatttgaacccgggaggcggaggttgcagtgagccgagattgcgccattgcactccagcctgggcaatagagcgagactccatatttaaaaaaaaaaaaaaaaa

SEQ ID NO: 24689 - DNA, 4062 bp, Homo Sapiens
ggaaaatacttcgagccagaggcttacttcccatcttgggttgtttccaagagggggaaggactacatcctgaagcacattccaaacatgcacaaagatcagtttgcactaacagcttccgaagctcatcttaaatatatcaaagaggctgtccgactggatgacgtcgctgttcattactacagattgtataaggataaaagggaaattgaagcatcgctgactcttggattgaccatgaggggaatacagatttttcagaatttagatgaagagaaacaattactttatgatttcccctggacaaatgttggaaaattggtgtttgtgggtaagaaatttgagattttgccagatggcttgccttctgcccggaagctcatatactacacggggtgccccatgcgctccagacacctcctgcaacttctgagcaacagccaccgcctctatatgaatctgcagcctgtcctgcgccatatccggaagctggaggaaaacgaagagaagaagcagtaccgggaatcttacatcagtgacaacctggacctcgacatggaccagctggaaaaacggtcgcgggccagcgggagcagtgcgggcagcatgaaacacaagcgcctgtcccgtcattccaccgccagccacagcagttcccacacctcgggcattgaggcagacaccaagccccgggacacggggccagaagacagctactccagcagtgccatccaccgcaagctgaaaacctgcagctcaatgaccagtcatggcagctcccacacctcaggggtggagagtggcggcaaagaccggctggaagaggacttacaggacgatgaaatagagatgttggttgatgacccccgggatctggagcagatgaatgaagagtctctggaagtcagcccagacatgtgcatctacatcacagaggacatgctcatgtcgcggaagctgaatggacactctgggttgattgtgaaagaaattgggtcttccacctcgagctcttcagaaacagttgttaagcttcgtggccagagtactgattctcttccacagactatatgtcggaaaccaaagacctccactgatcgacacagcttgagcctcgatgacatcagactttaccagaaagacttcctgcgcattgcaggtctgtgtcaggacactgctcagagttacacctttggatgtggccatgaactggatgaggaaggcctctattgcaacagttgcttggcccagcagtgcatcaacatccaagatgcttttccagtcaaaagaaccagcaaatacttttctctggatctcactcatgatgaagttccagagtttgttgtgtaaagtccgtctgtgtgcagctgtacaggcagcttactgtttgctagaggatgcgaaagtcataagttctttacatattacttgtgccatatcttcttcaccctaaacatagctctttctttataatatttgtgatgatggaaacaaaagccttggaacaattgcactttaagtattacacagaagtaaaagaactacagaaaatgtacagcaagacaagtgcccggaagttcactgatccttcagaaggaaatgcgctttactgattgcaaagccttcagaatattggagtgtggtgtgtttgctcatctgatgctttttagttcagttacatgtaacatcacatttttttatcacgtgaaagatgttagatttgtttgcttataaattttttaccactcccacataaaatgctcatagtttgggagaggaaagagggaagattctctcttcttttaacagagagatgattgctctgtatacccattgcttcctccctgaggctgtcccaaagtgaacactgatggagtggtcaaaatcataaggttgtagcaagccaaagatacgtatgtgacagaagcacataagcaataagcagaaaaccagaagtgcatgctgtgatgcctgtgactccttcatcccgctcagtgccatgtcctcttttgtgatcttccagaaagctccaggattcatttgagttccacatccaagtaacagatgaattatattcatgttgtaatgcattttgtggagtttacaaaaccagtgtctgttaaaactttggaaaatgtcttagaaaacgttggtgcttggtgatgctttatttgtttaattatcaagaacaaattatggcaatgctagtttctgcttaaccaaaatactctgtgtatatattatacatatataaatacatgggattgtgtatgtctatatgtgtttaaagcttactatgtcttcattttggcttccatgactatcttttatacatggaattccttaagattgagaatatgtcactgagtgaatgatacctgcagacagtcagttgatatatgtagagttcagaatgactgttttctcatgtgcctttggccatgattctcaacactgattgtataacagaattttggggggagcttttaaaaaataatgactgagtctcccaccagaccgattacatcattctcttgtggcgggacccaagtagaattgccttttcttttaaagttctccagatggagctaatatgcaacaaagttgaaaaccactgatcctgggggtgtcttgttaattttgaagtaaaagtgtacagaagacgtagtgtatgagaaagggccatttttaagacagttacctgttgtgctgctgttacaatatataatgaaaccaagtcaggggagtgaatttatcaatcttttgatgtaaagtaaaaacgtagttcacacttcaggagagaacttcatagcacaatgtctttctataagatatttttaatgatttagtattttacaacatttgtttaccatattttgatataccatttttttctatctgcccagttttattaaaaaaactatatattattttctaaagaaacaatcatatttttatacaaaattatgttttcaggtaacgaaatagatgtagggtacagtggaacataagcagtgttacccctggctgggagtcagtattatacaacaaatggtgagctggaacatgccctgtctgtgctgtccctcctgtgctgggtcgcggatgtgtaggcaacattgccttatcacgctaggttcacctgacactttaaaaggaaaaaaagttccatagagttctgtggtcacaaaattgttttgcttttatcaaatactttaatagaaccaaagttgcagatattggaatgtatggaagtatctcagtctctgcataagaggattaaagtatgaaaggatcatttaatgactgttttacttataagtcattaagtaatccaccatttcttatggatgatgcttaagcctggtgaggtttgtactctaaggagcccagatcataatgcagtgcatttccttagcccttagagtttcttgcaaacatttaaaaaaagacatatttaagaaagaaagataaagaaaaaacatatttaattactgtaaacaggtactgctttatgtttattttctctctacttcaaccaaaatcagatctttgaggttttgctgacattgttggtggttttgcacatgttctttctaattggatttatgaatagttctatgggttttcaaagatgaatcatgctaagaacacttctgctttttgatccactgtttgcagcagaattatatatatgtataggaaaaatccactttgaataatccatgttttgtatttggaaattgtttttaaaaataaaaaggaaaggaaatatataaagctgttatttattctgcatttcttacatatctatcgcttgtcagtatacccgttttggtatatattgcctctgcacatctacatttgtatatgcaacagtgagctttatatctacataaactgtaaataatcctttctgtgaaaggatcatcatatcaagatgataccaaaagtatgtaaaaagaaacctgcattattttgtaattatttcttatagatatttcatggtaagattagcagtcaataaagttacttttttgcctttaaaaaaaaaaaaaaaaa

SEQ ID NO: 24690 - DNA, 5246 bp, Homo Sapiens
cgatgccctgggcatgtgtttagcagttctgtctgtctgtgaatcaccctttcttagataaggggtgcattttttgcaagggcagagacaagccagctctacctttccctctcagttccaggggccagggagtttgctgtaagaggttagggccggcttaggcatgaggggcgtaaaacttgggtcatgtccattagaccggtgacgaggccagaggaggtctgtgtcgtgtgtgcctcggtgtctgtccactgaaactcataagctcagccacggaggagctgtctcattttaggctttggtgctggtacttactgacagttacttgagaaagatgtgatttcggtcccagagccacaggatatcagctcatggaatgtgtcgctgcatcatgttactcagggtgtgcccaagtctcgtagcccagaaatcaatcctgagggccctgaaacagcccaggggccgcagtatacgcccaagagcagcgggggcaaagggcaaggcatgccgtctttccaaagcacggagtcaccagacaagtccacgcctgaagacgaatgttgtaatgttcagcttttgaagaacctgaggaagtgtctttcccttaactcacacagacgttcaccattcacgaaggtggcgcttagctcagcaggagcgcgcagcactggtggcacctgtgctatgtgccgtgttatcccgctcttccctggcgctggtggcacctgtgctgtgtgccgtgttatcccactcttccctggcgctggcggcacctgtgctgtgtgccatgttatcccactcttccctgacactggcggcacctgtgctatgtgccgtgttatcctctcttccctggcgctggcggcacctgtgctgtgtgccgtgttatcccactcttctctggcgctggcggcacctgtgctgtgtgccgtgttatcctcttttccctggcactggcggcacctgtgctgtgtgccgtgttaccccgctcttccctggcgctggtggcacctgtgctatgtgccgtgttatcctctcttccctggcgctggtggcacctgtgctatgtgccgtgttatcctctcttccctggcgctggtggcacctgtgctgtgtgctgtgttatcctctcttccctggcgctggtggcacctgtgctatgtgccgtgttatcctctcttccctggcactggcggcacgcacgctgtgtgctggggtattcacctcttccctgtggggaataaggcttgagacttgcttccttcctgcccttaagggatgtaatagctttgtcctcactgtgcccctaaactgatttggttttcagttacatattcagcctcacatggattaaatgcttagataattcattaactatggagtagttactgattggctaatgtcatctggaaatacatgactgaaagcactttgtcaaaaccctgtgcacattgcaacatgcatggctccgcggccctgcgtgtatgggagcagcaggtgggtctgctgcttagaggacggctgtgctcttccgccgttgaggtgactctggtgatgtgtgcatgtcttgccagttctgcgttcgtttctcttgtctgtatgcatagcttcctgtttctcgttggtttgtgtatgtgttgggtaaggctttgcttcctggataatgagtggttgaagccataataaaatgtctagggcgtgggcgggcactgcaggtgagtctgggcagcagtggtggtggctgtgctgtccgtcggcgagtggtctgagagtgtctttgtgcttcctcctcaggtgtcgattgactgcccgtggtccatctactccacagtcatcgcactgaccttcagcgtacccttcaggaccacacacagcctcctgtcctcaggaacacggaaatatgttcaagtttgtgtccagaatttgtcagaacttgactttcagctgtcagatagttatcttgtagataccggtgatagtaccgacctgcaactagtaccactgaacacgcagtcccagcagcccatctacagcaagcagtcggtgttcttcgtctgggaactcaagtggacagaagagcctcccccttctctgcattgccggttctctgttggattttccccagcttctgaggaacagctgtctatctccttaaagccgtatacttatgaatttaaagtggaaaatttttttacattatacaacgtgaaggctgagatctttcccccttcgggaatggagtattgcagaacaggctccctctgctccctggaggttttgatcacgaggctctcagacctcttggaggtggataaagatgaagcactgactgaatctgatgagcatttttcgacaaagcttatgtatgaagttgtcgacaacagtagcaactgggcagtgtgtgggaaaagctgcggtgtcatctccatgccagtggctgctcgggccactcacagggtccacatggaagtgatgccgctcttcgccgggtatctccccctgcccgacgtcaggctgttcaagtacctcccccatcattctgcacactcctcccaactggacgctgacagctggatagaaaacgacagcctgtcagtagacaagcacggggacgaccagccggacagcagcagcctcaagagcaggggcagcgtgcattcggcctgcagcagcgagcacaaaggcctacccatgccccggctgcaggcactgccggccggccaggtcttcaactccagctcgggcacacaagtcctggtcatccccagccaagatgaccacgtcctggaagtcagtgtaacatgacaacgccagggtgaacacacgccacttcccagctaggagtgcactttatgggactgtgactggactcttccgttctggctccagccagaccttcagtggtcctgcctggccgtggggacatcagagagtgtcatcacgcagctggccagctgagttctgttgttgttttcatgccgcctgtgatctcagattcctgcttttctcaccccgtccccatgctggtgtccgacgccgcttactcagagccctggcctccctccccctacctcacacgctgctcatgaaagtttccacccacgctgtctccacggaacagcctccgtctgctggctcttcgtggaaggccatttgtctttcaggtagacactcagcagccctcacggtcttagtgacgtgtgtgcctttctggtcacacagctgcccagtttcctgatcggggtggatttgtgtcccctaaggggtaaaacagccgtttaccgcagatcctctcattgtgcttttctagaataacacccttctaggggaggcgggtgggggagggagggatcataaccccttctgtgccttgggatgccggagctgggggacctggaggcccatcagccggagccacgtgaaaggtactgaagaaagctgagacccggctgtgaggagcgcctcagcggtgaggtggtttagggataaatgtttctggaaccctgtggtcccccataatgttgatagaatatcatatgcactgggagttaaatatatttaatttaatgatcattatatatgtgggggttaatatgttgtttttctgtccctttaaagtctttacatgtaattgtagctgtataatcgttatttttcttttgcatcttaagtcttagaaattaagatattccatcgtgaggatgagagaggtcctcagtgtgtttttggtctggttgtagggaaggactcaagtcctggaatgtcctccactggtctactgagttgcagtcacactgttccaatggattatttgctttcggttgtaaatttaattgtacatatggttgatttattatttttaaaaatacagactaactgatgtaatgtttatgtataagttgcaccaaaaatcaaggacaaaaataagtgtgtttgtttttacaggtgtgaaagtcacagcttgtaaataagtgttgtatgtattaaaccttttccagttctccaaagcgatgtatttttgtacacttgaaatagagtactcttaatttactgggcaaatgtgcttggaattgaacttgacaagattagctcaagcagatagagtcgggtccagcagtgggtggccctcgtgtgaatccccgtggatgtgcaagttgtggagagaaggagcaccgggttcctgcccagcactgtgcttgcgggaggcggtggggcatgggaggaaggaggcacagaccggggaaatatgacagccgtcatttccagtattctctgtgttgtcttttagctcattcaataaataaaggtggtgtgatttttttttcctcctgtctttttcatttgtagaaactggagacgtgtaaagaagataaataattgtgtaattaaactttccagaaatttatcttcctcatgtgcagtttaacaaacttggtcaaactagttagcaaattagaacttcagaatctaatgatagtttagggtttctaaaataaggttttttattgtaaaaattgacgattgccctgcatttctaccaagtcctgtgaataaagagatgggagatttgattccgtcagaagagactgtaatccgtgtcgtcagcctgggagccttccccagtgtaatgtagctttctctcttaccttctggaagagggaatgtttcatttattactgtttgattttcttgtatctggttctactcccaggatgaaattatccaactacatatatatttagaggaagaaagtgaaggggaaatttaaaatgtttacggcgcttaattgcctggaaatgaaatgaaatcaaatttatcagtttttttccccctaattacccaaaagatcttttgcaaactatgttacatgaatgcttctgcctctttaagacaaagaagaatgtcacccaaaattgtcatttttttcttaatgttcatcataaaagtcctaaaagagtaactgtaattggatgtttattgtttttatctaaagtaaggtgtatgtgtttgagacaagctggttttgttgataaagagatgttaaataattgtgaagccagatatgcaatgtgtatctaaaaagcaaggaatttgcagccgttttacaaatatctgtggaacatgtaaatactgtcaaatggaaaataaaataagttataatttttgtgaatttcatgggatgtcctatgattggaaaaattataactcttctgattctaatgtggaaaaaaaaaaaaaaaaaaaaa

SEQ ID NO: 24691 - DNA, 2777 bp, Homo Sapiens
tgaccctcaagctgggggtagaagagaatgctggggcagggggcggagggaggaggaatgggacagataaaagtctccgaaggttcattctctagaggataatgataagttttccgtctctacagaggacagaactagaggaaatggacttaattttacagcaggagggatggcagttagacctcaagaggaactccctgggctggaaggatcttcagaggtcatcccatccctctccctgcctccaggcaggacggccccttccccagccaacctgcactcacaggggcctccccaagctgcggctctccgaggaaggagacgacccagcttcagcttccacacctgagcccagaggccttattcctccatcagggacattcttgaggtttaaccttgatcccttatgctgcgggccccagcctgttgcttctgttagcagaggttgggtcagctcgcaccactgctctccagagaattgctggctcacgtggctcggagagctcccagcgcctttctcaggcacccctccccccactgccgttcctccaggccaaggaaggtagggttggggctggggcagcttgtctccttgtgacactcctctcctcccacagggtccccagccccaccccagccccaaaggaggctgttcgagagggacgtcctccggagccaaccccagccaaacggaagaggcgctctagcagttccagttccagctcctcctcttcatcttcctcctcctcctcctcctcctcttcttcctcctcctcttcctcttcttcttcttcctcctcatcttcctcctcctcgtcgtcttcctccccttcccctgctaagcctggccctcaggccttgcccaaacctgcaagccccaagaagccaccccctggcgagcggaggtgagtgctgtcttgcctgagttgaaaggtgggtcggggagtgacttgtccagagaaggggccctggggtgtgagctccccgctgggtgtctcacgtggccttgggcatctggttgtgggggaggaggcacttgctctcctctccccatgctcgttgcaccctgttctggcgaagggctgcgccatccacagcggcgctcaggccaggaccagggggtccttggtttcttcctctccctccctcaacacatagcctgttcccagggttctagctttgtctccctgttgctactgccagggctctggtctggccaccatcatcttctcccgactctgtccacagcctcctccctgtctccccgtctccacgccattctcttccacatgtagccagagggacctttctaaaacgcacatctggctacttccctccactccacaaatccttcgggacgccctgtggcctgcaggacaaagccccacctctgcgggagtggcgtgtgaggctcttcaccaacgggccttgcccgccctgtgttctcctcctgcccgcccccacacatgccctgtgctccagccacacccagcgccttgcagtctaaggagagcccatgcctttggacatgctgttccttctgcctggaatttccttgtccgcctggtgaactcctcgttctgcaagactccgctcaaaacagcaccttcgagaagactgccctgccccttccctgccttgccccatgtccccctcccttgggtccccagagccacgcacatccagccctgcttcccacacacggggccgtgcgtgcctttcttcaccactgagctccttcaagggcagggactgtctttatctttgcatcccccgctgcaccctgtgcctgcccactgggcactcggtggatggtgtgcgggcggatgggtgagtgagcggacaaaggtgggtctgaggctggccctgtgtggtgtgaggtttggtggtcaggacctgggcgggtggtcctgagtgctggcccgtgtgcttgaaagggtgtggtgctattgggtcctactgtgttccccaggtcccgcagcccccggaagccaatagactccctcagggactctcggtccctcagctactcgcctgtggagcgtcgccgtccctcgccccagccctcaccacgggaccagcagagcagcagcagtgagcggggttcccggagaggccagcgtggggacagccgctcccccagccacaagcgcaggagggagacacctagccctcggcccatgagacaccgctcctccaggtctccataaattgtctttgggggattccaccacacccaatgctctggagccacaaggagtgtcccttcttccccagcagagccgtgggagggtccttgtctgctctcctttgaaccttggcagcccttggatggagggctccctttccctccccttttttttttctttgttcctgtgaaatgttaatctccgtgagttcttcctggttcatgtgttctggggggtttggggtgggagggaatgcagatgggagttgggggaggggaggatacagttcaggataccccagcctggagtcagggccagggaggcatggccccacttgtatccagaagttcccaggggtgattgtgatggtggttgggactggaggttgtataaggtgttcttggaaggaaggggcaggagttggaattagttggtccctactgtcccccatgaggttgtgaacccctccccccaacttttcatgtttcttaaaggcattttggttttttaaaatctgtacagcaagagcaactttttctgtcaaataaaaatgagaaatgcaaaaaaaaagaaaaaaaaaaaaaaaaa

SEQ ID NO: 24692 - DNA, 4056 bp, Homo Sapiens
actgaatctgggttaaatgtcggtatctttttttcttaaaccatttcaatttggtgtcccctatacatatccaaaactagcatcgattggggttgttttgaactaatgggtcttgtcctcaagcagcactattttgttcaaaataaaatagttgagagcatgcccctaagaagagatacatctcaaggactcaagtgcagggtgacgcctccttttggaaatgagcctctcctggtatcaggcctagatggtacttctccagccttccgtttcttgttctataaaacaggggtgatcacagcacctacctccgaaggttatcacgaggactgccatcgtggctgcagagtgccaggaccaccggcctggtatggaggtacacactcagtgaaggccatctgctgtcattgtcattgtcatagttattgccgtcattctgtggcttgtcaattccagaactggggatagaccccaggcctcctgaccaccagtctcatctttctcttatgcgatgacttaaatggtgtttctgttttttgcatgcaaatggtccgttcatctcctttgactagttatcaacttaccttcggatatattaactttatgtagcagttctttctatattgatggtgatgttctcttttccaattttattgctttgctttttgtagcagttttattacgtttttgttgtgaaagcttttaatttttacatatccaagcattcattttttgtccactcagtcataactttcattgcttctgtagctagatatgatgacattttctctagaattttaattacaaacaaaaagctgcaaccccagcccatcagaaggtgagtacaccaggtgggcaggctggatggaaatgggccagagaagcaggctctttcctcatccgagatgcggactccctgtctatctgtgggcaccacttgactatccaacctgaccactgcggcacactggagatgctcccatcatagattagccagaactctgtgactgctcatcattatagaccccgccagcagcagtggggcttggcctcacctagatcaatggagtggtccaaacttggtctgggagcaagcagcccagccatcctttgagctcctgggagccttggcaatgctccgagtggattcagtgactgagcagcagattcacccaagaaacatctccttggacacaagaagacttgcctagaccacatcctcctttcagccggtgactctagaactagaaagagattggttcataggcttctgctgtgggcagctaggggaaaattcacccatgtgttctggcatcacttcctatagccacacctaagtgagggcaacagagcagaggctcggagaggaaccctgcccctccgatggcttgtgcgttatgctgatagaagctggcagcactgccctgggctatgatttgcaacagccatgcccaggaggagcactaaagcaaaggtttggagggcagtggaacccttctgaaagcctgtgtggcatagaagtagaagctggtcctcctgggtctgagctaccatttccagtgggctcccccaagaggaacagcagcaagggctagcgaggaacctgcccctccagtggcccacagaagccacagatagaagccagccccaccagggctgtgctgtgacttcccagcagctgtggctggggacagggacactaggagggcctggcaaggaagtgtgcccttctcgtgggcccaccaaggctgaggcagagcttcctagcagacacaacttggaagggcttctcaggcacccatcctgacccccaggctggagaggagccaaaagcacttgttacatagtgattccttttgccctgtgggcctcagttcttgcagtagttgtgaatctgtgtctgaaatcactactttcttctcggatcctttttctcttttcgagttgttaggatgtgttttgtacagctgtcatttgataaagaaggttgacctctaccaggggcaagtctggcacctttacctagaagtactctgccatgtcttgcccgttcatttatcgtttgttgggtttcatgagggatcccattgaagtagatcccttttatgaagggatcccattgaatgcagcattaactcagaacgtagcataaagtcgtcactgctcccagctgggacgtggtgtcttggcatcccttcctgccgtccttgactctttcccatcttcagttctataattttctcccaaacaaatgctcttttagagttaacactaaagatctggtctttgccgtcaaggttgacagaacagctgttcatggtgtttgcggtgaaacccgtgttctctttcaatgcagtctgtggctttaacgtgtgtcctgtaatttcgccaagttcatttcttgcctctggtaacttgggggtggatttccttgggctctctaggtgtactgctatgtcagatgcaaaatgtcacccagcttcctgtcacatatccttgtctgtgcattcatgcatctacctcattccggttttctttctaatctcatgtattcctgttgtgaggaaatgtgttcttttcccgatccttttgtagttcatacacgtgacaattgggtttccacgcacgtgcatgacatgttcctccttcaaaccttgttactatgtcagcacattaactgcctggcatggaaaaagaaaaaaaaaaaagaaatatgttcttttcctaccatttgaaaaaaatcctccattgcttttattagagttttgaatacttgtgaaaattttcaaaagaaagtaattgattaccatttttgctgcttattacgatgagctgtgtccattagctgtgtcaccccactcttgcatttccagaatagtccctacccaattgcagcgggcatgtttttgagtggtgttgcattccatgtgcttgattttgtcctagaactggcacagcgcctgccctacctgcagccctgggttgtggccctgttgcgtaccatgtgatttgccaccccgcttctaggccatattaattcagccagaactgaacacctgacccaagggcagcaagcaatcatcagagcatagagctgacagaacatgatggaccacggacaccaccaggccttccagatctgaaatgcaaacaaggaaacagaagcttctaggcatcagaaggtgtggggagcagcacagtactcagaggagtgaggagcgtggcgcctgctgggaggaaggcctggccatggtatgttcttggatttctggcagcagccctcattggtccacgtgcgtccccactacagactccttgacttgagccagcttgagtgggtctctactcttttctattgtgttttgccacttggctgcttcctggccaagtcgcacctgactgcatgaacacctgttcaaacgtgtgttctctgttctctaagatgggtgaaagtcgatgccttctagtctcagtgaatttaacctgtgattttatgtctacgtatattgttcctttactgaacccaccacatgcgggccataaaatgagtgaaatcacagtgcaccctgttctcttatttttgaagtgtttcacgatttccagcatgtccatcagatggggggattgctaacttctctcttactcatgtacttacattctgtagttctcattgcatcactttggatgtttactttgaaaagcagaaactgtctctttaaacttggccctcaatgtcatttgcgtatctctgagaacaatagctatgtcccaccccagtttgtatttccgttggttgttggcacttttttctcattcccccatctcattaccttgtctgttttctggcactcactataatcagccttgcactagagctgtttgtggacttggcttcaccccctcctcctcagccctcccccacccattaaattgtgagctcttagaagacaggggtggcctttcatgtctgatcccctaccaaatctagcacagtgccttgcatcaagtagatttcaataaatatatgttaaatggcaaaaaaaaaaaaaaaaaaaa

SEQ ID NO: 24693 - DNA, 1238 bp, Homo Sapiens
cactaagctgcctgacaagtagttgtgttattggcactattaaaccatctttcttcctactgtccataaaaacaggagaactcctgggcttccctgtctatgcttcccgtgaaaagcatagctataagaaattgaaacaatgataaatggccccctgagagaatcatacagtattatgggcctgctacttaggcacaagatggctcgtggggataccggatccccatttatatgatcaaccgaatcatacggttacaagctgtcttaaaaataatcactgcaaccggcagagccttgactattctggcccagcaagaaactcagatgagaaatgctatctatcaaaatagattagctctcgactacttgctagcagctgaaggagaggtctgtaggaaatttaaccttactaattgctgcctacacatagataaccaagggcaagtagttgaagacatagttagagatatgacaaaagtggcacatgtgcccgtgcaagtgtggcatggatttgatcctggggccatgtttagaaaatggttcccagcgctaggaggatttaaaactcttataataagagttataatagtaataggaacctacttactgctccctcgtttgctacctgtacttcttcaaatgataaaaagcttcatcgctaccttagtgtaccaaaatgcatcagcacaagtgtactatataaatcactattgatctgtctagcaagaagacatgggtagtaaacatgaaacaactcctgctattgagtgagagtctcaaagtgggggaataagggaggagaccacccctcatattgtcttatgcccaatttctgcctccaaagaaagaaaaagtaaaaactaaaaggcagaaatgaaatccacaagcagacagcccgggcgccacaccctgggactggtagttgaaaatcaatcccggacctaatcggttatgttatctatagattacagacattgtatagaaaagcattgtgaaaatctcattcctgttttgttccaatctaattactggtgcgtgcagcccccagtcacgtacccacgtacctcctgcttgctcaatcgatcacgaccctctcacgcacacccccttagacttgtgagtccttaaaagggacaggaattgctcactcggggcgggggctcggctcttgagacaggagtcttgctgatgcctccggcctaataaaccccttccttctttaaaaaaaaaaaaaaaaa

SEQ ID NO: 24694 - DNA, 4412 bp, Homo Sapiens
gtgaggcagctctcggcccagaagcacgtgctggagcctgcggaggagaggatcctgagggtgggtgaggctgcggcagcccccagccagcctaccctgccccgggagggactgggtctgctttgctcactgcagcagccccagcacctagaattccaggggcacaggctcagcggtcacaggactcactcccagttccatagcccctggctgagcggctcctttgcacgggggttacacagctctgtggctctccagggactgctttgcagcctgcaacttaatcctgtttcctataggcccaagggaggatggcggaagccagggttttcttccttccaaaggatctgggagagtggcacccttctcctcagccatcctccagggcacagggtcctagccctccctctgtcctgtactcctctcctgaaattttttttttcctgagacagagttttgctcttattgcccaggctggagtgcaatggcaccatctcggctcactgccacctctgcctcccgggttcaggcgattctcctgcctcagcctcccgagtatctgggattacaggtgtgcgccaccacacccagccccatgattcttgaagaccagatcctggcctaaatgagtggcatccccctgccccagctgaccaactagcagcagctcccaaagcccttcacccgcttggagccagcggcccctgtgccagctcaccaggcctcaccctccatcctgctggggtccaactggcccctgtcaaaggacaaacgcagagggctggccttggctttgtccatactgacgatgcggaccagcttctgtggtcccccagaagatggctaaaggagggacagagaaaggatgaggaggagctgttgaagccatcaacaggaatgggaattcaggggagatgattggcactagggcgacctgggagtgatgcagaggcgcagatgctctgagaacagcctgaggtgtgtctgcacttgtgcaagagcctgcaggctgggcaggggctgcagaccctgccctggtttgaaggggtgcagaggagagacaggtggggttaccctccaatcagcagcccactctccacacagtgcctcctgccaccctgccagcaccgagcccctcttccagcccaccccagtggggtccaggcccctccctggagcctcaccttgcgggtcacggtgcactgctgagtcatgtcctggatgagggctatgagctgctgctgagccctgcagagaccagcagaggccctgacccagctgcctcctgccaggtgagcagggcaggggagagccgagcaggggagagtgggggagatggccgggtgggagagaagggcctccacctagagctccacacatccctttgctgcaggctggagcgctccatcctggcggccatgccagtctccagagctttcaaaagactccagggcctcggcccacccctggagatgctgatttacttgtcctggggcgggacccagggggtgctgttgagcagccagcgtacagggccccactccaggacctcaatattcatggtgggtccctggcctgcagcctggagtcaccgagagagctgttagaaatgcagagtgccaggcctctccctggacctgctggctccgatccccaggggacttgagtttgcaatgagtgatgggggtgctgagctcaacactcctgctttctagcactgtgcgttccgtgcacttgaaacttggagcctcccataggctgatctagaacaatggtttccttttctttttttttttttttgagacagagtctcactctgtcgcccaggctggagtgcaatggctcaatcccggctcactgcaacctctgcctccggggttcaagtgattctcctgcctcagcctcctgagtagctgggattacaggcacctgccaccacgcccagctaagttttttgtgtttttaatagagacagggtttcaccaggttacccaggctggtctcgaactcctgacctcagatgatccacccgcctcggcctcccaaagtgtttggattgcaggtgtgagccaccatgctcggcctagagcagtggttttcaatggagcaaggcagggggcaatgtcactccccagggagggtgaccagctgtccctgcttgcccaggaccgaggggcttccctgcaagtggggctttcagtgctaagaccaagacagtcctaggagaaccaggggacccttggcaacctatagagacatttctggttgtcacagctggggcatgggagtgctcccggcatcctgggtagggcggccagggatgctgctctatatcctgcagtgcccaggacggccccaccacagacggggatgcagccccaaacgtccatggtaccagagctaagaaacccagagctaagaaacccagatctagaatgttctagaatgaacatttcatttgcaatatataaagcatccatcacaaagaaacaacatcttcagcagtgatcttggcaggcttccctccttaggggggtctcaccacgcccaccctctattgctgggcaggaggaggaagccgaggcaggctgggtgccatttccctgtgggcctctctggggacgcaccgagctcgtggcagctgctcacctggagtagttggggatggtgccgtgcgcggcagtatccttcatggtgtaagagttcacgcggtgggcatgccagcagccgcagccctggaacatggtgtcggtgacgtgcaggacctcgttgcaatgcacctgcagctcccctttggccctgccctccatggccaggttgacccggatgtagaatgagtcccccgaggtcgccactttggcctccaggtcctggagtagcctcttataacctgataaaaggggacatgagccacagatgagccacagatacgagcctctgcgaggaaggttgcagaaaattaaagtaggagagaaggaaggaccctcccagtctcagaagctgctctggcactgtagtcagtgggtgggaggtttccagctggcttgggggcctcctggggacctggggcacagcctggctgatcctctcttggctctgggggtccctggctgctgggcgtgcagaagaaccaccagggacttaagggtcatggagtctggccaggcagctgtgcacacgagaggagtggtatgtgtaccgtccgtgttgaccttcacagacaggcagcagaagccgtccaccctcctgagaagccccacggcctcctccagggtcgtgtcctccaggactgccttgaacaagggctctgaggcttcgtaatcaacctgagggcaagtcgagaaggtcagtctctttcccccgggactctgaatccagccagaaggcagaaggcgctgagggcactgaggcgaggcgcgggccagccctgccgtaggaccactgcctgcacgccttggtcaaaacaaagccacacaccagagcctctgtggggccttcacacctctagtgatgcgtgctacacatagtgctggccagagagtcaactgccaacccttccccagtcgagatcgggggttctttgtgataagcactttcctgtcttgaaaaagaaaagaaaagaaaagaaagaacctcggttctagaacattcaagagcattctagatagaggtttcttagccttgggatcattctgtgctgctgcgggctataccgggccctgcaggatgctgagtggcatccctggccttcacctacccgatgccctggctctccacccacagccttccccactgtgaaggcccaccccccagggcttccaccatccacttcatttcttctcaatattgttctaagcttaggagagtagatatttttacaataaaaattaagatgtgttttaacaccattagaatctaattggcccccttaggatattgggactatctccctgaacatcgtcaaggggctctgttgcttgaactacctcagagctgataattgggaaccttaagagcagggttccccaacccctgggccacatactggtactggtccatggtccatcaggacccgggtcacacagcaggaggggcgtggtgggcgagtgagcattacggcctcagctccacctcctgtcagctcagcacagcagtagattctcagaggagcatgagccctatcgtgaactgtgcacgtgagggatctaggtttcacgctccttatgagaatctaattcctgatgatctgttaccgtctcccatcacccccagatgggaccgtctagttgcaggaaaacaagctcagggctcccactgattctgaattatggttcagtgtatgattctttcattacatattacagtgtaataataatagaaataaagtgtacaatcaaaaaaaaaaaaaaaaa

SEQ ID NO: 24695 - DNA, 3502 bp, Homo Sapiens
gccatttcctgcttttaagtcttggcaggaggactctgagtctggagaagctcagctgtctccacaagctggaagaatgaatcatcaccccttggaagaggactgtcctccagtattatcacaccgcagtttagattttggtcaaagccagcgtttcctacatgatccagaaaagttggattcctcatctaaagcactgtcttttactagaattcgaagatcatcctttagttcaaaagatgaaaagagagaggacagaacaccttatcagctggtcaagaaacttcagaagaaaatcagacaatttgaggaacagtttgaaagggaaagaaatagcaagccctcctacagtgatattgctgccaatccaaaggtattaaaatggatgacagagcttacaaaactgcggaagcaaattaaagatgcaaaacacaaaaattctgatggagaatttgtacctcagacacgtccacgtagtaacacacttccaaaaagctttggctcttctctagaccatgaagatgaagagaatgaagatgaacccaaggtcattcagaaggagaaaaaaccatctaaagaagcaacccttgaacttattcttaaaagactgaaagaaaaacgtattgagaggtgtcttccagaagatatcaaggtgaccaaggaagaaaggcacattgttaaacctctctatgatagatacaggcttgtaaaacaaatgctgacaagagctagcatcactcctgtccttggatctccatccaccaagcgaaggggtcagatgttacagccaatcatagaaggagaaactgcacatttttttgaagaaatcaaggaggaagaagaagatggtgttaatctgtcctctgagttaggtgatatgttgaaaactgcagtacaggtacagtcttcattagaaaactctgaatctgatgttgaagaaaatcaagaaaaactggctctggatctccgattgtcaagttctcgagcagcttctatgcctgaattattggaacaactttggaaagccagagctgaaaaaaagaaactacgcaaaacgttgcgggaatttgaagaagcattttatcaacaaaatggaaggaatgcccagaaagaggatcgtgttccagtgcttgaggagtacagagagtacaagaaaattaaagccaagcttaggcttcttgaagttcttataagcaaacaagattcttcaaaatccatataagatacgttccttgaaaattcatatcataaagtcagttgtattccttgaagctatcatcgtgtgtacttggctggtacttaaattcgttttgtcaggcactcagagaatctcattttgtacttggttgtggtgccactaaacaaaacaaatgatgggagagtaagtaggccctctcaagggagcgtaagtgatgttccatattaaccacagactgtcctctccacctttagcaaacatatggtttacttcattgttttgtactacagatacatccttttagcaaaagactggaattttatcctttcaacttcaagaactttggaaatgcaagctttttgttattaccaactttttgtttctcattactgaagaaaattggaggaaaatcttcatactgaattcttctgttgcctttttcttacagaatgactgaaaatttgaaagaaaagcctataaaagtgcacatacgcaactgtgttctctgttttcctagaaaaccaaaatcaaactgagatttcaagtcgtactatggaacacctttctgtttaattcccaaagtgacatcttctcacaggtagtatgttagtaaaattttgcaattcgctggtcacacagctcccggatgaagataacagttggtagaccaaaaggtgacctcgcttagtatattgaaaacacacaccacacatcacacacagaactgaatcataccacgtgctgcctatgggacttcagttactgtttcctgagttactgtttatccgctggcaatggtgtgatttgtctggatcagatccgtgctattccccaacccacctccagataatgtgagaaaatagccatgtcagtatgtaggaactctgatggtgctcagatttgtgtgttcaatcaatgggcttaaatcagcaaaatattatgcctaaagtaaatctgttcttaacaagggctctaccactgcattttcacatgtaccttcagggggttatctttttttttttcccctcctattttaatcagcaaaatccataccaaaacaacgacaacaacgccctcttaagggaccaccctttggtcaatcataacatgctgtttaaagcagctgtttacaggatgtgtagtggtatgccccttgtcatatactcttagcatatctttttttcctttggctttgcatggcttttcttcaggtactgtctcggtatcattctgctaatcattgttacagaatggtgacttcatttgtgctaacagtacaacagcagatttgggtcaggcttaatctaagtgttaacttttttttctggtgcttttttggattgatgactgtctcactttgactatacccatgttttgcatgcaatgactcatgcatggttttcttaactagctaatattaacaatttattccatataaaaatggaattttgcaacatcctttaataaggtgagggaagcatgaacctcagacttctggcactattacatagtaagcacatgaagtagtttgataataaatagcagttctagtacttcacatttcacccgtgtgtgcaatgcctttttctggggggtggggggtgagggaaaacctggtagtgaatgtgtagttggggaataaagaaaagcactaaatcctgccctttttgtgtggtttccttttgatacaactaggttattcataatgtatacctagaaaagtgaaattgaaaataccaaaagatgtatcatttttatttgaatccatcatgcagtgtacatttcagataatttccttcagtctccagataggagtgtatccaaacatctaattttatgtgcactgtgtatcttatatgaatgttttattttatataccacatgcaaaaatgtccatatgcactatttaaatgttttaaataatatattccttctttataatgctaaatctatatgagtaccatatttttataagtcagtggtctgactggtttcattttagaattaacagctgcttcaatatgttattcaatgttaatgtttggctgtgagtagaatatgtaaaagtggcatggcagcacttatgctctgtgacagtattgtgtgtcatagttgagcagtagctggtagaattaggcagttggtgatagttttactttggtacaaataaaaactgtatatctatatacaaataatatatagatatatatgtccaccagtataatggcattgctgtgtctggcacttcattgtacagacttttataataaaagaacttgaaagttccaaaaaaaaaaaaaaaaa

SEQ ID NO: 24696 - DNA, 5994 bp, Homo Sapiens
ataattaagaaaattcttaacctgaagtcagatgaacacatatttaaatttctgaaggcaaaatttgggcttggagcaacaagggattttgatgcaaatctctatctgtgtgaagaagcttttggcctcctgccttttaatacatttggaaggctttcagatactctgcttttttatgcttacatattcgttctgtccatcacagtgattgtagcattcgttgttgcctttcataatctcagtgattctacaaatcaacaatccgtgggtaaaatggaaaaaggcacagttgacctgaaaccagaaactgcctacaacttaatacataccattctgtttggattcttggcattgagtacaatgagaatgaagtacctctggacgtcacacatgtgtgtgttcgcatcattcggcctatgtagccctgaaatatgggagttacttctgaagtcagtccatctttataacccaaagaggatatgtataatgcgatattcagtaccgatattaatactgctgtatctatgctataagaaccagaagtcctgacacctgatttcccatcactagcaattttcctgattcacccacccaggagacaagatttgaatgagcagtaaaaatggccaaagatgagatgaccaaaaaaacagtgataggtctcaaacacagccagagatcaatcaggtgctgctttgattctactagtggttcttaaataaaagtattatattttctacgtcagtggagcatacatacattgtcattggtcttctatgctaatatgtgaagtgaattctacctttgaccttagaatgtatatagatatgatcaagtctttttagtcaactgtcatttgataaaaacaattaagatttagttaattgttgaattaaatggacttaagatattagataagtgggtaattcagagagtaatttttacattttatttagaaaaccttaagtactcaagttgaccaggaggcaccaagtggtataaatacagccagatgtaccagatattcctggagagccctacatttaaatattattctctttcattgtaccagcaattatattaatatatgtcaaaccatttgaccagatttctagtacaaaaatacaatcatgctattttgaaatgaaaagggggctggatttggagccagggtccaggttgtagctctgccgcttgtgacttggtcaagtcagatacctctctgagcctcagtttccacacttctaaatgaaaaataaatcccagtgggtgatgctgcctgttgcgtcatccatgtcatgggttattgtgaggataaaacaatgccgtattctaaagcatttttgcagcagtaaaatggctctgtcttctacaggatacattctacttttaggggtaaattgcatggtattagttaattacatattcctaacggattgtgaactttctcatggttggcattcttgtcatgtcaaaataatgttttgccaggtattatcatcacatacaatagcatttctattggagcaaaataaaaagctcattttttaaagttggcgatacctcacatcctaattagcttcagctgaagataatttcagaaactttccaggcgctagttcccttgtattaggagggttgctgcagaggtgaaatagttgtatattccagtagctatgtttatttagttcacacattatatgcagtttatctttttttcatttaatcttagtgatagttgtgggtgtaggggtggattttgtttttgttttgttttgtttttaatttcagttctggccaggaatgatggatgaactctccgagttgagagaattctatgatccagatacagtggagctgatgaactggattaactctaacactccaagaaaggctgtgtttgcgggaagcatgcagttgctggccggagtcaagctgtgcacgggaaggaccctaaccaaccacccgcactatgaagacagcagcctgagagagcggaccagagcggtttatcagatatatgccaagagggcaccagaggaagtgcatgccctcctaaggtccttcggcactgactacgtaatcctggaagacagcatctgctacgagcggaggcaccgccggggctgccgactccgggacctgctggacattgccaacggccacatgatggatggcccaggagagaatgatcctgatttgaaacctgcagaccaccctcgcttctgtgaagagatcaaaagaaacctgcctccctacgtggcctacttcaccagagtgttccagaacaaaaccttccacgtttacaagctgtccagaaacaagtagcgcagatttctgcccagtgtctatttttgatacggagaaactgcatcatgatgaaactcaatagatgacgtttcctatgtaagtaggtagcccaaaccttcaagctgtgatatgagtaagttctacagatgtttacacaagtgttgccatctttgaaagcatcttctacaagcagaagtctttttcgttgtgtgtctatctttctcattaatgttctttagcctaaatgttaacaactttctaagagtgacctagaattatgttgttggagagaatgatgtgtgttccatggatacctggataggcacataacatgttggaagatgagcacctgctcaggatttgaaatacgtttaattttcaggtgacttaagacagctatgattgaatcgactagagatgatgatcgacttatttaatatgatttcactggtgaagaccaattggtagctttttaaaaagcactttagtgtcctgttttaccttaaaatgttataatattttccagttgtcatgctgtcaacattaacaaaaaaaatcatgttaaggctttgtatcaaacattttgttacactctgtctgaaatgtaatgtggagtacttcagcagtatgtgtcatgtattgtgtgtgtctgtgtgtgtgcatgtgcacacatgtgttttaatgctgggcacagaaaagtgttacaagttccatatcgtaagtccttaaaggggcagaaatatatgtagccaagtagaatttattacattttagtgttattattttaaaacttactgatactctttaacctctcctgcagtaatagttttgctttatttcttactcatttcaatttattgggtttgcaaaattttgtaaactttttgtgtttttagcctttgtattttttacagcctagaatcttgcaaagtctgaatattttttaaatgttctatcttaactagttcactaatacagtatttttagcagacagcattttcagacagcattttcataccaagtttgacttgtggtctccaatcttactgggaaggccctggtagtgtaattcttttccttattaaaaggtaaccaagtgcctctaagtcatgcttatttgtaaacaacaaagaagagtatatgtacctgctcaaaatttttttgataattgcttatataattaatttctaatgatgaggacatgtaaaagttgccagtaagaacatagtatgcatttaattaaatcaagatggctaatggaattaactttctcccctgttcttgccaggtggaaatgatttaagcatttctccttgcagttgtattgaagtaaattaccataggcatcaagatggctgcatcacattttcaaatgattttatattcagttgctacttataaagcagcattcaaaaagtcttttacactgtcatgttggacacaagcagactcagcttttatcaaaacttgtttaaataaaaaattgacagtagctgggttattaaattatgcaactgaaactcctgaattatatcttttctgtatcccttaataagattggagaccactgccgtttaggataatacaataataaaacgttttaatcagtactaaaactttaattaagccaataatgatgcatgcctgttgtagctgacagcatgggtcagtacatccttcagcgagtgccttactctaattgaaaccaagcacacgtaaggtacaatatgttagactctgtgattttgttttcaaaatcctctgttatggctatatttaaatttattttaaatattcctgtatgtattcatctaagcatttgggcatttggagtcttaatatacaagaaacacgtacttaaatttttatgcttatcaccgcaatgatggcaaacagtgattttttttttcatagtttaggtgtcattgttgccagcacctttagtgctcagtcttcagtgaaaaatataaagtgccaaaaaaatcttgcaagacagaatccatacttaacactctttccaagacactgtgaccatgtacagtagctatttcctgatgaccaaatctctcaacgaatcatgttattaataaatatttttagcactcatcagtattctccaatgtgaccttctcattggagtacacagaaggaaagcaaagaagagcatctgacttctagctctggcttacagcctctctaccaggccgaagcaagagacccgcggcagcagctccccgccactcagacctgggtggtgataacctcaaagaatggctctgttttctattgacagaaaacccacttgattttgcttctgagttagcagtcagaagaccctctaagtacaatagaagtgctcttaacggactctgcctgtgtgactcccaggccccggagtctccatctctctcgtaagccacctgccacagcacagctggaggctgttctctggtgttctcagcgctccggctccctccctggagttgtgcacccgtcccaaactcctccatgcaagttctgcttcctcttataagtacacaactcagttaagtattcacatacacacagaaaatacgggtgtgaaaagaaagaattttctgtaaaaattaagttgaatactttggtaaaaagtgataaaggctgagttgccaataaaagttgcttttaaattaggtgtggctgggaatattataagatattggggaaaatatacaaatcaagaaaatttctgagcttagattgcttcatagatttatttaagtactcatcccacctttaaaacctctaaactgagaagaagggacccaaatcatgttattggtgtgatttatgtgagaagtagaactgtagtcattggacccttaggcaaaggaaaatccgtgtctttatatcagaagatcggcaaacgaatgtatattacacagtttaggttatgattccctactttaacctacttactttattaaatgaccaactactgatactgatcacaatagttattagagattctaatttagttggaaggttctaatcactttcattacaggcatttgaaaaatagggattcatttcgaatatattagccaggagcatagttagatgttacccaggccatttatcatcctgttaatgatgattttcccgacccttgtgagatcagcgtgacaggagtgtgtgtgtgtgtgtgtgtttctgtgggtgtgtggttttggttgggtgctgccaggtggcaaaggcatatgtaaatacatctgatctgcatctttatttcacagttaactaaaagtaaaaatgtctattctgattccatattgattttgtctaagatgtaaaaatttgagttcatctttggccaaaacctacctgaattaacatacaaaatatttgatttttaaaatttaattcaaatctcaaaatcaattaagtattctcagatcctatatcttggttaatatgctcccagatactttaaacatggcaaccttttggcctaagagaatgtttgttcatggaaaaaagcttttgagatgagagggtgtcttactttcttgtggcaattgattttctgttttaacaccctttgggtaaaatcttgcaaagagcttttataatttgttttactgaattgtatggagattgtataccaagtaaagctcttttaaattacaaaaaaaaaaaaaaaaa

SEQ ID NO: 24697 - DNA, 2703 bp, Homo Sapiens
ctcctttttggaaatttttggacacatccaataacagaccagcttcgggctatgaacaaagcagcacaccaggagagcactgaacacgtcctgtctggaggagtggtagtgagtgctatattcttcattttgtctgccaatatcttatcatctccctctaagagaggacaaaaaggtacccttattggatattctcctgaaggaacacctctttataacttcatgggtgatgcttttcagcatagctctcaatcgatccctaggtttattaaggaatcactaaaacaaattcttgaggagagtgactctaggcagatcttttacttcttgtgcttgaatctgctttttacctttgtggaattattctatggcgtgctgaccaatagtctgggcctgatctcggatggattccacatgctttttgactgctctgctttagtcatgggactttttgctgccctgatgagtaggtggaaagccactcggattttctcctatgggtacggccgaatagaaattctgtctggatttattaatggactttttctaatagtaatagcgttttttgtgtttatggagtcagtggctagattgattgatcctccagaattagacactcacatgttaacaccagtctcagttggagggctgatagtaaaccttattggtatctgtgcctttagccatgcccatagccatgcccatggagcttctcaaggaagctgtcactcatctgatcacagccattcacatcatatgcatggacacagtgaccatgggcatggtcacagccacggatctgcgggtggaggcatgaatgctaacatgaggggtgtatttctacatgttttggcagatactcttggcagcattggtgtgatcgtatccacagttcttatagagcagtttggatggttcatcgctgacccactctgttctctttttattgctatattaatatttctcagtgttgttccactgattaaagatgcctgccaggttctactcctgagattgccaccagaatatgaaaaagaactacatattgctttagaaaaggttacaggaatacttaaagatgctggagtaaacaatttaacaattcaagtggaaaaggaggcatactttcaacatatgtctggcctaagtactggatttcatgatgttctggctatgacaaaacaaatggaatccatgaaatactgcaaagatggtacttacatcatgtgagataactcaagaattacccctggagaataaacaatgaagattaaatgactcagtatttgtaatattgccagaaggataaaaattacacattaactgtacagaaacagagttccctactactggatcaaggaatctttcttgaaggaaatttaaatacagaatgaaacattaatggtaaaagtggagtaattatttaaattatgtgtataaaaggaatcaaattttgagtaaacatgatgtattacatcatcttcaaaaatagatatgatggattctagtgaagaccaaaattacttctgtttactttctatcaggaagcatctccattgtaaatatgtatttacatgtttattacaaagacccaaatgaaaaatttttagtccattttttgcatagcctaaagataaaataggaataaaagttctatatttatggattttctgtatataaaactggtttctaattataacttaagtccattaagtaaaatctgtattgccactttaaatgtaaactaaattatttgggagaaacttcaaccactgatatgagataagcaatgagaatagggaagtgtataacatcacagtttttgatgtattacaaaaatcaaccactctataaaataaattttttttacttttggtaatatttgcaaatgaataattaatttattagggtaaagaacttatactaagttgtgtccatgttattcatttacttaccatgttcctttaaagtagaatatttcctttcttgttatatatttgacattccaagctgcttatcaagctggtatccaagcagtggtaagctttcatcctttcttagctccataacgttgtgaaacagccagttaagagaatcgtaaataattgtcaactcacagttgaattctctgcctatgtaggtaacttttttctaatttctggaacatatagatatataagaaatatcaaagaataggtagttatttcaaagtttaataagtaaaacttgttcataaacatttgagcaccatgaaatcaaaataccctataactactttctatagtcatatctaatttatatttttttcatttccagttgtaactagatatgtagtaaagtctgaaaagactttaccatagacaataacatgcagttttatcagcaccaaagaatgttgtccaaaagaaactttttaatacctgtctttctatttataacatctgaatattttcattcttatattaagaattttgataagtagattgaatttagtatgagtactattttcttatatataccacaatggcaaacatgtattataaatcatatttttgtcttaccaattttaatatatgaggggttttagaaatttgttgtaagttatttttatattccttgtcttttgcatattttttggccaaaatcttcaatacatattaaaatttttgagtggtgggaaaataaaaaaaaaaaaaaaaaaaa

SEQ ID NO: 24698 - DNA, 3668 bp, Homo Sapiens
caaatgacaatttcagctctaaatcttctgtaggaatttgtcttgtgcttttgtaaatgtcagtgttactcttagagattgtctcagaagcttcatatggagtcttgtggggtttttttttccttgacttttcccaaccctattactcttcttcagtgtcttcattttgggagaaggtttttccaaagttaccgtaatgaggaagtccatctcaacaacaacactgttatgaccctatcttcagcaatgggaaatagaaaattagagggaaagtccacaaggacaaaacaaaagagggtgaacagacagtagatctttcagtactctgttttgggtcccatgtgatgaatggcattagacatacttgaggccaatctgccactgtcgccatttctggactagttaattgcctcacaagttcttttcctaggaatttataacagttctcaaaaccgtaaagttgttcgtaatatttcactgtatttatatgtaaccctgtagagttgatctctgcatcataagtactctcccagagtttaagaaatggtggcttaacataagtcatgaaagtcacgttgtaaaaatttgtattccttaatattgttactatacctaaaatgtatattaatctttttctccccctttttcatgaaaagaaccaccaatctttccagcaagctgatggagtttaatttaggtactgataaacagactttcttgtctaagcttatcaaatccattttcatttcctatttggagaactatattgaggtggagactggatatttgaaaagcagaagtgctatgatcctacagcgctattatgattcgaaaaaccatcaaaagagatccattggcacaggaggtattcaagatttgaaggaaagaattagacagcgtaccaacttaccacttgggccaagtatcgatactcatggggagacttttctatcccaagaagtggtggttaatcttttacaagaaaccaaacaagcctttgaaagatgtcataggctctctgatccttctgacttaccaaggaatgccttcagaatttttaccattcttgtggaatttttatgtattgagcatattgattatgctttggaaacaggacttgctggaattccctcttcagattctaggaatgcaaatctttattttttggacgttgtgcaacaggccaatactatttttcatctttttgacaaacagtttaatgatcaccttatgccactaataagctcttctcctaagttatctgaatgccttcagaagaaaaaagaaataattgaacaaatggagatgaaattggatactggcattgataggacattaaattgtatgattggacagatgaagcatattttggctgcagaacagaagaaaacagattttaagccagaagatgaaaacaatgttttgattcaatatactaatgcctgtgtaaaagtctgtgcttacgtaagaaaacaagtggagaagattaaaaattccatggatgggaagaatgtggatacagttttgatggaacttggagtacgttttcatcgacttatctatgagcatcttcaacaatattcctacagttgtatgggtggcatgttggccatttgtgatgtagccgaatataggaagtgtgccaaagacttcaagattccaatggtattacatctttttgatactctgcatgctctttgcaatcttctggtagttgccccagataatttaaagcaagtctgctcaggagaacaacttgctaatctggacaagaatatacttcactccttcgtacaacttcgtgctgattatagatctgcccgccttgctcgacacttcagctgagattgaatttacaaaggaattcagtgtcagttcctttacagaggaatgtcttatacttcagcagccctcggttgatagaaagcacaggagataccttatgacacagccaacattttgtgaaacaatgactggaacaaaacagcagccatacttacctttgaggttttatttaaagtttggataccactagctatattttgcttttttcccctcacattgaattttaattccattcttgaatgtagaaatttcagattctctaaaactacatgtcactgtttttatcctagaaaatgttgctgtcagaaggcaaaggaaatgttaccagtgttttcggttcttgtacttttaacatattccatttagaaattttgccattctgttttccattaataataggtgaaatacaggaaaactacatttgttattcctcagtttttaatgaccttttcagcatcaattgttaatcagattattttaggttttcgtaaataatttttttgcctctttcaaaaggttaacaattaagcatactttctgcagttggttgattggatttttttctgaggtacagcattaatactagtccaaaaaatgtcataaactgaactaaaatgatgaactattttatgtagacattaggagtggatcggaatacttctgctttctgggtaaaacttaaaagtttactatttcttatttggtaaatagattttaagccaattctagtaagaaattaataaaactaccttattttgtatttcacttaaggtggaggaccttaactaaaggaccatatttattcattattttaatattataagggaagtaaaaaaaagtgaggtatagtctaaatggtgcatataggaaatactgacagtgtttagcaacatgcagccctttgagatttctgtcgtaatgctaaacttgaataagatggaatggctgaacatgtggttagtcttttattttaagaagaattgagaattgatagatttggagatgagctttgcaaaggctgtttgcttttcatgtctataggtctgtcattgtcctttttcaaagcatttctgaagttattcctacttggatatagttaatggaattggcttaatttgatgacataataaatcacttataaaattttaaatatcaagtgaaaatttagaaaggccattactattctataaaccttataaacttgctctgggagaatgcattctaaattatatatagtgtttcagctcccattgtggtgttcatagtcttctaggaacagataaacttaagtattcaattcactcttggcatttttctttaatataggctttttagcctatttttggaaaactgcttttcttctgagaaccttattctgaatgtcatcaactttaccaaaccttctaagtccagagctaacttagtactgtttaagttactattgactgaattttcttcattttctgtttagtccagtgttaccaaggtaagctggggaatgaagtataccaacttctttcagagcattttaggacattatggcagctttagaaggctgtcttgtttctagccaagggagagccagcgcaggttttggatactagagaaagtcatttgcttgtactattgccattttagaaagctctgatgtgaattcaaattttacctctgttacttaaagccaacaattttaaggcagtagttttactggccatttaagctctttgtacagtgtcaatttgtaaaaaagaaaaaacgaaaaaaaatctcaaataaaacatgagataacattttaagacttccaaaaaaaaaaaaaaaaaaaa

SEQ ID NO: 24699 - DNA, 3025 bp, Homo Sapiens
gggttactgaggggatctctggtaatcctttactgagtgagaaccccagagctgttcctaatctagacttagaggttactggcaggggcaaatgccaagccttttgtaggcctatataggactttgcttggaactggtatgcactgttgatccaacccatgaaagctatgttttggaaacactggaatccagttgcttcctgttccacagtggcatcttcagttgccccctcatcttacctgtcttgagtcttttcaaggatctcagtgtactctggattatttcaggccaaggtcaaaaagtggtatccctttgggcagaatctccctgcttgccctgcatgaggtctcctaggcctacagtctgggccctaaccaggctctcccacacgttcccaagccttcacccccaacccccacatttgcctcccaaagcccttggaagtctccaaggtctctttagtccttcctaagccccacagtactttcccgtagtcctgaggcttgggacctcctggggttcttaccttccctccccattgctgagacagtctgagaagaggcttaggaatttgtctgtgggagtttattcatctgtctctcctatttacctctcccaaaccaggatttccacttctcaaacctgctgtgatctcacaactggagggaggaagtgagctggggggctcatctccactggctgcaggaacaggcctccagggcctccagactgtagatattcagactgacaatgatttgacaaaggaaatgtatgaaggaaaagagaatgtatcatttgaacttcaaagagacttttcccaggaaacagacttttcagaagcctctcttctagagaaacaacaggaagtccactcagcaggaaatataaagaaggagaagagcaacaccattgatggaacagtgaaagatgagacaagccccgtggaggagtgtttttttagtcaaagttcaaactcatatcagtgtcataccatcactggagagcagccctctgggtgtacaggattggggaaatccatcagctttgatacaaaactcgtgaagcatgaaataattaattctgaggaaagacctttcaaatgtgaagaattagtagagccctttaggtgtgactctcaacttattcaacatcaagagaacaacactgaggaaaagccttatcagtgttcggagtgtggcaaagctttcagcattaatgagaaattaatttggcatcagagacttcacagtggggagaaacccttcaaatgtgtggagtgtgggaaaagcttcagctacagttcccattatatcacacatcagacaatccacagtggggagaagccctatcagtgtaagatgtgtgggaaggccttcagtgttaatggaagcctaagtaggcatcagagaatccatacgggagagaagccctatcagtgcaaggaatgtggaaatggcttcagctgtagttctgcatatattacacatcagagagtccacactggagagaaaccttacgagtgtaatgactgtgggaaagcgttcaatgttaatgcaaaattaattcaacatcagagaatccatactggagagaaaccttatgaatgtaatgaatgtggaaaaggcttcaggtgcagctcccagcttaggcagcatcagagcatccacacaggagaaaagccctatcagtgtaaagagtgtggaaaaggcttcaataataatacaaaactcattcagcatcagagaatccacacaggtgagaaaccctatgaatgcactgaatgtggaaaagccttcagtgtcaaagggaagttaatccaacaccagagaattcacacaggcgagaaaccctatgagtgtaatgaatgcgggaaagccttcagatgtaactcccaatttcggcagcatctgagaattcacactggggagaagccctatgagtgtaatgagtgtggaaaggccttcagcgttaatgggaaactaatgcggcatcagagaattcacactggggagaaaccttttgaatgtaatgagtgtgggagatgctttacttctaaaagaaacctacttgatcatcaccgaatccatactggagaaaagccctatcaatgtaaggaatgtgggaaagccttcagtatcaatgccaaactaactaggcatcagaggatacatactggggagaaacctttcaaatgtatggaatgtgagaaagcattcagctgtagttctaactatattgtgcaccagagaatccatacaggagagaaaccctttcagtgtaaggagtgtggaaaagccttccatgttaatgcccatttaattcggcatcagagaagccacactggggagaaacccttcagatgtgtggaatgtggcaaaggcttcagctttagttctgactacattatacatcagacagtccacacttggaagaaaccctatatgtgtagtgtgtgtgggaaagcattcaggtttagcttccagctcagtcagcatcagagtgtccatagtgaaggaaaatcctaataatgagaaagatatagaaaactcttaaggttaatgccaaaatggatcaagtatcatcagattcatccattgaaaaacctccaagagggcatgaatatggcagagtcttcatatggaaacagtttttattctattcagtttaaatcaggaaaggatgaccagttaaagagaaacatccaaaaatagctttgttttgtaccaacaggaattagaaaatataatgaaaagatttcgttcccagcagcatcaagaaaagtagattttctagaaataaacagttatggaggacttgtatggagaaatttaagtcttcactgagggccactttacaaaggaaatttgaataaatggagagagagagaagccttgttgttggataggaaaacccgtactaaagatactctacctacattaatttatttgtttaatttttgacaacaagcatgtattacttttgaaaagatgaaaaataaagatttatttaaaaaaaaaaaaaaaaa

SEQ ID NO: 24700 - DNA, 3311 bp, Homo Sapiens
gacctggactgctctatctgtcttcacatggattgtggctcataacaatagctaaatgtggaattctgtgtatccgagacgtttatactttggaaacatttgcttggtgtcggagtcattctcaccagggtcatgggattcagtcaatgagaatttcaatggatggacaaaacattctggtgaatgggagagatgatggcacccttgtctacctaaagtggaagcgatttggaggacacctagccagtgaaattctggactattaccagaaactattaatttccctgagcagcgccatggacaaggagaatcattatttaagcacaacaccaaaagtttccgtagatttgggatccgattctgaacacacaaaacagaaggcaagcactgacttatcacaagatgaattagttctaaccgatgttaagaaggaaattccttggatacaacaaaaaagccaagaggccatcaaaaaggaggttaatctgttttccaagaaaaggaaagagataaaacaaggaatcaaatcactttccaaaactattctgaatatgatggaagaaaatgacaaactagaaaatattgcaaaattagaccaacaggaatttggtctggatcttgaggaactagaaaggcttcatgatgaaagtcaggaagaagtggcaaagatgataaaggatgtagagatgcataacttagccaagagctatttggctgaacttatcaaagaagaatgttggaattcgatggctgtgaaaggtcgagctcttaagtgttttcatatcccctgtgtggttgaaaacttcccgatgaaagcgcgcacggttgaagagctgaaagaattggaaagagttttacagcaaaagaagattgaagcagagtgtcttaaactacggaaggaaattgtagaggctcagtctggagttaagttgattaaacagcgtcatgaagaggatgatgaagaagaggaagaggaagacaagacagtaaaatatagcaatttgcccaattacctgcttggtagtctgagtactgattttggggtagatacctctttattgtcaagccaattggagcttcattccagagaagagaaaatcaaccaaattatattattgaaagatatcatttacaaggtaaaaactgttttcaataatgagtttgacgctgcatataaacaaaaagagtttgaaattgcacgcgtgaaggaaagaaatgttcgaattcgagaaattattttagatctggaattggaagaagcagtctggcaaccagaatttgaagactgtgagaagccagagagaacgcttgttgtgcaagatgaggagattacagcccacaaacacattaagccgtggcacaaagccaaagaattgatcgtgaatcatgaaaaggagcactggcttctgatacaggatgccagtacaagactccgagctctgatggacatgatgggaggagttctggaagtcaagaaggaagatattttgagaatggtgattcctcaacctgctttcatggcaaaacctgatgctgtgtggactgaagaagaaagaaaacaattcaaagattatgagaaaaaagtaaaggagttaaatgaagaaagagataagtatagaaagtcattagaagcagaactgaagaaacttcaaaactctattcaagaaagcacacaggcctttgatgaacatttgaaaagactttttgaaaggagagtgaaggcagagatggttaccaaccaggaggaactgaaaataagtaaccttgcattttctttattgttggatgaagaattaagctctagagaaaaattcctgaacaactaccttacaaggaaacagcacgagaaagttatggatcgcagctttaaaaaggaattttctgaaattcctggtcatcaagtggatatactctacaaactttttaaacgccgaccaaggatttccaaacagaaaacgcactcagaaacaaccagcgttgtccctttcggagaactaccaggatctggcaagttgaataaggatgcctttgcccagttaatgaaagctatggatgagttggacaatattagtaacatgccagaaggcttggaccctttggtctggaatcatttctgcatgacaagacgagcaaaagtggaaaatgaacagaaagtaaagcagaaagcagctgacttattggaaatggcaactttcctccagaagagagttgaggaggaagagaaggtgcaacaggagattgagagagtgttccatgaactcatcctattacaggaagagaaagtgagattccagttgaatttgacaatccaaattcttcttaaacaaggacaagtagaactggaaaatttccagctagtactggagtattctgatgcaattctcatcaacaagaacataattgaagacttgaattctgtgattcggactcaaggacaaaagaaagttgctagcatgatggaaagtaaagatgtacacaaaagaatacttcagattgagtgggaacataagaaaatggagatggaaagggaagatctaaatcagaaggcttgggatattcagatgctatttttttcaagagatcgtcaaaagtacctaaatgaaccaaactatgaggctctgattagtattcagattggaataatggaacaaaccattgctgttttagataagatgcacaaaaagaatgtggaaaactgcaagaaactactcaaaaaacttggaaagttcagcaatcaaaaagatatagcaaattatgccctaagctgcaatctacgagaagagttggtagctgtctcagagagaaaagacatctgtaatgcaatggggtctaaactgacttgtgaaaagattgtcaaagaacggtatgaaaacatgatgcaacagcagaagttaacaaatatttcaaaacaacaagctgaacagatttcaatactacagactgaagttgaaagattaagaatgaaaacatttcctgctcttgttcaaatgtaaaaacgctggcaggaaaacacaaggccaaatcaatcatttaaaaaatcatttcatttgggtaaaatgatttccttttctttcttactgggaaattgaagtagcatgtcctctgagttgcatgttttagataaaaaattgtttaattttagccttaattgtatacaaatttttgtcctgcatgaataaatgtgtaaaataccatgaaaaaaaaaaaaaaaaaaaaaaaaaaaaaaaaaaaaaaacaaaaaaaaaaaaaaaaaaaaaaaaaaaaaaaaaaaaaaaaaaaaaaaaaaaaaaaaaaaaaaaaaaaaaaaaaaa

SEQ ID NO: 24701 - DNA, 2400 bp, Homo Sapiens
ggaaaagtggaagctcagcacatactggccagtgcaccaacagacaggaacctatgtcactttcaagctctgggttgccggaccacgcactccaaccaggaggtgctgcagagctgcctgctcgtcatctttgccaccaagcctcatgtgctgccagctgtcctggcagaggtggctcctgtggtcaccactgaacacatcttggtgtccgtggctgctggggtgtctctgagcaccctggaggagctgctgcccccaaacacacgggtgctgcgggtcttgcccaacctgccctgtgtggtccaggaaggggccatagtgatggcgcggggccgccacgtggggagcagcgagaccaacctcctgcagcatctgctggaggcctgtgggcggtgtgaggaggtgcctgaagcctacgtcgacatccacactggcctcagtggcagtggcgtggccttcgtgtgtgcattctccgaggccctggctgaaggagccgtcaagatgggcatgcccagcagcctggcccaccgcatcgctgcccagaccctgctggggacggccaagatgctgctgcacgagggccaacacccagcccagctgcgctcagacgtgtgcaccccgggtggcaccaccatctatggactccacgccctggagcagggcgggctgcgagcagccaccatgagcgccgtggaggctgccacctgccgggccaaggagctcagcagaaagtaggctgggctctggccatcctttcctgcctctgtgcccctgcctctccctgtgtcccttcccctgaggactgcggctccctccctcctgcatgagggtctcctactgctccttctccccttgcacagggaaatgcagggggcaggacttgggaggttccagcaggcgggggagccccgaccagtggggacactcctccctccccagtgagcagaaggcaccgtggtggtggctctgccccttgctgcagtgagcccaccttgctgcaacattggttctgaggggcccaagagatggcgtcttggtcatttgcccgcatggttgggcagttggttgaggccatgaacagaacttacggtaacaggcacggctggcccaatgcctggtctggaactggagcttgcctttggctttccaggtggctccgtgcagctacagccaggccggctgcctcatctcagctctagggggcacgagccatatggggtctgcacaagagaccctctcccctgcagtaaagccaggggccctggcctgatggggcccccatggggagctggagcctgccctgcagcctggagaagagggtggctgtggtgggcgtgctcatcccctgctaaggagcaggagctgctgggccaggtctgcggcagtgctggggtggcaccaggtgggcagtggtaggtggggtggcttgaggtctgggagggtggccctggccagccaggacacatgcagacccctggctttagtctggatacaggctccctctttcctcccaatcctaagctcctgacaagtggccaggtggctctgggccctcctgccccgtgcctaggtcaggggtcctggaataccccgtagctctggcaccaccacactggcctctgatggcaagacttggcccctccacctgtccctaacggacggcaggtcaggaaagccaggactcaggggagaagcaaacccccaggattgaaggctagggttctagggcctttgggtggggagggcccgggccggacagcctcagctccgtcccctgccccacaagattcacctgggcctccagtcccacgctggccccaactgctgcagctctcggcttccgcccaacagcctctggaggtgaggcgggagcatgccctcagcgaggctgggcggcgggtcctgctgtgccatctccctgtgcgcctgagcagatcaatccaccagtgcaaaacagggctaacggcacctgcaggacagcagcacgctccatccctcatgctcagctgcctctgcggccacggacttctgcccttcatctgctctctcttactctcctgagcctagcccgtccgtaagctccctcccctgcctggttcccagggcaggctgactcagttgactgcttggtccaagcctggccctggcacttgtcagggtcagcctaaggagatgggaataaagaggccagagagcaccaagtgagctcatgtttcaccagaggtggataaaaccaagttttgggctgggcccagtggctcacatctgtaattccagcactttgggaggccgaggcgggcagatcacaaagtcaggagtttgagaccaacctgaccaacatggagaaaccccatctctactaaaaatacaaaattagctggaaaaaaaaaaaaaaaaaaa

SEQ ID NO: 24702 - DNA, 2200 bp, Homo Sapiens
gatagtgagccgggcagcctcttcaccggatggcttcttctggacccaaggctcccccaagcccggaacagcaagccccaagctgaacctaagccactcggaaaccaacgtccacgacgaatctcactttagctattcgttgagccccgggaaccgccaccatcctgtcttctcctcttccgatcctctggagaaagctttcaaaggcagtggccactggcttccggcagcagggctggcgggcaacagaggcggctgcgggagccctggcctccagtgcaaaggggccccctccgcctcatcctcccagctgagcgtgtccagtcaagcctccaccgggagcacccagcttcagctgcacggtctcctgagcaacatcagcagcaaggagggcacctatgccaagctggggggactctacacccagtccctggcccgccttgtagccaaatgtgaggacctcttcatgggcggccagaaaaaggagctccacttcaatgagaataactggtcgctcttcaagctgacttgtaacaagccctgctgtgactcgggggatgccatttattactgtgccacctgctctgaggaccccggcagcacctatgctgtgaaaatctgcaaagcccctgagcccaaaacagtctcctactgcagcccgtccgtgcccgtgcactttaacatccagcaggactgcggccacttcgtcgcctcggtgccgtccagcatgctcagctcccccgacgcgcccaaggaccctgtgcctgccctgcccacacacccccctgcccaggagcaggactgcgtggtggtcatcacccgagaggtgccacatcagaccgcctccgacttcgtgcgggactcggcggccagccaccagacggagcccgaggcgtacgagcggcgcgtgtgcttcctgcttctgcaactctgcaacgggctggagcacctgaaggagcacgggatcatccaccgggacctgtgcctggagaacctgctgctggtgcactgcaccctccaggccggccccgggcccgcccccgcccccgccccggctcccgcccccgccgccgccgcgcctccctgctcctctgccgccccgcctgctggtggcactctcagccccgcagccggccccgcctccccggaagggccccgggagaagcagctgccccggctcatcatcagcaactttttgaaggccaagcagaagccgggcagcaccccaaacctgcagcagaagaagagccaggcccggctggcccccgagatcgtgtctgcttcccagtaccgcaagttcgatgagttccagacaggcatcctcatctacgagctgctgcaccaacccaacccgttcgaggtgcgcgcccagctgcgggagagagactaccggcaggaggacctgccgccgctgcccgcgctgtccctctactcacccggcctgcagcagctggcacatctgctactggaggccgaccccatcaagcgtatccgcatcggcgaggccaagcgcgtgctgcagtgcctgctgtgggggcctcggcgcgagctggtgcagcagccgggcacctcggaggaggcgctgtgcggcacgctgcacaactggatcgacatgaagcgggccctgatgatgatgaagtttgcggagaaggcggtggatcgcaggcggggcgtggagctggaggactggctttgctgccagtacctggcgtctgcggagcccggggccctcttacagtcgctgaagctcctgcagcttctgtgagccaagccccagcctgcaccgtcgctgccccttccctgcctaaccctttcctgtctcgccttggaagcacccatgtctccctgggaaatggtacagatgactgggatacctggatgtaaaatatataaatatatatatagaaaatacatataccatatataaatatgaaagactaaggatgctgttgcccgtccacactcgtctcctctctgcactaagtcctccctgttttcttctgtaattatacacatttccagttccatgcaacgtcctgaggacagttctgtgaactgaatgcagcctggacactggcctcaataccttgtttaggatttcttcacccttttgtcaaattgttatttaaagaaaaaaaaaaagaagaaaattccattaaaattttttttggttgagtcatgaaaaaaaaaaaaaaaaaaa

SEQ ID NO: 24703 - DNA, 5242 bp, Homo Sapiens
tgagagcatgtcctaccaggctccccctcagcagctgccgtcggctcagccccctcagccctcaaatcccccacatggggctcacacgctgaacagtggccctcagcctgggacagctccagccacacagcacagccaggcggggcccgccacgggccaggcctatgggccacacacctacaccgaacctgccaagcccaagaagggccaacagctgtggaaccgcatgaaacccgcccctgggactggaggtctcaagttcaacatccagaagcgaccctttgctgttaccacccagagctttggctccaacgcagagggccagcacagtggttttggcccccagcccaaccctgagaaagttcagaaccacagcgggtcctctgcccgggggaacctgtctgggaagccggatgactggccccaggacatgaaagagtatgtggagcgctgcttcaccgcctgtgagtcggaggaggacaaggaccgcacggaaaagctgctcaaggaggtgctgcaggcgcggctgcaggacggctcggcctataccattgactggagccgggagcccttgccggggctgacccgggagcctgtggctgagagccctaagaagaagcggtgggaggccgctagcagccttcaccctcctagaggggcaggctcggcgacaaggggcgggggtgccccgtcccagcgagggacgcccggggctgggggtgccggtcgagcccggggcaacagcttcaccaagtttggcaaccgcaacgtcttcatgaaggacaacagctcttcttccagcacagactcccgctcccgctcctcctccaggtccccgacgcgccacttccgcagaagtgactcccactcagactccgacagctcctactcagggaatgagtgtcaccctgtgggccgcaggaacccgccccctaagggccggggcggtcgaggggcccatatggatcggggccgaggcagggcgcagcgtgggaagaggcacgatctggcgcccaccaagcgcagtcgaaagaagatggcggcgctggagtgtgaggacccggagcgagagctgaagaagcagaagcgggcagcccgcttccagcacggacactcccgccgcctgcgcctcgagcccctggtgctgcagatgagcagcctggagagcagtggggctgaccctgactggcaggagctgcagatcgtgggcacctgccctgacatcaccaagcactacctgcgcctcacctgtgcccccgacccgtccaccgtgcgccctgtggcagttttgaaaaagtcgctgtgcatggtcaagtgccactggaaagagaagcaggactacgcgtttgcctgcgagcagatgaagtcgatccggcaggatctgacggtgcagggcatccgcaccgagttcacggtggaggtgtacgagacccatgcccggatcgccttggagaagggtgaccatgaagagtttaaccagtgccagacgcagctcaagtcgctgtacgccgagaacttgcctggcaatgtgggcgagtttactgcctaccgaatcctctactacatcttcaccaagaactcgggagacatcaccacggagctggcatacctcacacgagaactgaaggcagatccttgcgtggcccacgccttggcattaaggacagcctgggccctgggcaactaccaccgctttttccggctctactgccatgcaccctgcatgtctggctacctcgtggacaagtttgcagatcgggagcgcaaggtcgccctcaaggccatgatcaaaacgtatgtggtgccaagctcccttctgcctttgctcttcccatccttccgcctcgcaccgcccctcagaccagctcctggccgcaggcctcccccagcccccaacccttgtcctggtccttgcttccccatcatctttctccattcagccctcccctctccagttcctcttgctctccttgttggtcacctctgtgttccgggtcactcctctccctctccccactgttcccagctcactgcctctggggcctcttctccaccccatctgtgtgtctcttcctcctgttctctcctgcctggaccccctagttcactccttgccctgggcttcctcagaaccctgaggtctctgctttctcagcttgtcgctgtgctcccaccatagagaccatctagacagcctctggtctaccaggacaaggcccagtcccactcagctcctttgagagcaccagaaacgcttagggagacacctgtgttgaggccacactgggcgcggtgccagaggcccctggtcaggccatgcccctgcagtgtccttcgttcactagacattgcgcctggcttgctgtgggtggggatgagttgcttgactcatgtttagacgcatggttctgtctggtgattgaggtgcccaggcgacgctgggcaatgtcaagagaggttttcgcttgtcacagcaaggggatgctcttggcatctagtgagtggaggccagggatgctgccctgccactgccattgggcctcagagctcagtcttgccaaggtggagaaattctggtcgaagaggttgaccggtagactgaagaggccttgagagcctggccaggtggctgtccacgtgaggtcatagtcacagcatggaggccttgagagcctggccaggtggccctccacgtgaggtcatggtcacagcatgggggccttgagtgcctggccaggtggccctccacgtgaggtcatggtcacagcatggaggccttgagagcctggccaggtggccctccacgtgaggttgtggtcacagcatgggggccttgagagcctggccaggtggccctccacgtgaggtcatggtcacagcatggaggccttgagagcctggccaggtggccctccgtgtgaggtcatggtcacagcatagtttggagctagggagggactgtcagcctggaggtttggagactcattctggaatctagtgtgggtcaagccaacttcagggagaggctgagccagggtaggagtcacaggagcagacgaggatgtggggtgccgtgcacagagctccatgaccagcttgggaagttagaaggaaggggaggcaggaggctgcttagtctgctgccatgatgggccccatgaatggtggctctcaagcttctgtgctacacaggggtgtgtggttgggcgagtgtccttgttaattgatacctaattggccttggttgggaacatagccatgagtgcccctcgtgggtggggcgccagtctgtcattgacctcattgtgtcagcaccttccccccaaggaggctgaccctgccctgccagctgagactgggagacggagtgggctctgatcccagggcttccaggaaagctctggctttggagcagaggcgggttctaggacttagtgcccctcactcggtgcctgggttcctgtgtgtgtggaaagggtagggctgcaccctgtggaagagggttcagggagctctgaggacctggctcgtgctagatgctcagtcagtagtgtgttttagcagcagccggaagtgactgctttcagtgtgtagtggtgagtgctagctggcacccctgcgcctggcttcccagacactgtaacgcagggcaggggaggcagcgagggctgggtccccacggtggccctggcagccccgccatccccatcccctgccacgtgctgctccctccatctggtccctgcccctcagccagcggaggagcccgctgggcccttccctgcccgtccccgctcctccctggcccccgcacaggtaagtgagggtgaggggggcacaggggactggggtcactaaccccccccgggccccccccgagcccctgaggtggggaggctgggaggcgggtggggagccagcaggcactgtgctgaggaaatcctgtgggcacccgaatgggggggcctccccgctcgtggggccctcccctgccctcccgcccgcccgcctcatcaccttctcctcttgtctccatagcttccgccctgcgctgccagtctcctacctgcaggccgagctggccttcgagggcgaggccgcctgccgggccttcctggagcccctgggcctggcctacacgggcccggacaactccagcatcgactgccgcctcagcctggcgcagctgtcagccttctgagcacccagcgaggaggggcgggggcaggggctgcagcccccagcgctgcctttgcggattctgtttttgagccgtggacttgggttgtaaatttatttgtggggagtgcgctccaggaagagccaccatccctgcccccgttttcccaccggggagtctgtacagagatttttctacgtttttattttttgcctcagagggatgggattggggaggaggggatgggcagcggagggttgggggcatggtctgcaggctcatctgtgtccgcctttcactccactaatgctgtctcagtgttttctctctctctctttcgagcttgcactccggtacccgacccggcgccctggcccatcccatgccggggggccagtggaaagaagacaggccgtccagcccgtgcccgcctgcggcgggggcacccagcaagcccgcccaccgcccgctgcctcacctgcttcgccacagaggacagcggcagcgacgagaacctggatcaggagctcttgtccctggcaaagcgaaagcgcagtgactctgaggagaaggagccgcctgtgagtcagcctgcagcctcgtcagactcggagacgtctgacagtgacgatgagtggacatttgggagcaataaaaataagaagaaaggaaaagccagaaaaatagagaagaaaggaaccatgaagaaacaggccaacaaaactgcctcctcaggcagttcagacaaagacagttcagctgagagctcagcccctgaggaaggtgaagtgtcagactctgacagcaacagctcctcttccagttcagattcagactcttcctcagaagatgaagagttccatgatggctatggagaagacctcatgggagatgaggaagacagggcccgtctggaacagatgacagagaaagagagagagcaagaactgttcaatcgcatagagaagagggaggtgttgaaaagaagatttgaaatcaagaaaaaactaaaaacagccaaaaaaaaaaaaaaaaaaaaaaaaaaaaaaaaaaaaaaaaaaa

SEQ ID NO: 24704 - DNA, 3674 bp, Homo Sapiens
ggcttggcagggggccagctctggggaggctgcaggcccacctggctggcaaggctgccctgatgaaccatggccatctgcaactccttgtgggccatccgtccagccatctcataagcccctgagcaaggctctggagagccctttggggctgcgccctcacctgcccctgctgatgggtggacaggcggctctgaagccggagcctgggcgcccaggcgaggagtcacctgcccctaagcaggaactgcatcagccctctttccccacacctcagctgtcgccgctgccgatgcctggcaaccccgccgactacaatggcctgtgtgttgggcctgagctcactgcactaggcagcttctacctgtactgtggccaagaggggctgcagtgtgggggctactcgccctgccccatgcttcctgagggcaagctgtccccagtggctgcacctcacgaggaggggctcctcttagctccgagctcagtgccctcaggcacccctttccagcaccctccctggggctcctctcgctactgctctagcgaggacactggagtgaatggctacagcatctgcggagtgttgcccctgtctgttacccacgctggcactacctgtggcggctgcccatacaaaatgccttttgcagcagaaggctgcagatccctgggccagttggaatttcctctcccggaagctggccacccagcctcacccgcccacccactcctggggtgccctgtacccagtgtgccacctgcagcagagcccgtcccccatcttcagacacccacctcggagccccagacagtagcccgtgcgtgccctcagagcgccaaacctcccagcggttctaagtcaggtctgcgcacaggctccagctgcaggcacactgcaaggagcaaggctgcccgcaggcctagccaccccaagcagccacgtgtccagcgcccacgccctcgccgccgccgtcgccgccgcactaatggctgggtacctgttggggctgcgtgtgagaaggctgtgtatgtcttggatgagccggagccagccatccgaaagagctaccaggcggtagagcggcatggggagacaatccgagtccgggacaccgtccttctcaaatcaggcccacgaaagacctccacaccttatgtggccaagatctctgccctctgggagaaccccgagtcaggagagctgatgatgagcctcctgtggtattacagacctgagcacttacagggaggccgcagtcccagcatgcacgagaatgaagtgtttgcatcgcgacatcaggaccagaacagtgtggcctgcattgaggagaagtgctatgtgctgacttttgccgagtactgcaggttctgtgccatggccaagcgccgaggtgaaggcctccccagccgaaagacagcactggttcccccctctgcagactattccaccccaccccaccgcacagtgccagaggacacggaccctgagctggtgttcctttgccgccatgtctatgacttccgccacgggcgcatccttaagaacccccagtagcctcctcatgcccatgctggggctacccatgggcaagtggggctcggggtagggggcactgcttgaagcacagcacttggttagggggccacagaggcctaagtttgctggcctgtggttttcttgggggggagggcaggggcccctgtgggttctgggctccaggggagggagctggggaggccagggtataagaaaagcatcagaactctcagcttggcccaaggtaccttctgtggttcccctgggtggagatttccgaaaagtagtcttctctgaggctgggccaagcctgagggaaatggggccctaggagggtgggggcgggaaggaggggcaaggtctttcaggaaccagacccaacaggcccttctgtagcctcccccttgccctcaaagggggagtgggggccagctttacctcacccactgtgacccgccgcttccccttcagcctgggaccaggctttcctagatcccagcacagctctgagcttgttcctttgaggcatagagagccagagtctggcttccagagcattgacttcctcttcctagacttgaggccttttctctggctttcctcctttgccctgcagtagcaactggtgctgggacaagttgacccacctctcacagtcatgggtgtggcccacttgtgggagtctcctgtccacctcccagagacggccacccagcgggtctggcttcccagaaagttaactgatgattgtggggtttgtcatatctgggagggaagatgggtgctgggagagggttgggggcagggggcaaggaaaattgctacctgatttgttgaagatttttcctcttgccttacacatggaggttccaggaaacctcttgcagaacttcacacgtgattcttcaagccacacccacctgaaatcaaaccaaaggagtgctgtggctccccttgccctgccaccctttccctagtcttttgtagattgcactaatttacatcctagcaagaatcaacactgtatcagtccacggacctgctgagctgcagccacttgctctaggagctaaggacttgcattttcagtttgttcctgttgcccagaggccctgttctcacctcatgctgctccccagagtagactaacaggctcagtcccctgttgtccttgtggagactaggccttggccctggccctgagactctgtgagggggctggagcagcctggttatttcctatctgtaccaaagaggagtatggtgggagagggagtggagtgcagtgtggcttgggcctggtgctgggaacctgctagctgagcacttccacaagggcatacccctgggggcaggggctggggctgagaactgcagccctgggtcttcccttagggaggaagggcagatgaacccagcaggcttaggaggtggcactgggtgaggacagctgggcaggggctgcagagggaggtggaaatgaaccctgagggctcccccaacttgccatgccctgtcccttagtagatgagttgctcctgattggtcattgggtttgggtgaggcctggaggcttcagaggtgaatttatgcttgggaagcctgatcccaaacctgaagggaagggacttggatctccttatattgaataagctgtttggaggaaggtgtctgtctgggaggatggggcagtaaatgaggttggcagagtggcagtgggggctctgcagagccagccttggagcctgctcattctgggcccttgctgccaaggagcccagcctcacctagcaggaaaggagatgaaggccctcctcccaggaggtagggtcttggctgccccgaacttaaatgcttttgaaatctcttagatgtggaaatattttttcgaacctgaaaatgcagctggtagaatttcaatggaagcataatccatgtaaaatatattttagttgatattttgtaaaatgcactttttgtgtgtgttgatcctggtttcccagatctgtatttcagtgtttacaagggaggaaggacctttcctcacctcccttttgacagagattagaagtacttctttaagaaaaaaataaatttgagaaattgtattgatttaaaaaaaaaaaaaaaaaaa

SEQ ID NO: 24705 - DNA, 5025 bp, Homo Sapiens
ggggtttcggactactattctcagttgatctacaagcagaataatttaagtaatcctccaacaccccctgcctctcttcctcctacaccacctcctatggcttgtcagaagatggccaatggttttgcaacaactgaagaacttgctggaaaagccggagtgttagtgagccatgaagttaccaaaactctaggacctaaaccatttcagctgcccttcagaccccaggacgacttgttggcccgagctcttgctcagggccccaagacagttgatgtgccagcctccctcccaacaccacctcataacaatcaggaagaattaaggatacaggatcactgtggtgatcgagatactcctgacagttttgttccctcatcctctcctgagagtgtggttggggtagaagtgagcaggtatccagatctgtcattggtcaaggaggagcctccagaaccggtgccgtcccccatcattccaattcttcctagcactgctgggaaaagttcagaatcaagaaggaatgacatcaaaactgagccaggcactttatattttgcgtcaccttttggtccttccccaaatggtcccagatcaggtcttatatctgtagcaattactctgcatcctacagctgctgagaacattagcagtgttgtggctgcattttccgaccttcttcacgtccgaatccctaacagctatgaggttagcagtgctccagatgtcccatccatgggtttggtcagtagccacagaatcaacccgggtttggagtatcgacagcatttacttctccgtgggcctccgccaggatctgcaaaccctcccagattagtgagctcttaccggctgaagcagcctaatgtaccatttcctccaacaagcaatggtctttctggatataaggattctagtcatggtattgcagaaagcgcagcactcagaccacagtggtgttgtcattgtaaagtggttattcttggaagtggtgtgcggaaatctttcaaagatctgacccttttgaacaaggattcccgagaaagcaccaagagggtagagaaggacattgtcttctgtagtaataactgctttattctttattcatcaactgcacaagcgaaaaactcagaaaacaaggaatccattccttcattgccacaatcacctatgagagaaacgccttccaaagcatttcatcagtacagcaacaacatctccactttggatgtgcactgtctcccccagctcccagagaaagcttctccccctgcctcaccacccatcgccttccctcctgcttttgaagcagcccaagtcgaggccaagccagatgagctgaaggtgacagtcaagctgaagcctcggctaagagctgtccatggtgggtttgaagattgcaggccgctcaataaaaaatggagaggaatgaaatggaagaagtggagcattcatattgtaatccctaaggggacatttaaaccaccttgtgaggatgaaatagatgaatttctaaagaaattgggcacttcccttaaacctgatcctgtgcccaaagactatcggaaatgttgcttttgtcatgaagaaggtgatggattgacagatggaccagcaaggctactcaaccttgacttggatctgtgggtccacttgaactgcgctctgtggtccacggaggtctatgagactcaggctggtgccttaataaatgtggagctagctctgaggagaggcctacaaatgaaatgtgtcttctgtcacaagacgggtgccactagtggatgccacagatttcgatgcaccaacatttatcacttcacttgcgccattaaagcacaatgcatgttttttaaggacaaaactatgctttgccccatgcacaaaccaaagggaattcatgagcaagaattaagttactttgcagtcttcaggagggtctatgttcagcgtgatgaggtgcgacagattgctagcatcgtgcaacgaggagaacgggaccatacctttcgcgtgggtagcctcatcttccacacaattggtcagctgcttccacagcagatgcaagcattccattctcctaaagcactcttccctgtgggctatgaagccagccggctgtactggagcactcgctatgccaataggcgctgccgctacctgtgctccattgaggagaaggatgggcgcccagtgtttgtcatcaggattgtggaacaaggccatgaagacctggttctaagtgacatctcacctaaaggtgtctgggataagattttggagcctgtggcatgtgtgagaaaaaagtctgaaatgctccagcttttcccagcgtatttaaaaggagaggatctgtttggcctgaccgtctctgcagtggcacgcatagcggaatcacttcctggggttgaggcatgtgaaaattataccttccgatacggccgaaatcctctcatggaacttcctcttgccgttaaccccacaggttgtgcccgttctgaacctaaaatgagtgcccatgtcaagaggtttgtgttaaggcctcacaccttaaacagcaccagcacctcaaagtcatttcagagcacagtcactggagaactgaacgcaccttatagtaaacagtttgttcactccaagtcatcgcagtaccggaagatgaaaactgaatggaaatccaatgtgtatctggcacggtctcggattcaggggctgggcctgtatgctgctcgagacattgagaaacacaccatggtcattgagtacatcgggactatcattcgaaacgaagtagccaacaggaaagagaagctttatgagtctcagaaccgtggtgtgtacatgttccgcatggataacgaccatgtgattgacgcgacgctcacaggagggcccgcaaggtatatcaaccattcgtgtgcacctaattgtgtggctgaagtggtgacttttgagagaggacacaaaattatcatcagctccagtcggagaatccagaaaggagaagagctctgctatgactataagtttgactttgaagatgaccagcacaagattccgtgtcactgtggagctgtgaactgccggaagtggatgaactgaaatgcattccttgctagctcagcgggcggcttgtccctaggaagaggcgattcaacacaccattggaattttgcagacagaaagagatttttgttttctgttttatgactttttgaaaaagcttctgggagttctgatttcctcagtcctttaggttaaagcagcgccaggaggaagctgacagaagcagcgttcctgaagtggccgaggttaaacggaatcacagaatggtccagcacttttgcttttttttcttttccttttcttttttttttgtttgttttttgttttgtttttcccttgtgggtgggtttcattgttttggttttctagtctcactaaggagaaacttttactggggcaaagagccgatgactgccctgccccgggcaggggccttcctatgaatgtaagactgaaatcaccagcgagggggacagagagtgctggccacggccttattaaaaaggggcaggccctctaacttcaaaatgtttttaaataaagtagacaccactgaacaaggaatgtactgaaatgacttccttagggatagagctaagggataataacttgcactaaatacatttaaatacttgattccatgagtcagtttattgtagtttttgatttctgtaaaataagagaaacttttgtatttattattgaataagtgaatgaagctatttttaaataaagttagaagaaagccaagctgctgctgttacctgcagaactaacaaaccctgttactttgtacagatatgtaaatattttgagaaaaaatacagtataaaaatagttattgaccaaatgctaccaggctctgcagcagctcgggggcttataaaatgttcatagggatgttacaatataattttgtgttataaaatatgccattataattatgtaataaccaaaatttcaacctagagtgttgggggttttttggaaaccgcagtctattagtactcaatggttttatacaccttacttctgacagagcggggcgtatgctacgactacaacttttatagctgttttggtaatttaaactaattttttcatattatattgttgcatccctacttcttcagtcaggtttttttgtgcttacaatttgtgataactgtgaataactgcttaaaaatacacccaaatggaggctgaattttttcttcagcaaaagtagttttgattagaactttgtttcagccacagagaatcatgtaaacgtaataggatcatgtagcagaaacttaaatctaaccctttagccttctatttaacacaaaaatttgaaaaagttaaaaaaaaaaaggagatgtgattatgcttacagctgcaggactctggcaatagggtttttggaagatgtaattttaaaatgtgtttgtatgaactgtttgtttacatttctttaataaaaaaaacactgttttgtgtttgcttgtagaaacttaatcagcattttgaaccaggttagctttttattttgtacttaaaattctggtactgacacttcacaggctaagtataaaatgaagttttgtgtgcacaattcaagtggactgtaaactgttggtatattcagtgatgcagttctgaacttgtatatggcatgatgtatttttatcttacagaataaatcaattgtatatatttttctcttgataaatagctgtatgaaatttgtttcctgaatatttttcttctcttgtacaatatcctgacatcctaccagtatttgtcctaccgggtttttgttgttttctgttctgtataatagtatctaatgttggcaaaaattgaattttttgaagtatacagagtgttatgggttttggaatttgtggacacagatttagaagatcaccatttacaaataaaatattttacatctaaaaaaaaaaaaaaaaaaaa

SEQ ID NO: 24706 - DNA, 2950 bp, Homo Sapiens
gaggagggatgccgcagctgagcctgtcctggctgggcctcgggcccgtggcagcatccccgtggctgcttctgctgctggttgggggctcctggctcctggcccgcgtcctggcctggacctacaccttctatgacaactgccgccgcctccagtgttttcctcaacccccgaaacagaactggttttggggacaccagggcctggtcactcccacggaagagggcatgaagacattgacccagctggtgaccacatatccccagggctttaagttgtggctgggtcctaccttccccctcctcattttatgccaccctgacatcatccggcctatcaccagtgcctcagctgctgtcgcacccaaggatatgattttctatggcttcctgaagccctggctgggggatgggctcctgctgagtggtggtgacaagtggagccgccaccgtcggatgttgacgcctgccttccatttcaacatcttgaagccttatatgaagattttcaacaagagtgtgaacatcatgcacgacaagtggcagcgcctggcctcagagggcagcgccagactggacatgtttgaacacatcagcctcatgaccttggacagtctgcagaaatgtgtcttcagctttgaaagcaattgtcaggagaagcccagtgaatatattgccgccatcttggagctcagtgcctttgtagaaaagagaaaccagcagattctcttgcacacggacttcctgtattatctcactcctgatgggcagcgcttccgcagggcctgccacctggtgcacgacttcacagatgccgtcatccaggagcggcgccgcaccctccccactcagggtattgatgatttcctcaagaacaaggcaaagtccaagactttagacttcattgatgtgcttctgctgagcaaggatgaagatgggaaggaattgtctgatgaggacataagagcagaagctgacaccttcatgtttgagggccatgacactacagccagtggtctctcctgggtcctataccaccttgcaaagcacccagaataccaggaacagtgccggcaagaagtgcaagagcttctgaaggaccgtgaacctatagagattgaatgggacgacctggcccagctgcccttcctgaccatgtgcattaaggagagcctgcggttgcatcccccagtcccggtcatctcccgatgttgcacgcaggactttgtgctcccagacggccgcgtcatccccaaaggtctacgaccccttccgtttcaaccaagagaacatcaaggagaggtcacctctggcttttattcccttctcggcagggcccagaaactgcatcgggcaggcgttcgccatggctgagatgaaggtggtcctggcgctcacgctgctgcacttccgcatcctgccgacccacactgaaccccgcaggaaacccgagctgatattgcgcgcagagggtggactttggctgcgggtggagcccctgggtgcgaactcacagtgactgtcctacccacccacccacctctgtagagtcccagaaacaaaactatgctgacacctctgcttgagcctcgttgacagccagcatggggctcctggggactggagggatctaagaaagggaggtgagtgggtggaggcagggtgacgtctctgaacccaaaaccctgacggcctctctggctgagcacagggcatctaggcccttagtgggttctcccagagcccaagtaaaaactttatcctgtgggcagtagggagccctgggaggtgtttgagcaggagagggaacaggattaagaatgggtttaaggagcaagactgagactctgattcagcgagaaacaaccataggggcagatcccttcatctgtcctgggaatgtcctcccaagactggagtcctcagctcagaacaaagggaaaggggtgcagcttccaccctggcaggctctcagaaatttttagttcctttttccaccaacttcccacccctgtttctccccctcccagtgcgttctctctgtgactctcttcccttactttcagaggcataggatctggagccagactgcttgggctcaagtcctggctctgctgcgtgacttgagcaagttaattcctctctctgtgcctcggttccctcaaccatataatggagacaacagcattacctatatcagggttttcctgaggtctcaatataagggactcagagctgtgcctggcacacaatgaatgctaaatatatggagccattattatttcctgtctcagaaagtctggctgttaaagaatgttgtctttcaagatcgttatttctaccacgactttaaaggctgtgttttggaactcaaaggcaaaaattctaatatctgtgctccttgaacaacctcttctcctagagggctgtgcatataagatatgtgtatatatatatatatatatatatatatacatatacacacacacacacacacacacatatatacatatatacacacacacacacacacacacacacacatatatatatatatatatatattttttttttttttcctgaggatggtgaaggtacctgactgtgtgaggtggtaggagaatgagagaaacctcagtcagtgtctcaaaataaaatcctgctacaaacattgatctcttttcatagcctaagggatgttgcatcgctaaaccctgttgacttctctaatctcttctgtagctgatctccttcccttgctacactcggttactctggccttgattctgatctccaaatacattatattttttatttgggaccatcgtattgcctttgcacctttatcaaatataagttgcctatatttatttggaaaaaaaaaaaaaaaaaaaaaaaaaaaaaaaaaaaaaaaaaaaaaaaaaaaaaaaagaaaaaaaaaaaaaaaaaaa

SEQ ID NO: 24707 - DNA, 3229 bp, Homo Sapiens
ctttgtgtgtcctgctcacattgtctccagggcctcggacagggcctggtacagaacatatgactgagtttctggagtcccacaggccagcgttggagtcctgacacctcagtatagctgtgcacctctgggcaaatagtttctctgctctgagccccaggacaagctgggggcctccatgggcgcctgagggccaggcgccagggccgtgggcacgagtatggtgagacaccagcccctgcagtactacgagccacagctgtgcctctcctgcctcacgggcatctacggctgccgttggaagcgctaccagcgctcccatgatgataccacaccgtgggagcgcctctggttcctgctcctcaccttcacctttggcctcacgctcacctggctttacttctggtgggaagtccacaatgactatgatgaattcaactggtacctctacaaccgcatgggctactggagcgactggcccgtacccatccttgtgaccacagctgctgccttcgcatacatcgctggcctcctggtcctggcactatgtcacattgccgtggggcagcagatgaacctgcactggctgcacaaggcctcctctgggcttccactatcccctctgtgagggagtttcttctcctggctgcaaagctggcatttgaaagaactgcaccagctggcaccccgggtggggctggcacatgctgtggtcaccttctggggccatgcctggctctcagcaggctgccctgagcacactgcactgctcttctgtcctcgcctgactcccctgcctcagtggcagcagcccccagcccaggacctgcacagaggaggcgtctgtcagcgacccaacctgagccccagagaggagcactgggtaccacacagccccaagatcgggctggtggtcatcctggcttccacggtggtggccatgtcggccgtggcccagctgtgggaggacgagtgggaggtgctgctgatctccctgcagggcacagcgccattcctgcatgtgggggctgtggcagcagtcaccatgctctcctggatcgtggcaggacagttcgcccgtgcagagcggacctcctcccaggtgaccattctctgtaccttcttcaccgtggtgtttgccctctacctggcccctctcaccatctcctctccctgcatcatggagaagaaagacctcggccccaagcctgctctcattggccaccgcggggcccccatgctggctccagagcacacgctcatgtccttccggaaggccctcgagcagaagctgtacgggctccaggctgacattaccatcagcctggacggcgtgcccttcctcatgcatgacaccaccctgcggcgcaccaccaacgtggaggaggagttcccggagctggcccgcaggcctgcctccatgcttaactggaccaccctgcagagactcaacgctggccagtggttcctgaagactgaccccttctggacagccagctccctgtcaccctccgaccacagagaggcccagaaccagtccatctgcagcctggcagagctcctggagctggccaagggcaatgccacactgctgctcaacctgcgtgacccgccccgggagcacccctaccgcagcagttttatcaacgtgactctggaggccgtgctgcactccggcttcccccagcaccaggtcatgtggctgcctagcaggcagaggcccctggtgcggaaggtggctcccggcttccaacagacatcaggctccaaggaggcagtcgccagcctgcggagaggccacatccagcggctgaacctgcgctacactcaggtgtcccgccaggagctcagggactacgcgtcctggaacctgagtgtgaacctctacacagtcaacgcaccgtggctcttctccctgctgtggtgtgcgggggtcccatccgtcacctctgacaactcccacaccctgtcccaggtgccttcccccctctggatcatgcccccggacgagtactgtctcatgtgggtcactgccgacctggtctccttcaccctcatcgtgggcatcttcgtgctccagaagtggcgcctgggtggcatacggagctacaaccctgagcagatcatgctgagtgctgcggtgcgccggaccagccgggacgtcagcatcatgaaggagaagcttattttctcagagatcagcgatggtgtagaggtctccgatgtgctctccgtatgttcagacaacagttatgacacatatgccaacagcaccgccacccctgtgggcccccgagggggtggcagccacaccaagaccctcatagagcggagtgggcgttagctgaagacatgtctgtcccacctgtacctgacacagaagctggggagcctaggagagctggtggaagtgtgtctgaactcggagtgctctgggagcgggctccacagcctccttgtgggctccagccccttgtcagccgcagcctctcttgagggggactccctgtcccctgaggcccagctgggccaggactccatcctttcagatgcccctgcaggcctggggctccttctgggaagtatggggcctagggcttggtccccctcttctgaggccctctcctgtatcccgacctggaagctttgatgggtcatgggccatgccataccccctgtggcaatggagtgtgtggatgctcacctgtgccatctgtcctcctgtctgtgccaggaggcacctgagttctctgctgttatcctgccccaagggcctgggccgagcctctacctgaagcaactctgctcttcctgtcagtctcaaagcacaaggaggttcagcccaggaggaagccagctgcaatgtggagacacgtcctcctccccaacccacctcatgccaccgccaaccccctgccccaggagcgggcctgagccacgtcccctaggagcagctggagatggccaaaagagtgagctcaggactactggatcccatgcccaggtgtccagcagacctcaaggcagaagggtcacctaacccaggagtccacagactgatgtgacctcaggttcccacatcagtggccacagggcagggcccacctggtagaagtgttctggatatggccagggtgggtgtgtggctaagtgggcctgaacagagggaacctagggcccttggccaatgtgattaaagctgccatcttgaaaaaaaaaaaaaaaaaaa

SEQ ID NO: 24708 - DNA, 4612 bp, Homo Sapiens
cccgcgccccgctcagccttgcagccccgcgcccggagcatctccctggaggaacggagacaaaggaggattcatgtccaaagggctcccagagaccaggacggacgcagccatgtcagagctggtgcctgagcccaggcctaagccagcggtgcccatgaagcccatgagcatcaactccaacctgctgggctacatcggcatcgacaccatcatcgagcagatgcgcaagaagaccatgaagaccggtttcgacttcaacatcatggtcgttggccagagtggactgggcaaatcaacgctggtcaacacgctcttcaaatcccaagtgagccgcaaggcctccagctggaaccgggaggagaagatccccaagacagtggagatcaaagctatcgggcatgtgatagaggaaggcggtgtcaaaatgaagctgaccgtcatcgacaccccaggctttggagaccaaatcaacaatgaaaactgctgggagcccattgagaagtacatcaatgagcagtacgagaagttcctgaaggaggaggtcaacatcgccaggaagaaacgcatccctgacactcgtgtccactgctgcctttacttcatctctcccacaggacactccttgcgacctctggatcttgagttcatgaaacacctcagcaaggttgtgaacatcatccctgtcattgctaaggctgacaccatgaccctggaggagaagtctgaattcaagcaaagggttcgcaaggagcttgaagtaaatggcattgaattctacccccagaaggaatttgatgaggatttggaggataagacggagaatgacaaaatcaggcaggagagcatgccttttgctgtggtgggaagtgacaaggagtaccaagtgaatggcaagagggtcctcggccgaaaaactccatgggggatcatcgaagtggaaaacctcaaccactgtgagtttgccctgcttcgagactttgtcatcaggacccacctccaggacctcaaggaagtgacacacaacatccactatgagacttacagggccaagcggctcaatgacaatggaggcctccctccggtgagcgtggacacagaggaaagccacgacagtaacccatgacgaccacttctctgtgtcatcacacatacccacttcacacacacacatcccaaataccaccaccaaccaccttcttcctctcaactctgtcccacaggcctgtctggtatttgtggagcatcttgtctgtgtgtgtgtgtgtgtgtgtgtgtgtgtgtgtgtgtgtgtgtgacagagagagagcgagagagcctgtgtgtgtgcatgcaggggtgaggtattttcactgccctccctggagagtcccttgtaagtttggctcctccatgcctgtccattatctgtctcctttccttgtgtcccaaaacaaagctgtttgcctcactcaggagatctgggggaggtttcatttaaaagtgctgggagcaggtgagccacaggcaactcttctctcggaacctgcacacaaactggggctacagagattctccaaggacagatggcagtggagctagacctgagtagggggcagggagttcaggacaaccctcctgtaagttgggggtggtctgggggtaaggctggggcttcctgggaaaaggaaggccatgagaaggcagagaagtaggccagagctgggttcttgcagaaagcatcagtgcctacaaatggagctccacccttcagtctgtgtcgtgttcagtgtcacaaagctaccacctgtcaccagagcctactgctgctctccactcaactggcctctgctgccaggccactgcctgtctctgcttccgactttgtcttctttctccctttccctccttccctcatacattgctttctctccctctcctgcgtgtctctgacatctctcacttccttttagatgaatctactttaggttcattcctatatttagcatttatgcccagtctacttccagaaatgactttagactgcctttcacataaaatcacaaaactacaggacagtacaaacagattgccagagaaatctgggtcaaagaaaggaataggaaagaaagtttctgtagtcaagcacctgaacaggccctgagctcacaggcagccaatgtaaagagggaaacacagtgagttatgcagttcccagtgtccagttaaaggaagcacacatgctagtcatgtgagacaaccttttattgggacatcaggttctagaactaattctaaagaagtatcagaaacaatatacataatttgtctttcttagtaatttggcttcaaagacaaatttttgaccacacctccgttttctccgtcagacttctctcccttctaagcaggcttctctgttgctccatttgcttcatacatacttgacctctcttttctattccccatcacttttgtgctgaagctaatcatatttatgtctgtctttctctacttttccctaattccctctcctcctgactcctgtagacattcccaatgatacccaccgtcatacatttaggcttttcttgcctttccctgaagccctgtatttattaatgcatatatttcccctgcttgttgtacaagtaagttactcttttcctttaatctgtaagattcatgaaattcggggccagggaaacagtttagccttagggaagggaaaacactaagtgaaactgtttacaataacctcatacaaccttctgtcccatctcctggttcagcctaggtgtttcactggtcctctatgaatcccagcacttataatcccagtcttttatcactcaggtgctaggaaaaaaaacatagactcaagacccaagattcaatggaccaggagaaaggggggcggtgatcaggtcaccagtgaccccaacctatggtctcggtctttcctggaggctgccaacccagccctcatcctcccttgctcacaaagttacagggtaggcacctgtcaggacagaacagcagcagcgctacagcccagaggttatacatttcaacagaacagggatccttggctactgtagaagcagtcctgtatggagaccttggaccagcaggggaagatctatgggcatgggaggtgggcgttggaaaggctgagtaggaatggtgcctggcacccctgaaccatgatctgagcctccctggagaaggtattttatatgtctgctgccagctgctggtctccacaccctcaaccgttctcaacccccctgcagggagaaggcctcctgggcactgtccttccacctgtgccagccaccccctgccccactgctgaatgaaggccatttcaagcgctgcttctcactccattcctctcagctgttattgctgcagggccaagccctttttagtgctgtgctcgtccagctcaccaccacagcccctctcagccctcagtaggtgggaggggccagctgcctctttaggccagttgcatcctccatttatccaaaccactcctctcctcccagtggagtggggttctgccagtacagccctactgcatcatctgcgtcagccggtcctagcccatctgcagggtgaaagaactcatcaagagctccttctgcccttgtaagcccatcccagctacttgtaaccatctctaagggcaatggcattgctccctacccattcatctgcatgagctactcttggcttccttaaagggtcaagaaagcaatttttctgcttactagattcattgagatcagctgtgtgagccccaaagtgggacaagggtgtctccttcattacttaaagatattcatgagggtgggtcactacagatgttggggagcaagggctaggatcactttttaaaaaatcaccacttgtggctgtcccagagtgcggttgtacatcctccccacctcataacgcagccactgaggaagagtggttttcctaagaagacattgctggagttgactttcttctgtccaaacaaacaaacaaaaactaaacacacacacaaacccccagaaacccacaatatgtacacgctaaggaaaaactagcacccttctgtccactcagcaataagagggatctcttcccacctaccctacctactcctacccccaacccccttccccattaatgtgagtaatgaattagcctgaccacaggtggtcactgtaggctaatggaaaatacccaagggagggcaaagccccccatcagatgcatgaatgtttgcgaatgttgactgccactgccccacacactgtgtctttatagaattcccctttgcccaccctcttcctgtctccacctggacacaacttgctcaaaggctggtgacttgtgggccattcatctacaaccaagtcctgatggagcaagaggcccacgcctaggggatgcaagaacaacccgtttcttaaatgttaccagtcccagccaatcttacggtgacattacagttaaatttcccaattgaaaacaagcaaacagacactcaaactggtcctgtaattgttgctagactttatgtgttgtacaactaaacattgctgtttgaacagcaaaaaaaaaaaaaaaaaaa

SEQ ID NO: 24709 - DNA, 4304 bp, Homo Sapiens
gtggttgtggccgtggctgcagggcagggcctcctggcacgtggccgctgtttgaagcctctgtgtcttgtctctcccttctgatctagctctggcaggctgccctgagcacgctcaaccccaaccccacggacagctgtcccctctacctgaactacgccaccgtggctgccctgccctgcagggtgagccggcacaacagcccctcggccgcccacttcatcacgcggctggtgcggacctgcctgccgcccggagcgcatcgctgcattgtgatggtctgcgagcagccggaggtctttgcttccgcctgtgccctggcccgggccttcccgctgttcacccaccgctcaggtgcctctcggcgcttggagaagaagacggtcaccgtggagtttttcctggtgggacaagacaacgggccggtggaggtgtccacattgcagtgcttagcgaatgccacagacggcgtgcggctagcagcccgcatcgtggacacaccctgcaatgagatgaacaccgacaccttcctcgaggagattaacaaagttggaaaggagctggggatcatcccaaccatcatccgggatgaggaactgaagacgagaggatttggaggaatctatggggttggcaaagccgccctgcatcccccagccctggccgtcctcagccacaccccagatggagccacgcagaccatcgcctgggtgggcaaaggcatcgtctatgacactggaggcctcagcatcaaagggaagactaccatgccggggatgaagcgagactgcgggggtgctgcggccgtcctgggggccttcagagccgcaatcaagcagggtttcaaagacaacctccacgctgtgttctgcttggctgagaactcggtggggcccaatgcgacaaggccagatgacatccacctgctgtactcagggaagtacgtctggccctcccactccttcctgcccactgttggaactcgcgacccttcccggcctgcaatgccagctcactccaggcatatcgggagggcactcagcgttggggtcccctgggcagcaggctccttgcttcccggagggctggggagctttggtagcaggcgcacctcacgttgaggggcccatggcacctggatgaggtgctaggctcccgtgcagtgcctggcccaggagctcgtggtctaccctgcattaccaggacaggtctttccaaaatttaggcctgaaatctttgggtgtgtgaagctctgacccccagattccctgctcggggacacctcctgcatctcccccttgagattgaccctggaaagtcaaagctgagctggcagctgaggagcaagtggctccagaattcaaaagagaagagccctctccccagccccatgagctggtgcctgagtgggcgcctccccgcatctcctgctcttcctccccatctgccgggtgccaggcacagtgtgctgaaggccagcccagccggttcatgccacccactttacagaagaagaaactgaggcatgggagagccaaatggctggtctctggctctccagagcagcggggcagggatgtcacctggaagccctttgctccaggcactgcattgctgtagggactgggggcatcccggccttcccattcagggaacgtgttggggttcggggagccacagggatgggcagctccaaatggggtctccccagtttcaaaggggctcatgccagtgtcccaggaaatcccgtccctgagcggggatctctaccatgccccaggacggtggaaatcaacaacacggatgccgagggcaggctggtgctggcagatggcgtgtcctatgcttgcaaggacctgggggccgacatcatcctggacatggccaccctgaccggggctcaggtgagtgctccctggatccaccccttagctgtagtcccagggaaccccaccccactcttgacctcaaggtggggaaggcagcgcgtgggggctgccgtcaggaagttttcataactgggcacgaggaggcaggaggagctgcccgtcaagcttggtgtgggcagtaccgaggcccaggctggatgcagagccgggaaccgcctcctgtgtgcttcatggccatggtcctttctgcctgtgttttttctttttttctcaaccgtctcttttctggctcccttatttctctgtctgcctcccggtccctcttttgccttgggtgtttctctcctgccgtcccgtccacacgcttcccgggttcctgcccgcccagggcattgccacagggaagtaccacgccgcggtgctcaccaacagcgctgagtgggaggccgcctgtgtgaaggcgggcaggaagtgtggggacctggtgcacccgctggtctactgccccgagctgcacttcagcgagttcacctcagctgtggcggacatgaagaactcagtggcggtaggtttggagcctcgaacctggagcctgccacatgggtggagccgggcaggcggagccctgccttcagggtgctggtgcacccagggagctggggccccccagaagcagccacagtgcagacgagggcttgagaggcaggcgtcagggcacaggagtcatccagacagcgtgggccactcactggcttccctgccacacagccaagggtttctcccccagtcttgggtctggctcagttgccccatcaggccctttgctggcttcccccttggcctatggtgggggcagactccttagctcatggtcaaggccctcccagcccagcttctgctgcctccccacacgctccctcccagccaccccgagctccttgcagacagcaatagtgacaggcgatggggcagggtggagagggcccggccggagcaacccacaggcactgtgtcctcctggcctccctaggaccgagacaacagccccagctcctgtgctggcctcttcatcgcctcacacatcggcttcgactggcccggagtctgggtccacctggacattgctgcaccggtgcatgctgtgagtgtctcccctccccactggccctggctgctcccgcccgcttgtccaaacagcgcccctctggctctggagctgctggcagagctcatcagaaacttctgtctgtgacccagcttccagcccgctgtccccaccacccccaggtctcatcctccctgggaacagagtggctgctgtgtgcgacccttccccagccagcctgtcctccataggggatcctgggccctgtctcacccatccccaccctgaggagctcccggggtgaaggcagagcacacagggccttgccccctgcctacgcctggcctgccagccctgaacgtgtccagccagcagcatggaaggctctgggctccggctggtgctcaggatctccttcctgagaaggggactgtggggcacgtggaggggacccaggaggtgaggggtccccaggaacccctcctgtgctgcagccccacgcccagagtctgtgtcctgccctttgcttgcagggtgagcgagccacaggcttcggtgtggccctcctgctggcgctcttcggccgtgcctctgaggaccctctgctgaacctggtgtccccactgggctgtgaggtggatgtcgaggagggggacgtggggagggactccaagagacgcaggcttgtgtgagcctcctgcctcggccctgacaaacggggatcttttacctcaccttgcactgattaattttaagcaattgaaagattgcccttcatatgggttttggtttgtctttctggtcgtcagcgtggtggtggaaacagctgaagttttaggagacagcttagggtttggtgcgggccacggggaggggaccgggaagcgctggggcttgtttctgtttgttacttacaggactgagacatcttctgtaaactgctacccctggggccttctgcaccccggggtgaggcctcctgcctgcctggtgccctgtcccagccccaggtcccgtgcagggcacctgcgtggctgacagccaggctcttactccagccggggctgccagcgcatccagccagcccagccctgtgaaagatggagctgacttgctgcaggggacctgatttatagggcaagagaagtcacactctggcctctcagaattcacttgaggttcaattaaatacagtcacaccgccccctcaaaaaaaaaaaaaaaaaaaaaaaaaaaaaaaaaaaaaaaaaaaaaaaaaaaaaaaaaaaaaaaaaaaaaaaaaaaaaaaaaaaaaaaaaaaaaaaaaaaaa

SEQ ID NO: 24710 - DNA, 4684 bp, Homo Sapiens
cttcggtctcttctccccggctgatcccagcactctccgtgacagcgcctcctgactcagcccaggaccggcttcttctcacgacctgctggagactggacgcccacacctgacccggaactcggaggcgtgcttcctccacccgccggctagcagccccgggccctgagctcccgccgacgccgctggggggcccgacaggcccctcggcgctgatgctgagtgggatcgagggcccggggcggcggcggagtacgggcctctggcgccttaggccagccgcaggtgtcggttcttaggctctccaggctcgctagctcccgccccggcttggatgggtctccctgcgccataaatgtggctgctgaggcggcggtggccgtggcccgtcgcgctgctgctgcggcgctccaagttcatctccgccccggggctctcctgccccacctcggggctgccgccacccgctccttatcccctggccctggccttgcagcgtggcgacaatggacaagatcctggagggccttgtgagttcctcgcatcccctgcccctcaagcgggtgattgtgcggaaggtggtggaatcggcggagcactggctagacgaggcgcagtgcgaggccatgtttgacctgacgacccggctcatcctggagggccaggaccctttccagcggcaggtggggcaccaggtgctggaggcctacgcacgataccaccggccagagttcgagtccttcttcaacaagaccttcgtgttgggcctccttcatcagggctaccactctctggacaggaaggatgtagccatcctggactacattcacaacggcctgaagctgattatgagctgtccgtcggtgctggatctctttagcctcctgcaggtagaggtgttacggatggtgtgtgagaggccggagccgcagctctgtgcccgactgagcgaccttctgaccgactttgtgcaatgcatccccaaggggaaattgtccatcacgttctgtcaacagctggttcgaacgataggccatttccagtgcgtgtccacccaggaaagagagctgcgggaatatgtctcccaggtgacaaaagtgagtaacttgctgcagaacatctggaaggccgagcctgccacactactgccttccctgcaagaagtttttgcaagcatctcttccacagatgcatcatttgaaccttctgtagcattggcaagccttgtgcagcatattcctcttcagatgattacagttctcatcaggagccttactacggatccaaatgtaaaagatgcaagtatgacccaagccctttgcagaatgattgactggctatcctggccattggctcagcatgtggatacatgggtaattgcactcctgaaaggactggcagctgtccagaagtttactattttgatagatgttactttgctgaaaatagaactggtttttaatcgactttggtttcctcttgtgagacctggtgctcttgcagttctttctcacatgctgcttagctttcagcattctccagaggcgttccatttgattgttcctcatgtggttaatttggttcattctttcaaaaatgatggtctgccttcaagtacagccttcttagtacaattaacagaattgatacactgtatgatgtatcattattctggatttccagatctctatgaacctattctggaggcaataaaggattttcctaagcccagtgaagagaagattaagttaattctcaatcaaagtgcctggacttctcaatccaattctttggcgtcttgcttgtctagactttctggaaaatctgaaactgggaaaactggtcttattaacctaggaaatacatgttatatgaacagtgttatacaagccttgtttatggccacagatttcaggagacaagtattatctttaaatctaaatgggtgcaattcattaatgaaaaaattacagcatctttttgcctttctggcccatacacagagggaagcatacgcacctcggatattctttgaggcttccagacctccatggtttactcccagatcacagcaagactgttctgaatacctcagatttctccttgacaggctccatgaagaagaaaagatcttgaaagttcaggcctcacacaagccttctgaaattctggaatgcagtgaaacttctttacaggaagtagctagtaaagcagcagtactaacagagacccctcgtacaagtgacggtgagaagactttaatagaaaaaatgtttggaggaaaactacgaactcacatacgttgtttgaactgcaggagtacctcacaaaaagtggaagcctttacagatctttcgcttgccttttgtccttcctcttctttggaaaacatgtctgtccaagatccagcatcatcacccagtatacaagatggtggtctaatgcaagcctctgtacccggtccttcagaagaaccagtagtttataatccaacaacagctgccttcatctgtgactcacttgtgaatgaaaaaaccataggcagtcctcctaatgagttttactgttctgaaaacacttctgtccctaacgaatctaacaagattcttgttaataaagatgtacctcagaaaccaggaggtgaaaccacaccttcagtaactgacttactaaattattttttggctccagagattcttactggtgataaccaatattattgtgaaaactgtgcctctctgcaaaatgctgagaaaactatgcaaatcacggaggaacctgaataccttattcttactctcctgagattttcatatgatcagaagtatcatgtgagaaggaaaattttagacaatgtatcactgccactggttttggagttgccagttaaaagaattacttctttctcttcattgtcagaaagttggtctgtagatgttgacttcactgatcttagtgagaaccttgctaaaaaattaaagccttcagggactgatgaagcttcctgcacaaaattggtgccctatctattaagttccgttgtggttcactctggtatatcctctgaaagtgggcattactattcttatgccagaaatatcacaagtacagactcttcatatcagatgtaccaccagtctgaggctctggcattagcatcctcccagagtcatttactagggagagatagtcccagtgcagtttttgaacaggatttggaaaataaggaaatgtcaaaagaatggtttttatttaatgacagtagagtgacatttacttcatttcagtcagtccagaaaattacgagcaggtttccaaaggacacagcttatgtgcttttgtataaaaaacagcatagtactaatggtttaagtggtaataacccaaccagtggactctggataaatggagacccacctctacagaaagaacttatggatgctataacaaaagacaataaactatatttacaggaacaagagttgaatgctcgagcccgggccctccaagctgcatctgcttcatgttcatttcggcccaatggatttgatgacaacgacccaccaggaagctgtggaccaactggtggagggggtggaggaggatttaatacagttggcagactcgtattttgatcctgagagagtccaaaatgcactggtcacgaaacgtctaatactatgactgttaaaatgtcagactataacaaatatctatcttttatttttcattagacccttatacttcaagagaacacactcagtgcttgtttttattttcttgacacatttattaacaaaatgcatcatggaaaaaaaatctacctcttaaaattccatttgcttttatggttagacatgcttgaccaaaaatgttcagaagaaaatatgtacctggtccctaattaagctgcgttaaatttggtagaagcatttaaatggtctatcttcagttttactgaacaaaaaatgtaatttatttagcattctttataaaagaattgatgctagaggtaaaaaaaaatacttgtttttaaaaaatcctttacgtcttgtgtaattaccccattattaaattcaagtccttgaaaatcaactagagattataaagtctctaaagaaggcaataacaaaatttatcaagatatagtacttttcagtttttgtttagtgtcttcagcatcactgtgtctgtatttcaagtacaaatgtttttaaaaaggattctttatacatatgtgctgaattgattttaagaaagttgcatgatcctgtaggagcaacatttttacctaaaaaatgctaactttatagtatttctaattgttcaaggattttaaaattctatttcagggagtatatcttctgtggttttgaaggaggtgagttctgtatgtgccttgcagtactgtaattcaaaaataggaatctttggctgcaaaattttaatgaaatgttaggaagtaattttcgtgctaacattaaaattataactttttgaaaggtaatagattttccagaagtaaaatctgatggttctaaatcaatcaatgtgatagttcatttttaactcttagaagaattcagaggaaattaacccagctaagtaaaaaatctgtcttgattttgttacttattcctcagaatattaaacattgatcacataaaaaaaaaaaaaaaaaaaa

SEQ ID NO: 24711 - DNA, 3022 bp, Homo Sapiens
gcaaggcggcgattttcccttctgtcagatcttgatgaacaaagcagtcataattcatctctagaaagatttatatcctggcatttgaaatgctttttatttagaatagtagtaaaaaatggaaaaagaaaaaggaaatgatgatggaataccagaccaagagaattccttggatttttctgaacactttaaccaacttgaattgttggaaacacatggacaccttattcctactggtactcaaagtctttgggtaggcaattctgatgaagatgaggagcaagatgacaaaaatgaagagtggtatcgattgcaagaaaaaaaaatggaaaaagacccaagcagattgcttctttgggctgctgaaaaaaatcgggtaaaaaaaaaaattacagagggaagtgtgacagtaggaaaagcactgggttcaagccagaagacctgcctttactgttatggccatcatacctatctcttgattgtgaggaccaaatgagacaatgtacatgaaagcacatattaagctgcaaagtgtcatgctaggtattatttgggggtttaaggataattatctataaagatagcaagcaatcatctatattttaaaatcatttatataaagtcattaggatcatttaggaaagagaggatggaaactaacatttattaaaaactaactataccaggtaccttattacattattttatttaatcatcatgtatccctataagtaatattcttctcttttatagagtaagaaattgagattcaggaatattaatttgcccaggatcatcgaagtggaatgaacatcaaaagcctattccctctgcttggccacttccacctcattttactaagtttccccatgtctgtgttagtaaactaataactaaaagggtctcgcattttaaatagctttttaacccaagagcatgccacatttaaccagaggcccatagaacaaactgaaaattacaacctaaaaggttgtttctaaggttgtattgagaaggaattgagctcttgaatccctagaattccttattaatactttattcttctgttaaaagttttatttttaaaagtttcatacagtgtgtatattggtgtgataatcctacagaaaaatcaagcagttatgttttcttcacagataacacataaaatattaaacagaaagcctatgttattcattggactgaagcttttatgcaataaaccttagttggaccaggagtaaatgtatggtttgatattcagagaatctcattcttagaagcaacaaagtgtagttaacactaacttgttcattcttaaatcagtagtcctctcctccccaaaaagagatcttaaattattttcattttaaagtcatctactaacaagtaagtttttattcaacttaattaaatctaacaccacaagacaattttgttttagttattgttttggtttgagttgagttgaaagatttcttttttttcttctcagcttaccacagtgcggagactgctttctgaaaaggccactcacgtgaacactagggatgaagatgagtatacccctcttcatcgagcagcctacagtggacacttagatattgttcaggagctcattgcacagggggccgatgttcatgcagtgactgtggatggctggacgcccctgcacagtgcttgtaagtggaataataccagagtggcttctttcttactgcagcatgatgcagatatcaatgcccaaacaaaaggcctcttgacccccttgcatcttgctgctgggaacagagacagcaaggataccctagaactcctcctgatgaaccgttacgtcaaaccagggctgaaaaacaacttggaagaaactgcatttgatattgccaggaggacaagtatctatcactacctctttgaaattgtggaaggctgtacaaattcttcacctcagtcttaacaattctagtaattttcctaagtttctaaataccagtgcctcctgtgtgtgagatgtattcccataatcaaagttgacgtcaaacatcttactacaaaaattcagtgacattcattataacattcttccaagtgaattgcctgactttgatgtcaaaatgtatttgaaagtaatttgcatatatctttaattatttctgtggagtttgtgatttttttatcagaaataattttaatgtgtgtatacttaaaaacttgacacgggttgtacagaaactggtatttttggtgctgatacaagagaaatgtatttttaaatatcccacatcctggatctttgttgggtatttagtatattgacatatatttttataaggtgaggtaactcagaacttaatttaaaagtcttaaatattctgatacaattcagctgtcttctctaccttaccatagccagttgctttcattttaaaccagagcaagtaacatattagtgacttgaatcttcataagttaaagtaaaaaacagcaaaaaacctagatctttgtcttttagaacacagaccattttcaggaaagcagttagctaagtgtttaattcatgaatattgtatactgcatcccctaccacaatttacacaatcctgtggatagtcctacctcaccctggtcaacctacatgatccttaagctaatggcgaatcacgatgaccttgtagacatgcacacaactatacctttgtccaacagatcataatatatctgctatccaactggttttacctgcctaatcctactgatttgggcactgcttgtatagtctctcaagttcacaggaaatgttgattttctaaggtcctcatttttacagagtatacaggcaaagtgacaggggaaaaggaattagtctaagagtaaggggatgattattatattgaggctaaaaccacaaagtggctcaggctttaaaaaaaaaacactgtggataatgacaaaaagcataagtaaaaatatttgagaaaaataaagtacaagttttgaacaacaaaaaaaaaaaaaaaaaaaa

SEQ ID NO: 24712 - DNA, 2315 bp, Homo Sapiens
ggttaggaaagtgatttggggctgcttttcattaaaagggaaaccttaccgaggactcccgtaccctatctacccaagtaatttctttttaactcctatgtcagtattaacacagagtagttcaaatgttgcagtcagattgctagggttcacatcctggttttgccatttactatttggtgccctaagttaacaccttactagcctctcagtgccccatttttctcatctgtaatatttagacaataatattacccacttattagggttgttaggaagatttagtttaaaatacatgttaaatgcctagcatatagtaagtgcacagagcatgttaattttcctttctctttgccagcaaaaacgattatgtgatttagatatggtagtgatagcctctattggaaattttgatagcattaggtaattttagattatttttctttttagaacctcaaagaacacttggtatcattacatgaaatgctaaaatgtatatctatgtgtatgtgcaaatattttcataaaagtctttgaaaaaccctctacttcttcccaagaaaggatctcactaaagattatttggtaaaaaaagaaatcttggagcacagccaaaaaaccgggaatgaaaaaatactgttttcacacccagaaactctgtatgtataatcagaattgtacatcttaggatgttagggaagctttctttgttccatgcaaaacaaacactgaccgtccacttcttggacttgagaaatgttgaaagtttctttacaaatggatgtctagggcaggactggcaggaggaaataattcttttctcaaaacactttttttgattccagtaagtggaggaacattgttgaaacttccctcaccacgccctctgctgagtgtttgtgaaactcaggtgagttaaatgtgtagcacacgcttgtccaacctgcagcttgtggtggctttgaatactgcccaacacaaatttgtaaactttcttaaaacactgtgagttttttttttttgcgtttttttttaagctcatcaaatatcgttagtgtattttatgtgtggcccaagacagttctttcagtgtggcccagggaagccaaaagattggacacccctggtgtagtggttcctcccacttctcccatacttgacccttatttgaactaggattatttctttttttttaccctcctggatgagtggaggaagtccttgaaatctattttactgctactgttattactactttttaaaatggaaacatacacagaagtagagtcagtgagcccttatgtttgtaccagttttatcctacccctacatttgacctacttcttgtcctcatctttgaaaaaagcaaatttggcagggtggaggcggaggagggcgggcgccggagcccagccggagcgggcgttgaaggctggcgcggcgagcgctgttcggggctggagggggtaaggccggcaagggcggcccgaccctccaggaggccatccagcggctgcgggacacggaggagatgttaagcaagaaacaggagttcctggagaagaaaatcgagcagaggcacggcaccaaaaacaagcccgcggccctccaggcactgaagcgtaagaagaggtatgagaagcagctggcgcagatcgacggtacattatcaaccatcgagttccagcagcaggccctggagaatgccaacaccaataccgaggtgctcaagaacatgggctctgcagccaaggccaagaaggcggcccacgacaacatggacatcgataaagttgatgagttaatgcaggacattgctgaccagcaagaacttggggaggagatttcaacagcaatttcgaaacctgtagggtttggagaaaagtctgacgaggatgagctcatggcggaattagaagaactagaacaggaggaaccagacaagaatttgctggaagtcagtggccccgaaacagtccctctaccaaatgttccctctatagccctaccatcaaaacctgccaagaagaggaagacgacgacatgaaggatttggagaactgggctgggtccagcgcgggcaggatggatgtggtgcaggcaggttccatcgctctcgactctcactccaaagcagtagggccgcattgctgctcgctctctgcatagcatggtctgcacctagtgggatgggtgggggcgggtagaggggggttgcggggcacgggggctgtgggggagaagtgccttctgtttataatgttgaatttctgtaaaataaactgtgtttgcaaatccaaaaaaaaaaaaaaaaa

SEQ ID NO: 24713 - DNA, 5025 bp, Homo Sapiens
tctgtgtaacatggcggtaggctgggaccataacacaagcatgactatatgaaggaagaggaaggttttcctgaagatgaggcgactgaaaaaaaaaaactttaagtttggtaaaagagttggatgcctttccgaaggttcctgagagctatgtagagacttcagccagtggaggtacagtttctctaatagcatttacaactatggctttattaaccataatggaattctcagtatatcaagatacatggatgaagtatgaatacgaagtagacaaggatttttctagcaaattaagaattaatatagatattactgttgccatgaagtgtcaatatgttggagcggatgtattggatttagcagaaacaatggttgcatctgcagatggtttagtttatgaaccaacagtatttgatctttcaccacagcagaaagagtggcagaggatgctgcagctgatttagagtaggctacaagaagagcattcacttcaagatgtgatatttaaaagtgcttttaaaagtacatcaacagctcttccaccaagagaagatgattcatcacagtctccaaatgcatgcagaattcatggccatctatatgtcaataaagtagcagggaattttcacataacagtgggcaaggcaattccacatcctcgtggtcatgcacatttggcagcacttgtcaaccatgaatcttacaatttttctcatagaatagatcatttgtcttttggagagcttgttccagcaattattaatcctttagatggaactgaaaaaattgctatagaccacaaccagatgttccaatattttattacagttgtgccaacaaaactacatacatataaaatatcagcagacacccatcagttttctgtgacagaaagggaacgtatcattaaccatgctgcaggcagccatggagtctctgggatatttatgaaatatgatctcagttctcttatggtgacagttactgaggagcacatgccattctggcagttttttgtaagactctgtggtattgttggaggaatcttttcaacaacaggcatgttacatggaattggaaaatttatagttgaaataatttgctgtcgtttcagacttggatcctataaacctgtcaattctgttccttttgaggatggccacacagacaaccacttacctcttttagaaaataatacacattaacacctcccgattgaaggagaaaaactttttgcctgagacataaaacctttttttaataataaaatattgtgcaatatattcaaagaaaagaaaacacaaataagcagaaaacatacttattttaaaaaagaaaaaaaaggataaaaaaacccaaactgaaattctatatacgttgtgtctgttacaaatgtcgtagaagaaatcatgcagctaaacgatgaagaagcccaactggagtgttgctttgaagatgacgccttcttatattttcatagcaaatgggtggtatcaaaatcagacattgcttcttgctgataaaaagcctgaaggaaataagtgaaactacatctatgggaaaaaaaaaaacattgagaagtgcaaatgttcgcatccttttgtttttaaaagatatgatgtcagaataaaatgtggaaaacatacggaaaactagtctagactttaaagaattgtgatcaggtcacattgttaataaaaaaaaaaaacgggctagtccctatgttatagccatattaatgttaagccatattgacaagaccagttatccaataatttggtcttaaaaagtaactacttttctttgaactctggttattgacttatctaactgttgaagatagagtcttagaagactaaggtaaattctcacaggggcagatatgtaggtgttatgtaactagggtgtcattcacaaatggtatagtagaatcttatacacggaaaagaaagcacatttttttaaaaaagatgccaagttttttaatctaatcattatattattggtgtattttgggcaacatagggtgagttataaaaagatccgctactgatagtgaaaattaccggtttgtaaaacattaagagaaaaaataggatattttatacatgtggtgagtggagaacagggtaactttaaatgaaagtgtaaggcaaattgtaagcaccacaagatatatcagatttgagaggtgccatgttaaacattgtccattaaactataaaactgtattatgaagtatttgcattcagggtgtcctgaatatgattgattctgtattagattgtgttctaactttcttactatttaaggattggttctaaatcttcacattataagagattaaaaacagtgagagggagctatcacacaggtactattaaaagctgtatttggaatatgtgtaccaatatcagttttccttttgtagtactgaatggcagtagaagaatcagcagccaatcctcaaagtttaaatcatttaaggaaatggggaaacaaaattccaggtaaataacaagactgaaaaactagatttaaaatagtggttttagaaaacaggatatcacaagtaacagtttttcaaatggatttttttaaagataaatttatgaaaacaggataaacaatataatggagagaaggagaaatagtgatgggtctgttttgcagtaaagtttatgcagaatgacgttttgcagaaaataacagaagcatcactttaaaaaatatatcattaagagccatgacgttaactgatgaaaatgagtgatataacatactttgaaagatttttaaacagaaaattctgaatcgtgaatgagccttctctaggttttaattttttttcttcaaattatttccaacaaagtttggctataaactaacaccatctatccacaggaattttaataggaaaggattagaattgtagactgattgttggtcctttaagtatgcttggaagaaaattcaatcgagtttcaaggctttttctaaatgggagggagaacaatattgatttaggattattttctttcatttaggattagaacagttaagtgcctttaaaaaggactttaaaaattattttgatacttatatatgatttttaattgttttcgtatttcccaaataccatattaaaattttaatgaaatttatctcctatgaaaggaatttctttaaagcaaaattctgctttgcctttgatttccattttaaaagttaaaggcttccatctgaaactcctcaaatagagtcagatttttggcaatggaagtattaaaattccgatcagccctttggacgatgaagtttacctgcatattaggatttgttaggagtttttggcctcaccaagtgattcttttctattgcagagagcactttactcacctacctgttatgcaactttccctatgcctggaggtgcctccagccaggataccctactttgttacccaattctcctttttgttttacaagagtattcataatatctatatgtttatattccagactacatatttaaaaatgagatctcaaattatatgaaatggatttttaaatactgtgtttgcatacattgacctataaagaagattaaatatttaggtgaataattccctgctgcagtatttgtacacttcagactacctcttaggaaaagcttaacctagtattgcaaaattccctttctctttttttttttaagagatggggtctcgcactgttgcccaggctgaagtgcagtggcatgattgtaactcactgcatcctcgaactcctgggttcaagcaatcctcctgcttccatctgctgagtaggtaggactacagccatgcaccaacaaacctggctaattctttttcatttatatagttagtatcttgctgtgttgttcaagctggactccaactcccggactcaagtaatccccccaccttagtctcctgcattgctggaattataggcacgagccactgcacctggcacccaaattacttctagttctcaagttagatgattaatatcacacttttctcatgtatgttttatgatagcattgaatttttataattaaaaatttactaatgcaaacaagatttacagtctttaatacaatcttaattttggaattcatgaaggaatgactaagttctaatttttttttttttttttttgaaactgagtctcgctctgtcgcctaggctggagtgcagtggtgcaatctcagctcactgcaacctccgtctcccgggttcaagtgattctcctgcctcagcctgttgagtagctgggactacaggtgcgtaccaccaagcccagctaatttttttatatttttagtagagacggggtttcactgtgttagccaggatggtctcaatctcctgacctcatgatccgcccaccttggcctcccaaagtgttgggattacaggcatgagccaccgcccctggacagatctaattttttaatagtgtaagagagatacactgtgcattccatctatgtcctgagttagtaattcaagtaccaaaaagtaatttaatatgaaactccttgaaaattcagagcttacacttgaattcaaaatgcctatttttgattgtttaaaagttacttaaacctgagctttaggacctttaaaatctcagcatgccttttaagctagtacttttcctgttttgagctctagcaaaccttcagcaagccaaggtggtagccctttttcaacacaatcaaaatagagaggtcaccagttgtttactaccttatggtaaaatgcccggatcaagatccatgtatcccccccatattgtgatgatgcaatcaaagcatagtttttttctactttctgaaatattactgatgaaatcactttacatttaagaggagaaaacagactgccttggatttttttttgtcttgagagaaaaaacaaaatatttagtattgcaagcataaacatttggactcaataaatgacaaattatagaaaaaaaaaaaaaaaa

SEQ ID NO: 24714 - DNA, 4828 bp, Homo Sapiens
cacaaatttattctacagcgcagctaccaagccttttatcagttagtcagtcccaaaattacggtttagtacagccacataatgtgccatctattgttcattcacaggtttataggtccagcaaggttgagaaattgccacccttgtataaaacattgactttttctgggtcatctcagactataactcctgaaaatcagacgcttaattattcatctaatcagcaagaggtattgtcttcagttacaaatgagaattaccctgctcaaacaagagatctgtcttcagtaagtcagtctcaaagttactcatctggtcactctcagggtttatcaccagttagccagacacaggttagctattcatctcaatcacaagttttgtcagttgttagtctttcagaaagctatgcttcaggggagtccctaacattaacagccccttctctttcttattcttctgcctctcgggctcagaatttgccagactctagcccgacccagaattatatttctatgcattcttcccaaaatgttcagactcaagagtcatcatctccccagtcccagaagtttttgcctgctgtccagtcatcatcttttgcatcctctactcattgtcagacattacaaaataacataacttcccctgacccaaagtcttatgctgaaagaaagcttgactcagatgtgtatccatcttcaaagcaagaagatggttttccaatgcaagagttacaggtgttgcagccacaagcatctcttgagtcatcaacccaaaggctatctgatggagaaattaatgctcaagaatcaacttataaggtgtcaaaggcagatgacagatattctcagagtgtaatcagaagtaattcccgtcttgaagatcaagttattggggttgctctgcaagcatcaaaaaaagaagaaagtgttgttggttcagtgacacaacttaaccaacaaattggccaagtcaataatgcagctacccttgatcttaagaactcaactaatttaatacagactccacaaataaggttgaatactaaagacttaaagcagcaacatcctctcatacttaaggtgcatgagtccaaggtccaggaacagcacgatcaaataattaatgcttcatctcagattcaaattccaaatcatgctttagggcatggccatcaggcatctcttcctaatacacaggtccttttagattctgcctgtgatttacaaattcttcagcagtcaatactgcaggcaggtttaggtcaagtaaaggcatctttacaagcacagcgtgttcaaagccctcaacaaatagtacatcccttccttcagatggaaggtcatgttattcaaagcaatggtgatcattctcagcagcaactccatcctcaaaattctgaagttatgaaaatggacctctctgagtcttcaaaaccattacaacaacatctaacaacaaagggccattttagtgaaacaaatcaacatgattcaaagaatcagtttgtttctcttggatcgatgtgtttcccagaggcagtgcttcttagtgatgaaagaaatattttatcaaatgtagatgatatcttagcagctacagcagcagcttgtggagttacacctactgatttttccaagtcaacttcaaatgaaaccatgcaggctgttgaagatggtgattctaaatctcattttcagcagtcattagatgtcaggcatgtgacttcagattttaactctatgacagctacagtaggaaagccacagaatataaatgatacttccttaaatggaaatcaggttactgtgaacctttcaccagtacctgcccttcagtcaaaaatgactcttgatcaacagcacattgaaacacctggtcaaaatataccaactaaagtaacttcagcagtggttggaccaagtcatgaagtccaggagcaaagttctggcccattcaagaaacagtctgctaccaatcttgaatctgaagaagacagtgaagctcctgttgatagtacattaaataataacagaaaccaagagtttgtttctagtagtagaagtataagtggagagagtgctacatcagagagtgaatttaccttagggggtgacgacagtggtgtgtcaatgaacccagctaggagtgcacttgcactgttggccatggcccaatctggggatgcagtcagtgtcaagattgaagaagaaaaccaagatttaatgcattttaaccttcaaaagaaaagagctaaaggaaaagggcaagttaaagaggaagacaacagtaatcagaaacagctgaaaagacctgcccaaggcaaacgccagaatccaaggggaacagatatttacttaccgtatactcctccttcctcagaaagctgccatgatggttatcagcatcaagaaaaaaatgagacagaagatcaaagaggtggaggaaaaacaaccggaagtcaaaacaggatttattgcttctttcttagattttctgaaatccgggcccaagcagcagttttccactcttgctgtacgaatgcctaacaggactagacggccagggacccagatggttcgtacattttgtcccccaccacttcccaagccttcatctacaacacccacacctttagtgtctgaaactggcggtaacagtccatcagataaagttgataatgaacttaaaaacttggaacatttatcttcattttcttctgatgaagatgatcctggatatagtcaagatgcttataaaagcgtctctactcccttaactactttggatgctacttctgataaaaagaagaaaacagaagccctacaggtggcaactactagcccaactgccaatactactggtactgctactacttcctcaaccactgtgggtgcagttaagcaagaacctctccactctacttcatatgcagtaaatattctggaaaatataagctcttcagaatcctcaaagcccattgaacttgatggttttccttcagaccagtttgcaaaaggacaggacactgttgccatagaaggttttacagatgaggaggacacagaaagcggaggagaaggccaatacagagagcgtgatgaatttgtggtaaagatagaagacatagagacttttaaggaggctttaaaaacaggaaaagaacctccagctatttggaaagtacaaaaagctttattacagaaatttgttcctgaaattcgagatggtcaaagagaatttgctgctacaaatagttatcttggatattttggagatgcaaagagtaaatacaaaagaatatatgtgaagttcattgaaaatgcaaacaagaaggaatatgtcagagtgtgttctaaaaagccaagaaataaaccttcacaaactatcagaactgttcaagctaagccaagtagtagcagtaaaacttctgatcctctagcatcaaaaactacaactacaaaagccccttccgtgaaacccaaagttaaacagccaaaagtaaaggctgagccaccaccaaagaaacggaaaaaatggaaagaagaattttcatcatcccaatctgactcatctcctgagatccatactagtagtagtgacgatgaggaatttgaacctcccgctccctttgtcactcgctttttgaacacaagagcaatgaaggaaacctttaagagctacatggaattgcttgttagcattgccttggaccctgacacaatgcaagccttagagaagagcaatgatgagctacttttacctcatatgaaaaaaatagatggcatgctaaatgataaccgaaagagacttcttttgaatcttcatttggatcaatcattcaagaatgctttggaaagttttcctgaactaacaataattactcgagattctaaagcaaagagtggaggaactgctatttctaaaatcaaaatgaatggcaaagcctataataagaaaactctaaggacttctaaaacaaccaccaaatctgcacaagagtttgctgtcgatccagagaaaatacagttgtattctttgtatcattcactccatcattataagtaccatgtttatctgatatgtaaggatgagatttcttcggtgcagaaaaaaaatgaagatttaggacaggaggaaattgttcaactttgtatgaaaaatgtaaaatgggtggaggacctctttgaaaaatttggagaacttctaaatcatgtacagcagaaatgttcctgacttttccacaaaaatcccatctttttatagcactaatgaaatggcagatatggggtggtcaaagataatcagatgtcaagtagtggccttctgcaggccggccgcttccatcatggaactgtcattaccacctctgctgaaggacagtggtgcggcctttaggaacgaagttagtcctctggaaatggacctaaatcccaccacatttttaccctaatgaatgatttttctattttgtaaaccattgggtaacttgagtcatattttcagaaacattttttgacaaatgatgaagcatgcactaagtataatttttttttattgctagagaagtaacacttaaagtaacgattttttttttctgactccggctaaacaccagaatgacagagaagtggcagaaaccatatgtttgtactcacatctggccacaaaaccagaaatactgtacattatgtaaagaggtctggtgtggtgtgacatcctgtataagaatatcatcaatttaaaatataaaatttggaaactaaaaaaaaaaaaaaaaaaaaaaaaaaaaaaaaaaaaaaaaaaaaaaaaaaagaaaaaaaaa

SEQ ID NO: 24715 - DNA, 4685 bp, Homo Sapiens
tgttcggattatcttttgcttccccccagctgcctccttaccctcacactcccactcctccgtttccgcggtcgaagctgccttcggccccgggtggtctcccccgcccggggaccccctgtgcctcccctcccgggctgcgggggagcccctccgagaccatgaggaaattcaacatcaggaaggtgctggacggcctgaccgccggctcgtcctcggcgtcgcagcagcaacagcagcagcatccgcctgggaaccgggagccggagatccaggaaacgctccagtccgagcactttcagctctgcaagactgttcgccatggatttccctatcaaccctcagccctggcctttgatcctgtacagaagatcctggcagtgggaactcagactggtgctttaaggctctttggtcgtccaggagtagaatgttattgccagcatgacagtggagctgcagtaatccagctccagttcctgattaatgagggagcgcttgtgagtgccttggctgatgacaccttacacttatggaatttacgtcagaagaggcctgccatactacattcgcttaaattttgcagagaaagggttacattttgccatctgcctttccagagtaagtggctctatgtgggcactgaacgaggtaatatacatattgtcaatgtggagtccttcacactctcaggctacgtcattatgtggaataaagccattgaactgtcatctaaatctcacccaggacctgtggtccatataagtgataatccaatggacgagggaaagcttttgattggctttgaatctggaacagtagttttatgggacctcaaatcaaagaaagccgactacagatacacatatgatgaggctatccactctgttgcttggcatcatgaaggaaaacaatttatttgcagtcattcagatggcaccttgactatatggaatgtaaggtcccctgctaaaccagtacagacaatcactccacatggaaaacagttaaaggatgggaagaagccagaaccatgcaaacctatcctcaaggtggaattcaaaacgactagatctggggagccttttattattttatcaggaggtttgtcatatgatactgtaggaagaagaccttgcttaacagtgatgcatgggaaaagcactgctgtgctagaaatggactattcaattgttgattttctaacgctgtgtgaaacaccatacccaaatgattttcaagaaccatatgctgtggttgttcttctagaaaaggatttagtacttatagaccttgcacaaaatggatatcctatatttgaaaatccctaccctttgagtatacatgagtcccctgttacatgttgcgaatattttgcggattgtcctgtggaccttattcctgcactttattctgttggagctagacagaaacgtcaaggttacagcaaaaaggaatggcccatcagcggaggtaattggggcttgggtgctcaaagttacccagaaataattattacagggcatgctgatgggtcagttaagttctgggatgcttctgcaataactctacaagtattatataagctaaagacatctaaagtatttgaaaagtcaagaaataaagatgacaggccaaacacagacattgtagatgaagatccatatgccattcagatcatctcctggtgtccagaaagtagaatgctgtgcatcgctggagtttcagctcatgtcattatttatagattcagcaagcaggaagtaatcacagaagtcattccgatgcttgaagttcgattattatatgagataaatgatgtggaaactccggagggtgagcagccaccacctttgccaacacccgtgggagggtccaaccctcagcccatccctcctcagtctcatccatctaccagtagcagttcatctgatgggcttcgtgataatgtaccttgtttaaaagttaaaaactcaccacttaaacagtctccaggttatcaaacagaactagttattcagttggtttgggtgggtggagaaccaccacaacaaataaccagcctggcagtcaattcttcctatggactggtggtttttggcaattgcaatggcattgctatggttgactacctccagaaagcagtgctgctcaacctgggcactattgaattatatggctctaatgatccttatcggagagaaccccgatctcctcgtaaatctcgacagccttcaggagccggtctgtgtgatattagtgaagggactgttgttccagaggatcgctgcaaatctccaacctctggttcttcatcaccacacaattcagatgatgaacaaaaaatgaataattttatagaaaaggtgaagaccaaaagcagaaagttttccaagatggtagccaatgatatagatgtggaagtcatgtatgactggatttctctttgtttacatggcgcccttatggactagcaggcaaagatgtcaaggaagttaagcttacctactgacctaaagcctgatttagatgtaaaggataactcctttagccgatcacggagttcaagtgtaacaagcattgacaaagaatcccgagaagcgatctccgctcttcatttctgtgaaacgtttactcgaaagacggactcgtccccttccccttgtctgtgggttggaacaacgctaggaacagtgcttgtcattgcactgaaccttcccccagggggagagcaaagacttcttcagccagtaattgtgtctccaagtggtactatattgaggttaaaaggtgcaatcttgagaatggcatttctggataccacaggctgcttaataccacctgcgtatgaaccctggagagagcacaatgttcctgaagaaaaagacgaaaaggagaaattgaaaaaacggcggcctgtctcagtatccccctcctcttctcaggaaattagtgaaaaccagtatgcagtgatatgttctgaaaagcaagcaaaagtaatctcactgccaacccagaactgtgcttataagcaaaatattacagagacctcgtttgtgcttcgtggagatattgtagcattgagtaacagtatctgccttgcctgtttctgtgccaatggacatataatgacctttagtttgccaagtttaagacctctgttggatgtgtattacttgccccttaccaatatgcggatagccagaacgttctgctttaccaacaatggacaagcattataccttgtttcacctacagaaatccagagacttacttatagtcaagagacctgtgaaaatcttcaggaaatgttgggtgaactcttcactcctgtagaaacacctgaagcaccaaacaggggattctttaaaggcttatttggaggtggtgcacaatctcttgacagagaagaactatttggagaatcgtcctcaggaaaggcttcaaggagccttgcacagcatattcctggccctggtggcattgaaggcgtaaaaggggcagcatctggagttgttggtgaattagcacgagccaggctggcactagatgaaagagggcagaaacttggcgatctggaagaaagaactgcggccatgttatcaagtgcagagtcattttctaaacatgctcatgagattatgttgaaatacaaagataagaagtggtaccagttctgacaaccagaatccaataagtccaacttcagccagaaggaaaaaagttttccatttttattacattctttaggaaagttaacgttaaagggatgttcgtcactgaatactgttctttcctagcacagtcatgcactgttttacctcagtcatgtggctttaactgaggagtgttcacacgcactcgaaatggagtatatggtgtgtgccagttatgagttgaccatttgggaattaaacaggtcacacgtgacagatgaagaaaccaagggggctgctgaggagacctggtgcagggactaatcctggatcattcctgtattaaactttcatatgccaaaagggtttgtgccgttttatctgccatcagtgtttgacctgtttagggcagaggcaataagtcagaagtcttgaagttgaaatagttatatgtgtgtcattggactggattataaacagctgtcttggactttccctctcttaacactgactggtcatcagtatcattagtgaaaaagaaacaaattgtttgttatcatctctttagacagataagctgaatggtgggctttaaataataaaaacatacacatagttgacttgtgtatgagctactcttggattcttgttattatagacttgtatttagttcatattttgtcaaaagcaaaacaagaagatacatcacttttcattgaaaagaaaagtgtagagcatgactgaattgctcatcattctgggagtttccatgtagtggctatgcagtgtggaaagtgagaaaaacctccattgtggtgaggagaatacttcaatgtcccttgtccttgttctcattaattcagctaaaggtggatttgaccaaaataatgctggttaaatttgtagaaatgttgaaattggctgtgttttaaattttgcttgaatttttataaaatgtttaaccaaatgtacctttgcattctttaattaaaattgcttaaaaaaaaaaaaaaaaaaaaaaaaaaaaaa

SEQ ID NO: 24716 - DNA, 4502 bp, Homo Sapiens
ggggccgtcttcccggcgagtccgcgacggtcgccgcccacggcgagctatgtgttctcatttcacccaagactttttgccagtgcaggggatagaagattcattccacaaacttatactgagaagatatgagaaatgtgggcatgataatttacaattaaggaaaggctgtaaaagtatgaacgtgtgtaaagtgcagaagggagtttataatggaattaataaatgcttgtcaaatactcagagcaaaatatttcaatgtaatgcacgtgtcaaagtttttagtaaatttgcaaattcaaacaaagataagacaagacatactggagagaaacactttaaatgtaacgaatgtggcaagtcatttcagaagttctcagacctaactcaacataaaggaattcatgctggagagaaaccctacacttgtgaagaacgtggcaaagactttggatggtacacagacctgaatcaacacaagaaaattcatactggagagaaaccttacaaatgtgaagaatgtggcaaagcctttaataggtcaacaaaccttactgcacataagagaattcacaacagagagaaagcttacacaggtgaagatcgtgacagagcctttggatggtccacaaacctgaatgaatataagaaaattcatactggagataaaccctacacatgtaaagaatgtgggaaagcctttatgcattcctcacacctgaataaacatgagaaaattcatactggagagaaaccctacaaatgtaaggaatgtggcaaagtcatttcctcatcctcaagctttgctaaacataagaggattcatactggcgagaaaccctttaaatgtttagaatgtggtaaagcgtttaatatttccacaacccttactaaacataggagaattcatactggagagaaaccctacacatgtgaagtatgtggcaaagcctttagacagtccgcaatcctttatgtacataggagaattcatactggagagaaaccctacacatgtgaagaatgtggcaaaacctttagacagtccgcaaacctttatgtacataggagaattcatactggagagaaaccttacaaatgtgaagactgtggcaaagcctttggacggtacacagacctgaatcaacacaagaaaattcatactggagagaaaccttacaaatgtgaagagtgtggcaaagcctttgtttgttcaacggaccttgactgcaacatgaagagaattcacactaggaggagaaaccctacacatgtgaagatctgtggcagagcctttggatgtccacaacctgaatgaatataagaaattcatactggagataaaccctacaaatgtaaagaatgtgggaaagcctttatactagttccttgcacctgaataaacatgagaaattcatactggaaagaaaccctacaaatgtaaggaatgtggcaaagtcattacctcatcctcaagctttgctaaacataagaggattcatactggcgagaaaccctttgaatgtgagaatgtggtaaagcgtttactaggttccacaacccttactaaacataggagaattcatactggagagaaaccctacacatgtgaagtatgtggcaaagcctttagacagtccgcaatcctttatgtacataggagaattcatctggagagaaaccctacacatgtgaagaatgtggcaaaaccctttagacagtccgcaaacctttatgtacataggagaattcatactggagagaaaccttacaaatgtgaagagtgtggcaaagcctttggacggtacacagacctgaatcaacacaagaaaattcatactggagagaaactttacaaatgtgaagagtgtggcaaagactttgtatggtacacggacctgaatcaacagaagaaaatttacactggggagaaaccttacaaatgtgaagagtgtggcaaagcctttgccccatcaacagacctgaatcaacacacgaaaattcttactggagagcaaagttacaaatgtgaagagtgtggcaaagcctttggatggtccatagccctgaatcaacacaagaaaattcatactggagaaaaaccttacaaatgtgaagagtggtggcaaagcctttagtaggtcaagaaaccttactacacataggagagttcacactagggagaaaccctacaaatgtgaagatcgtggcagatcctttggatggtccacaaacctgaacgaatataagaaaattcatactggagataaactctacaaatgtaaagaatgtgggaaagtgtttaaacagtcctcacacctgaatagacatgagaaaattcatactggaaagaaaccctacaaatgtaaggaatgtggcaaagtcattacgtcatcctcaagctttgctaaacataagaggattcatacaggtgagaaaccctttaaatgtttagaatgtggtaaagcgtttactagttccacaacccttactaaacataggagaattcatactggagagaaaccctacacatgtgaagaatgttgcaaagcctttagacagtcagcaatcctttatgtacataggagaattcatactggagagaaaccctacacatgtggagaatgtggcaaaacctttagacagtctgcaaatctttatgcgcataagaaaattcatactggagagaaaccctacacgtgtggagactgtggcaaaacctttagacagtctgcaaatctttatgcacataagaaaattcatactggagataaaaccatacaagtgtaaagaatgtgcaaagcctttaagtcatactacagcattcttaaacataagagaactcataccaggggaatgtcttacgaaggtgacgaatgtcgcggtctttaaatgctcctcaatcctttctaatcataagataattcataatgaagagaaactctaaaatgtgaaaaatgtgagaaggcttttaatcacacctcaatctgttgtagacataagagtaattatattgatgagaagccaaattaaaattaaaaatgtggcaaagacttccaattctagtcagttcttaatgtaattcctactgaagaaaacacctggaaatacaaaaaatgtggcaaaacttgtaaccaatgcttagcatttttgcacatgatagtatttatatgtgagactacttgtacaaacataaaaatatacaaaagctattgtctacttgaaatttatagttaataaaagcattataaatgtaatttctgttgaaagaccttttagaaaatataggccattaaagtgaagaatagtcttaagacagagaatacaaagataaagagggctctagtacctgtacttgtatcccagaacttactatatgcattttgtactagaggaaaactctgaagcagttgcttaaactttgttcaacatcagagaatttatattggagagaaatcctacaaatgtaataaatgtggaaaaacctctgttcagaaactgcaggttaagaaaccagaggccaggcgcggtggctcacgcctgtaatcccaacactttgggaggccaaggagggtggatcacctgaggtcgggagttcaaggacagcctgaccaatatggagaaacctcgtctgtactaaaaatacaaaaattagcaggacatggtggtgcatggctgtaatcccagctactcaggaggctgagacaggagaatggcttgaacccaggaggtggaggttgcggtgagctgagatcgtgccattgcactccagcctgggtaacaagagtgaaactctgtctcaaaacaagataaaaagaaaagaaacaccagagaatttttactagaatataatttgtaggtgcagtaaatgtgaagaaatatttaggctaaaattaagactatgtaaacatcagaggatttacagtagaaagaactaaggaactaacacttcagactttaaaataaatcagagtattaagtataacaaaagttgaacctgttagaaaatttccttgtatataagttgaaaagtaggtttttgaagagatatattcgaaatatattttttcacttgaaaaaagtaaaaatttttttcaaaagcaaataattcaactctaaaattatactatttcaacattctcatttatgtgaaagcatgtgataaattgttgctgcgtcagagatatgagaaactcctttgcattaggtgggcattattcatagacttctacatgaaagagaagagaaataaaagatgcaccaggaaaatctgagcagagaggcttttagtggttgacttactgagtgatgcctgaagtaggtgttcagagtaatactttgcgttatactgagagagaatctgaattttagtagtaaattgttttgccaactgtatatttatgtaataagtgcaataaaatgcagtaaattttaaaattctcttaagataatgtgtgaacttaatttttgaaataaaaattgttattgtgttaaaaaaaaaa

SEQ ID NO: 24717 - DNA, 4297 bp, Homo Sapiens
gccggggcagctcataaactggttcatctgctccctgtgcgtcccgcgggtgcgtaagctctggagcagccggcgtccaaggacccggagaaaccttctgctgggcactgcgtgtgccatctacttgggcttcctggtgagccaggtggggagggcctctctccagcatggacaggcggctgagaaggggccacatcgcagccgcgacaccgccgagccatccttccctgagatacccctggatggtaccctggccccctccagagtcccagggcaatgggtccactctgcagcccaatgtggtgtacattaccctacgctccaagcgcagcaagccggccaatatccgtggcaccgtgaagccaagcgcaggaaaaagcatgcagtggcatcggctgccccaggcagaggctttggtcggaccatcccttcagccgcaggaagcggcaagggaagctgatgctgtagcacctgggtacgctcagggagcaaacctggttaagattggagagcaacattaggatctacagcgagagcgccccctcctggctgagcaaagatgacatccgaagaatgcgactcttggcggacagcgcagtggcagggctccggcctgtgtcctctaggagcggagcccgtttgctggtgctggagggggcgcacctggcgctgtctgccgctgtggccctagcccctgtgggcttctcaagcagcccttggacatgagtgaggtgtttgccttccacctagacaggatcctggggctcaacaggaccctgccgtctgtgagcaggaaagcagagttcatccaagatggccgcccatgccccatcattctttgggatgcatctttatcttcagcaagtaatgacacccattcttctgttaagctcacctggggaacttatcagcagttgctgaaacagaaatgctggcagaatggccgagtacccaagcctgaatcgggttgtactgaaatacatcatcatgagtggtccaagatggcactctttgattttttgttacagatttataatcgcttagatacaaattgctgtggattcagacctcgcaaggaagatgcctgtgtacagaatggattgaggccaaaatgtgatgaccaaggttctgcggctctagcacacattatccagcgaaagcatgacccaaggcatttggtttttatagacaacaagggtttctttgacaggagtgaagataacttaaacttcaaattgttagaaggcatcaaagagtttccagcttctgcagtttctgttttgaagagccagcacttacggcagaaacttcttcagtctctgtttcttgataaagtgtattgggaaagtcaaggaggtagacaaggaattgaaaagcttatcgatgtaatagaacacagagccaaaattcttatcacctatatcaatgcacacggggtcaaagtattacctatgaatgaatgacaaaagaatcttctggctagggtgttagatatatttatgcatttttggttttgtttttaaatcaagcacatcaacctcaagcccgtttagcaatgaggcagtgtagatgaatacgtaaaataaatgactttaaccaagtagctataatgggacttagcactgtatgcatacttaaaaaggttttgaaaaacaaactacttgagaaatatttgtttatatttttctctaacatcatgctatgtgtcagtctgaacatctgacaacagaaatttcagttattattctagctaagttttgaaaacatttgtcatgctgtttaatagaaaactgcaaaccagagacactgactccattaataaaccatattttgtgccgttttgactgttctgaccaaatactaatgggaacaattcttgacgtttttctgttgctgattgttaacatagagcagtctctacactaccctgaggcaactctacattggaacactgaggcttacagcctgcaagagcatcagagctgaccatacatttaaacagaaatgctggtttatttgcaaaatcaccagtatattttctattgtgtctataaaaaatcagtcatttaagtacaagaatcatattttccattcctttttagaaatttattttgttgtccctatggaaatcattcacatctgacaatttatatgttaaagagttttactctctctattttggtccaatttgtatctagtggctgagaaattaaataattctaaagtatgaagttacctatctgaaaatgtacttacagagtatcattttaaaatggatgtctctttaaaaattttgttacttttaccaacaatgtaatataatttatgtatattttattaataatagtgaattccttaaaatttgttctatgtacttatatttaatttgatttaatggttactgcccagatattgagaattggttcaaatattgagtgtgtttcaatatattatctggcttatttcaacatgagtaatatgagcaaaataagttaaaacctgcgtctgatcaattttcctcatgactagaactaaaacagtaaatttggacaatattaagcctcaaataatcatctccaaactccttctaacactttttaaatcagattggaagacatggacaaatcaggttcatgtgttgcatctttatgtcctttgccaatatccaagatcatcacatatggtagatattcacatggagtttcaaattcagaatagattaccattaccttcctgcccttacacatcctactccttatttaaaagttctatttgtgacttttcatttcctgaaagtttaaaaatacaatttgagaatgtttataatacattctctcctgtcttttcacggttacgtctgttattgctgaaatacaccacattttctttgttctggtcaaggttaactcaatatctgtgtgaaagagaactactaacaacgttacaatagaggctagatttgaaaaaaaaaatctatagatctaattgatacaattgtagaacaaaatgtcaaaataatgttttaagtataagagaagatggaccaaggagagagagatcatttgaaaatctaattgtagcttttctaggctcacattcatgtactacttttagcacccttatgggctgtgctcgccccctggacagttgagctttggattatcttcctcttcaattttccctctattgacccgagtgtctccctctgcttctacagatttatagtactccttggctcttttgagtctccacttttactcactgtctctgggatttttaagatccttttcttctcttataaatcatcctcttaatgaaaattagcctaacaaaagtttggagactggaatcctactttgagccactgacttgaaataactcttttggcaagttgcctgacatcctgtcttaccaaggtggcatatttgcatttttactgcttaaaacatttttttttttttaccatctttatccaaatttatcatattgatggtaggactaacaggctttttagaagctggctttaactttgagtctcaagctacaatgctgttgggcagcctggtcttcccacgtgagggtttaactttgtttatttgcctccagttattccaaaatgcttattaaatgaaaggcccaggaacatgtttattttagtcacctttgctttttaacaattttgttttgtaatcaatgagtaattcatgatgaattatttttgactaatggatagccgaaggccaggcttttaattctaataggtaatgttcttcttttgtcttattgaaacaatgagaatactctgtgcatttcaaatgcactccgattatgctgtggttttattcacataagcacaatatgtgttttatttataacttcataacaaacttataatataataatttaccttagcagacatgcaaaagcttattcttgtgtgacttactttctttaagctaataatataaaaataaatatgtatcttaaaaatctataataaaacattagaaattaaagatatgtgctttttattttgcagatgagttcatttgcttttgtagatgtgttttcagagctaggtacagaggaatgtttgctacctttagcggtgaaaaaagaaagagagtcaagaattttgttggattgtgtttgtgtgtgcatatatttgatatcatcattatatttgtaatctttggacttgtaatcatagcctgtttattctactgtgccattaaatatactttaccttatacataacgaataaaatacctagatgtagatttatttaaaaaaaaaa

SEQ ID NO: 24718 - DNA, 2948 bp, Homo Sapiens
aggaagtagaacgccggctcgcatgcctgcccgcccgccagcctgccgggtacggccttttccgccggggcttccaggtcaaagaattcgcctttgccgctaccgctttcttaccctccgcacccgttaagttctccggtcgggcggcagtctctgaacacttagccgcgccatccggggtcacaccgcctggaaggaggtgacgggggcggcgcggggcgcggacactccccgctgagagtccgcctgccatggactcggaatattacagcggcgaccagtcagatgatggtggtgctaccccagtacaggatgaacgggattcagggtcagacggtgaggatgatgtaaatgagcaacactccggatcagacactggaagtgtagaacgtcattcagagaatgaaactagtgatcgagaagatggcctccccaaaggacatcatgtgacagactctgagaacgatgagcccttaaatcttaatgctagtgactctgaaagtgaggagcttcacaggcaaaaggacagcgactctgaatctgaggaacgtgcagagcctcctgcaagcgattctgaaaatgaggatgtcaatcagcatgggagcgactctgagagtgaagagaccaggaaattacctggtagtgactctgaaaatgaggaacttcttaatgggcatgcaagtgactcagaaaacgaagatgttgggaagcatcccgccagtgattctgagattgaggagctccagaagagtcctgctagtgactctgaaacagaagatgctctaaaacctcaaatcagtgactctgagagtgaggaacccccaaggcaccaagccagtgactccgaaaatgaggagcctcccaaacctcgaatgagtgattctgaaagtgaggagcttcctaaacctcaggtcagtgattcagaaagtgaggaacccccaaggcaccaggccagtgactctgaaaatgaggagcttcccaaacctcgtatcagtgactcagaaagtgaggaccctccgaggcaccaggccagtgactcagaaaatgaagagcttcccaaaccccgaatcagtgattcggaaagtgaggatcccccaaggaaccaggccagtgattcggaaaatgaggagctacccaaaccccgagtcagtgactctgagagtgaggggcctcagaaggggcctgccagtgactcagaaactgaggatgcgtccagacacaaacagaagccagagtcagatgatgacagcgacagggagaataagggagaggatacagaaatgcagaatgactccttccattcagacagccatatggacagaaaaaagtttcacagttctgatagtgaggaggaagaacacaaaaagcaaaaaatggacagtgatgaagatgaaaaagagggtgaggaggagaaagtagcgaagagaaaagctgctgtgctttctgatagtgaagatgaagagaaagcatcagcaaagaagagtcgtgttgtctctgatgcagatgactctgacagtgatgctgtatcagacaagtcaggcaaaagagagaagaccatagcatctgacagtgaggaagaagctgggaaagaattgtctgataagaaaaatgaagagaaggatctgtttgggagtgacagtgagtcaggcaatgaagaagaaaatcttattgcagacatatttggagaatctggtgatgaagaggaagaagaatttacaggttttaaccaagaagatctggaagaagaaaaaggtgaaacacaggtaaaagaagcagaagattcagattctgatgataacataaagagaggaaaacatatggactttctgtcagattttgagatgatgttgcagcgaaaaaagagcatgagtggcaagcgcagacggaaccgcgatggtggcacctttattagtgatgcagacgacgtcgtgagtgccatgatcgtcaagatgaatgaagctgctgaggaagacagacagttgaacaatcaaaaaaagccagcactgaaaaaattaactttactgcctgctgtagttatgcaccttaagaagcaggaccttaaagaaacattcattgacagtggtgtgatgtctgccatcaaagaatggctctcacctctaccagataggagtttgcctgcactcaagatccgggaggagctgctgaagatcctgcaagagctgcctagtgtgagccaggagaccctgaagcatagtgggattggacgagcagtgatgtatctctataaacaccccaaggagtcaaggtctaacaaggacatggcagggaaattaatcaatgagtggtctaggcctatatttggtcttacctcaaactacaaaggaatgacaagagaagaaagggagcagagagatctagaacagatgcctcaacgacgaagaatgaacagcactggtggtcagacacccagaagagacctggaaaaggtgctgacaggagaggagaaggctcttagacctggagatcctggattctgtgcccgtgcaagggtcccaatgccttcaaacaaggactatgttgtcaggcccaaatggaatgtggaaatggagtcatccaggtttcaggcgacctccaagaagggtatcagtcgactggataaacagatgagaaagttcacagatataaggaaaaaaagcagatctgcacacgcagtgaaaatcagcattgagggcaacaaaatgccattgtgaccttgcctggaatgtgtccccatctctactctaagaaatgcgcaatggactctttggagaaagaagatattttaaaacatttttagtgtgtctgtaaatggttcagcgtgtatcagatgttgtcataggactcacatttctctcagttatatttaaaaccgttgtgtactttgtacaaaggaatactagtcatacttctataaactttacacaataaaatttcattctggaaaaaaa

SEQ ID NO: 24719 - DNA, 3387 bp, Homo Sapiens
cgccggccttggcctcccaaagtgctgggattacagacctggccagcctaaacgatttttaaaacaagttagagattttgggttagtcttgttttccaggaataaagtaccatttttagtggccaaggatgtaccagagggtgtggccctgtgacatccagctgggtctgcccagggccccgctcagcgaccgaggctttctaggatttatgctgccagttgcagagaaaatggccctgagtgagggcgttatgactgccccacctgcctcctgtaaccgcgtggctgtgggattcggggctgggaattcgggttcctgtggggccagcacacggccctgtgcttctccctcaggcggagagagggtgggggcagccccgtgcgtctcctgctctaggagggagggacggtgggggccggtgcgccagtgcggtgtctctgctgcaggtggctgggctgacgctgctggctgtcggggtctactcagccaagaatgcgacagccgtcactggccgcttcatcgaggctcggctggggaagccgtccctagtgagggagacgtcccgcatcacggtgctggaggcgctgcggcaccccatccaggtcagccggcggctcctcagtcgaccccaggacgtgctggagggtgttgtgcttagtgtaagtcggtgtgcctgggaccggggaggtgcagggaggggaccccggagctgggctgggctgtggcccttgctagcgctcgtggtggcgcccaggagcttttgggtcctgagatgcaactgcttggactgtgccggggatagataggctgcccacgagctgggcggcttcctgaggagcagagtccgcacccgggcattcccgcagcccctgtcaccgaggcttccgtgggtgcagagtgtctcccccaaacccccgtcttccccggcagcccagcctggaagcacgggtgcgcgacatcgccatagcaaccaggaacaccaagaagaaccggggcctgtacaggcacatcctgctgtatgggccaccaggcaccgggaagacgctgtttgccaagaaactcgccctgcactcaggcatggactacgccatcatgacaggcggggacgtggcccccatggggcgggaaggcgtgaccgccatgcacaagctctttgactgggccaataccagccggcgcgggaggagataagcaaggacctcagagccacactgaacgccttcctgtaccacatgggccaacacagcaacaagtgagggagcccctcgggtcctgagcccccgggcagggctgtgcagccgtcgcccttggttcccactgagggtccctggctcacagtgctgggcaccagctgtggcctcagtgtgcccacctcagatgtcccctgggaacggcccagctcgggacagcacggggtgtcattgaggaacatgcaggggcctcccgggcagagctggggtcagtcctgtcttcacggccctgtgcgccgccgccccagcttgcaggtccctctgcccctagatttctgcggtcctgtgcctgcaagggaggtggtctgattgctgccgcccagaggtccccagtagggtgaccggccctatgtccaggctccctcttccctcccaaatcccttaattttgagttttcttggtctcctgggcccctccagccccagtcacgtgtcacacggaggatcaagtcctgctggtcggccgtggctgactcttcaggcacgttgggctcctgggtcagctgctgccgttcgacgctccctggagccctgactcaggtccttcccagagaggcaaggctggggccctgctgagcctctgctgaacccgggcccccgaggtcctgcttctggctcgcatggccataatcttgacagggactctgggtcccgcatccctgctcccagcacagcggggctcaggtagcaggagggagtggtgttcccggcactgcctatcaggctgggcgagggtcagcggggaagtaccacacagggaaagaacagaggcccgagaagccgggcggggggcagctgggcgtggtggggcaggcaggcgggtgaccagggctgtggctgcgttctccccatgtttcctgtgctcacaagctgccgctttagattctcccaaaaagtctccccgagggggctgaggagcccccgttgccctcggggcatctcagctggcagccccagcgtttccttccccatccctgtcctacagattcatgctggtcctggccagcaatctgcctgagcagttcgactgtgccatcaacagccgcattgacgtgatggtccacttcgacctgccgcagcaggaggagcgggagcgcctggtgagactgcattttgacaactgtgttcttaagccggccacagaaggaaaacggtgagtgtcccgcctcacccggcccccaatccaggcaccatatggcatgggtgtaggccagctgcctgtcttccggcctccacctcatggtgtggggtccgcggccttggctgcctcacttgggaactccttccccaggcgcctgaagctggcccagtttgactacgggaggaagtgctcggaggtcgctcggctgacggagggcatgtcgggccgggagatcgctcagctggccgtgtcctggcaggccacggcatatgcctccaaggacggggtcctcactgaggccatgatggacgcctgtgtgcaagatgctgtccagcagtaccgacagaagatgcgctggctgaaggcggaggggcctgggcgcggggtcgagcaccccctatccggagtccaaggcgagaccctcacctcatggagcctggccacggacccctcctacccctgccttgccggcccctgcacatttaggatatgctcctggatggggactgggctgtgcccagggcctctgtcccccaggatgtcttgtggtggcggtcggccgttctgccccccagggcaccccctgttgtaggcactggctagggaggggcaggcctccttcctgcccctcgagacactcttgggagatgcattttccgtctggctcacagggggagggtgaggctttgtaccccagcccctgcccaggccactgtgagggtgggtgctggctgagcccctggggcagaaggagtggggcaggcggggtctttgttctcggctcccacagcagagccaggtgagggggggcctgccaggactagacagaagtggggcggcctgaaccctgcttccagccatggccaggggccacggaacccggcaggggtgtctgaggccgccctgtcagctggccggtccaagcctgtggctggagctggtgtgtgtttatctaataaagtcccacaggtgcctcgaaaaaaaaaaaaaaaaaaa

SEQ ID NO: 24720 - DNA, 3381 bp, Homo Sapiens
gccaagatggagccggcagtcggcggtccgggcccactgatcgtgaacaacaaacagccccagcccccgccacctccgccgccggcagccgcacagccaccacccggggcaccgcgggccgccgcgggcctcctgcctgggggcaaagcccgcgagttcaaccgcaaccagcgcaaagactcagagggctattcggagtcaccagacctggagtttgagtatgctgacacagacaagtgggctgcagagctctcggagctttacagctacacggaagggccagaattcctgatgaatcgaaaatgctttgaggaggacttccggatccatgtgacagacaagaagtggactgagctggataccaaccagcaccggacccatgccatgaggctcctggatggcttggaagtcactgccagggagaagagactcaaggtggctcgagcaattctctatgttgctcaaggcacgtttggggagtgcagctcggaggcagaggtgcagtcctggatgcgctacaacatctttctcctcctggaggtgggcacgttcaatgctttggtggagcttctgaacatggaaatagaacactgctgtgttcgccctgcagtttccgccttggcaggaggccaggcacaagactgacatatgggctcaaccagtgcctggccttgcctgtgtcacctttgtccagtggacagcaacagtgccgcctgcagcagtgctgtgaggaagcctgccatctccctggctgacagcacagacctcagggtcctgctcaacatcatgtacctgatagtggagaccgttcatcaggagtgtgagggtgacaaggctgagtggaggaccatgcggcagaccttcagagccgagctgggctccccgctgtacaacaatgagccatttgccatcatgctgtttgggatggtgaccaaattttgcagtggtcacgcccctcactttcccatgaagaaagttctcttgctgctctggaagacagtattgtgcacgctaggcggctttgaggagctgcagagcatgaaggctgagaagcgcagcatcctgggcctccccccgcttcctgaggacagcatcaaagtgattcgcaacatgagagcagcctctccaccagcatctgcttcagacttgattgagcagcagcagaaacggggccgccgagagcacaaggctctgataaagcaggacaacctagatgccttcaacgagcgggatccctacaaggctgatgactctcgagaagaggaagaggagaatgatgatgacaacagtctggagggggagacgtttcccctggaacgggatgaagtgatgcctcccccgctacagcacccacagactgacaggctgacttgccccaaagggctcccgtgggctcccaaggtcagagagaaagacattgagatgttccttgagtccagccgcagcaaatttataggttacactctaggcagtgacacgaacacagtggtggggctgcccaggccaatccacgaaagcatcaagactctgaaacagcacaagtacacgtcgattgcagaggtccaggcacagatggaggaggaatacctccgctcccctctctcagggggagaagaagaagttgagcaagtccctgcagaaaccctctaccaaggcttgctccccagcctgcctcagtatatgattgccctcctgaagatcctgttggctgcagcacccacctcaaaagccaaaacagactcaatcaacatcctagcggacgtcttgcctgaggagatgcccaccacagtgttgcagagcatgaagctgggggtggatgtaaaccgccacaaagaggtcattgttaaggccatttctgctgtcctgctgctgctgctcaagcactttaagttgaaccatgtctaccagtttgaatacatggcccagcacctggtgtttgccaactgcattcctttgatcctaaagttcttcaatcaaaacatcatgtcctacatcactgccaagaacagcatttctgtcctggattaccctcactgcgtggtgcatgagctgccagagctgacggcggagagtttggaagcaggtgacagtaaccaattttgctggaggaacctcttttcttgtatcaatctgcttcggatcttgaacaagctgacaaagtggaagcattcaaggacaatgatgctggtggtgttcaagtcagcccccatcttgaagcgggccctaaaggtgaaacaagccatgatgcagctctatgtgctgaagctgctcaaggtacagaccaaatacttggggcggcagtggcgaaagagcaacatgaagaccatgtctgccatctaccagaaggtgcggcatcggctgaacgacgactgggcatacggcaatgatcttgatgcccggccttgggacttccaggcagaggagtgtgcccttcgtgccaacattgaacgcttcaacgcccggcgctatgaccgggcccacagcaaccctgacttcctgccagtggacaactgcctgcagagtgtcctgggccaacgggtggacctccctgaggactttcagatgaactatgacctctggttagaaagggaggtcttctccaagcccatttcctgggaagagctgctgcagtgaggctgttggttaggggactgaaatggagagaaaagatgatctgaaggtacctgtgggactgtcctagttcattgctgcagtgctcccatcccccaccaggtggcagcacagccccactgtgtcttccgcagtctgtcctgggcttgggtgagcccagcttgacctccccttggttcccagggtcctgctccgaagcagtcatctctgcctgagatccattcttcctttacttcccccaccctcctctcttggatatggttggttttggctcatttcacaatcagcccaaggctgggaaagctggaatgggatgggaacccctccgccgtgcatctgaatttcaggggtcatgctgatgcctctcgagacatacaaatccttgctttgtcagcttgcaaaggaggagagtttaggattagggccagggccagaaagtcggtatcttggttgtgctctggggtgggggtggggtgtttctgatgttattccagcctcctgctacattatatccagaagtaattgcggaggctccttcagctgcctcagcactttgattttggacagggacaaggtaggaagagaagcttcccttaaccagaggggccatttttccttttggctttcgagggcctgtaaatatctatatataattctgtgtgtattctgtgtcatgttggggtttttaatgtgattgtgtattctgtttacattaaaaagaagcaaaaacaaaaaaaaaaaaaaaaaaag

SEQ ID NO: 24721 - DNA, 2824 bp, Homo Sapiens
cggacgcgtgggccaaacactgatcactgaacagaactggtcagtaacttttaacaattcatagggaaataagaaagttagaagcaaggtagtgagttttatataaaactaaatttattctctttaattggtcatcctgactttcagtattctttgctggtcttttgctgcaaaatacctttttctttatgaaacgaaagtatagtaggcagcagttttcaggtttgcctttgcttattaatagctctactgacaactcagtccgcagatttccttttggaaatgttataagcctaggaaatttaagcacctgggaaccaccagcgcaggaggatacaaagtgtgaactacagcctctcactctcatgttctgtctctcttcttccctacctcccgggcctgctgacagcggtggttggggctgggattgggggctctgctgtggcccattttctccagcagcactttggacctcgggtgcagatcgacgtgtacgagaagggaaccgtgggtggccgcttggccaccatctcagtcaacaagcagcactatgagagcggggctgcctccttccactccctgagcctgcacatgcaggacttcgtcaagctgctggggctgaggcaccggcgcgaggtggtgggcaggagcgccatcttcggcggggagcacttcatgctggaggagactgactggtacctgctgaacctcttccgcctctggtggcactatggcatcagcttcctgaggctgcagatgtgggtggaggaggtcatggagaagttcatgaggatctataagtaccaggcccacggctatgccttctcgggtgtggaggagctgctctactcactgggggagtccacctttgttaacatgacccagcactctgtggctgagtccctgctgcaggtgggcgtcacgcagcgctttattgatgatgtcgtttctgctgtcctgcgggccagctatggccagtcagcagcgatgcccgcctttgcaggagccatgtcactagccggggcccaaggcagcctgtggtctgtggaaggaggcaataagctggtttgttccggtttgctgaagctcaccaaggccaatgtgatccatgccacagtgacctctgtgaccctgcacagcacagaggggaaagccctgtaccaggtggcgtatgagaatgaggtaggcaacagctctgacttctatgacatcgtggtcatcgccacccccctgcacctggacaacagcagcagcaacttaacctttgcaggcttccacccgcccattgatgacgtgcagggctctttccagcccaccgtcgtctccttggtccacggctacctcaactcgtcctacttcggtttcccagaccctaagcttttcccctttgccaacatccttaccacagatttccccagcttcttctgcactctggacaacatctgccctgtcaacatctctgccagcttccggcgaaagcagccccaggacgcagctgtttggcgagtccagtcccccaagcccctctttcggacccagctaaagaccctgttccgttcctattactcagtgcagacagctgagtggcaggcccatcccctctatggctcccgccccacgctcccgaggtttgcactccatgaccagctcttctacctcaatgccctggagtgggcggccagctccgtggaggtgatggccgtggctgccaagaatgtggccttgctggcttacaaccgctggtaccaggacctagacaagattgatcaaaaagatttgatgcacaaggtcaagactgaactgtgagggctctagggagagcctgggaactttcatcccccactgaagatggatcatcccacagcagcccaggactgaataagccatgctcgcccaccaggcttctttctgacccctcatgtatcaagcatctccaggtgacctactgtctgcctatattaagggtccacacggcggctgctgcttttttttaagggggaaagtaagaaaagagaaggaaatccaagccagtatatttgttttatttattttttttaagaagaaaaaagttcatcttcacaaggtgcttcagacttggtttcttagctagaaaccagaagactacgggagggaatataaggcagagaactatgagtcttattttattactgtttttcactacctactcccacaatggacaatcaattgaggcaacctacaagaaaacatttacaaccagatggttacaaataaagtagaagggaagatcagaaaacctaagaaatgatcatagctcctggttactgtggacttgatagatttgaggtacctagttcagaactccctagtcaccatctccaagcctgtcaacatcactgcatattggaggagatgactgtggtaggacccaaggaagagatgtgtgcctgaatagtcgtcaccatatctccaagcttcctggcaaccagtgggaaaagaaacatgcgaggctgtaggaagagggaagctcttccttggcacctagaggaattagccattctcttccttatgcaaagattgaggaatgcaacaatataaagaagagaagtccccagatggtagagagcagtcatatcttacccctagatgttcatcccagcagaagaaagaagaaggtgttggggtaggattcttcagaggttagcctggtactttctcatcagacactagcttgaagtaagaggagaattatgcttttctttgctttttctacaaacccttaaaaatcacttgttttaaaaagaaagtaaaagcccttttcattcaaaaaaaaaaaaaaaaaaaa

SEQ ID NO: 24722 - DNA, 3311 bp, Homo Sapiens
ggggttgtggttgaggccgtgtctccgctcctgtgcccgggaagatggtgctaggtggttgcccgaatcttgttgtttgcctactgaagagatgaaaccatggcagaagtagaatccttatagaaacaggaccagaaacacctcccttctccaacaaaaggttcattttggtggctgtccgtttgacctgctgtgcttcagtttaattggcttggaaaggggtcagcagggtgaaaccgaaccccagaaaacttgatgaagaaatgtcttttgcccgttttgattacgtgcatgcaaacagcgatttgcaaagaccgtatgatgatgatcatgatcttactggtgaattacagacctgatgaatttatagaatgtgaagacccagtggatcatgttggaaatgcaactgcatcccaggaacttggttatggttgtctcaagttcggcggtcaggcctacagcgacgtggaacacacttcagtccagtgccatgccttagatggaattgagtgtgccagtcctaggacctttctacgagaaaataaaccttgtataaagtataccggacactacttcataaccactttactctactccttcttcctgggatgttttggtgtggatcgattctgtttgggacacactggcactgcagtagggaagctgttgacgcttggaggacttgggatttggtggtttgttgaccttattttgctaattactggagggctgatgccaagtgatggcagcaactggtgcactgtttactaaaaagagctgccatcatggcccagggaggcgggtgaaagctccgtcttctgaattcatctctacaggctcaaaactcctctttgatatcagacctgatgttattttccttcttttggagggcatttgtttggttaagaaggcttctttggactttggaatttcaacccagattttaccttgcagacggaatgacaagcaaaaagtgttgtggggaatcaaatttgttcctttcctcatgcacaaaacataaaggatagtggcgagtttacaagctgtggatgggtttccatagtcttcctttctgtacattgctatatcttcagtcctttggagcaagtggacctaacaagttgagcaaaatgaatatttggatccatgttcctcttgtgaccctgagtcttcatgcaaggagatctgaagctgaacaatgaaaatcttcagcagaaatagaaatggccgtggattgtaatacacactgaaattctgactttctgaatttaaatgtagaataaattttaccaacttggagtactgtatgagtattttcagtagggggaataaactcaaaattatatttgttttgcagaaacctagtcatttgaaatgagccatcctattaagccctcttttgtctccattatgttccagaggcagtatatgcagtgcaataattttttcattccacttatgttttgaaagccagcggcatcagatgtgtgagttgagctattcctcctggcagaattgtccaatctaaaaatcagcgtttaccagcccatgctaataaaattaagatttcatacaagtttctgtaaaactattcttcatgattagctctccctgtgggctgcagcagtcagaaagagataacagccacacctctgcattccccggtcaccaggaataaaaggaaatgttccagattgtaagtggttttaaaaactcagttctcatcgtttgcaatctaagttgaaagaactattaaatataaaatcaaaggtgggcaatgtggccaagtcaatggaagaggctttactcagaataacttacaaattctagaaacaaggtagaactcactcagtttacctaataataattgaatttaagaccaaatatcacagttgaaataacttccctggatacattctatcattttgtagctttcctaagaatttcttgctttatcattcctgattaatcactgtttttacattattaaaggtggcaattttctgtaaaaaatttaaaacagatgatcctattctgtcttgaaagttctgtaccacactgaccttaaccttgcttataacataacaattggtaaacttttaattcataatctttataccctaagatagtatttattaaatttttatgggtcatgaagaaactagaccctctccccagaaaaatctacatacacagaatttacatagaacttgggttcatctacacaatttatgcatgaaataaaattgtactggtaccctataaatttatacaaataaaagagtttaagggagttcaaggatgccatatgtatattttaaaaaaatttctaagggaagtctaaaaaacataaattataatattacccaaaataagatgctacttttcacctaaccaagtcctgcctcatttcacactttaacctcctaagtatattcataatcctaccaaaagttgttttctttaaaaagtaagaaactttagggccagcgcaatggtgcaagcctgtaatccctgcactttgggaggccgaggcaggtgaatcctttaaggtcaggagttcgagaccagcctggccaacatggtgagacacactcccccacccctgcccagtctctagtaaaaatgcaaaaattagccgggcgtggtggcgtgcacctgtaatcccagctactcgggaggctgaggtaagagaatcacttgaactgaggaggcagagattgcagtgagccgagatcctgccactgcacttcagcctgggcaacagagtgagactctgaccaaaaaagaaattttgcagctccaaggcttgaagtcatttatgttgccaggggtaagagcttggttgaagggctaaaagactagaaactactgaagatgcccttcttactgtcagtaaagctgctggagacaaaagaagttgttctcgctgctagagtggtaatttgagaatcatcagtattcctatgtgacaatccaaaattactggttttcatttgacttgtaaatgacacccatcatccatctgcccacaaacctggccaaatgtgatacaacctgaaaacctgatggactaaaggagtactatttaacaattgattgcctttgcactttattcaggttgtttcttaaattttggtagacagatccatttgtatatgtgtgtgttatatctagtttatggctatagagaaggtttaaaatactacagtgtccttccctcaaggttaaattagaagctgcctgccttttagttgtttcttgcctttaataaaatgttatcagttcccccagaaaaaaaaaaaaaaaaa

SEQ ID NO: 24723 - DNA, 3292 bp, Homo Sapiens
ccgaagatggcggcggtggctggatctggggctgccgcggctccgagctcactgctcctcgtggtgggcagcgagttcgggagcccggggctcctcacctacgtcctggaggagctcgaaagaggcatccggtcttgggatgtcgatcctggcgtctgcaaccttgatgaacagctcaaggtctttgtgtcccgacactctgccaccttctccagcattgtgaaaggccagcggagcctgcaccaccgtggagacaacctggagaccctggtcctcctgaacccatcagacaagtccctgtatgatgagctccggaaccttctgttggaccctgcctctcacaagctactggtgttggctgggccctgcctggaggagacgggggagctgctgctacagacagggggcttctcgcctcaccacttcctccaggtcctgaaggacagagagatccgggacatcctggccaccacgcccccacctgtgcagccgcccatactcaccatcacctgccccaccttcggtgactgggctcagctggcacccgctgtgcctggccttcagggggcgctccggctccagctgcggctgaaccccccggcgcagctgcccaactctgagggcctgtgcgaattcctggagtacgtggctgagtctctggagccaccgtcccccttcgagctgctggagcccccgacctccgggggcttcctcaggctgggccggccctgctgctacatcttccctggaggcctcggggatgccgccttcttcgccgtcaatggcttcactgtgctggtcaacggtggctcaaaccccaagtccagtttctggaagctggtgcggcacctggaccgcgtggatgccgtgctggtgacccaccctggcgccgacagcctccctggcctcaacagcctgctgcggcgcaaactggcggagcgctccgaggtggctgctggtgggggctcctgggacgacaggctgcgcaggctcatctcccccaacctgggggtcgtgttcttcaacgcctgcgaggccgcgtcgcggctggcgcgcggcgaggatgaggcggagctggcgctgagcctcctggcgcagctgggcatcacgcctctgccactcagccgcggccccgtgccagccaaacccaccgtgctcttcgagaagatgggcgtgggccggctggacatgtatgtgctgcacccgccctccgccggcgccgagcgcacgctggcctctgtgtgcgccctgctggtgtggcaccccgccggccccggcgagaaggtggtgcgcgtgctgttccccggttgcaccccgcccgcctacctcctggacggcctggtccgcctgcagcacttgaggttcctgcgagagcccgtggtgacgccccaggacctggaggggccggggcgagccgagagcaaagagagcgtgggctcccgggacagctcgaagagagagggcctcctggccacccaccctagacctggccaggagcgccctggggtggcccgcaaggagccagcacgggctgaggccccacgcaagactgagaaagaagccaagaccccccgggagttgaagaaagaccccaaaccgagtgtctcccggacccagccgcgggaggtgcgccgggcagcctcttctgtgcccaacctcaagaagacgaatgcccaggcggcacccaagccccgcaaagcgcccagcacgtcccactctggcttcccgccggtggcaaatggaccccgcagcccgcccagcctccgatgtggagaagccagcccccccagtgcagcctgcggctctccggcctcccagctggtggccacgcccagcctggagctggggccgatcccagccggggaggagaaggcactggagctgcctttggccgccagctcaatcccaaggccacgcacaccctcccctgagtcccaccggagccccgcagagggcagcgagcggctgtcgctgagcccactgcggggcggggaggccgggccagacgcctcacccacagtgaccacacccacggtgaccacgccctcactacccgcagaggtgggctccccgcactcgaccgaggtggacgagtccctgtcggtgtcctttgagcaggtgctgccgccatccgcccccaccagtgaggctgggctgagcctcccgctgcgtggcccccgggcgcggcgctcggcttccccacacgatgtggacctgtgcctggtgtcaccctgtgaatttgagcatcgcaaggcggtgccaatggcaccggcacctgcgtcccccggcagctcgaatgacagcagtgcccggtcacaggaacgggcaggtgggctgggggccgaggagacgccacccacatcggtcagcgagtccctgcccaccctgtctgactcggatcccgtgcccctggcccccggtgcggcagactcagacgaagacacagagggctttggagtccctcgccacgaccctttgcctgaccccctcaaggtccccccaccactgcctgacccatccagcatctgcatggtggaccccgagatgctgccccccaagacagcacggcaaacggagaacgtcagccgcacccggaagcccctggcccgccccaactcacgcgctgccgcccccaaagccactccagtggctgctgccaaaaccaaggggcttgctggtggggaccgtgccagccgaccactcagtgcccggagtgagcccagtgagaagggaggccgggcacccctgtccagaaagtcctcaacccccaagactgccactcgaggcccgtcggggtcagccagcagccggcccggggtgtcagccaccccacccaagtccccggtctacctggacctggcctacctgcccagcgggagcagcgcccacctggtggatgaggagttcttccagcgcgtgcgcgcgctctgctacgtcatcagtggccaggaccagcgcaaggaggaaggcatgcgggccgtcctggacgcgctactggccagcaagcagcattgggaccgtgacctgcaggtgaccctgatccccactttcgactcggtggccatgcatacgtggtacgcagagacgcacgcccggcaccaggcgctgggcatcacggtgttgggcagcaacagcatggtgtccatgcaggatgacgccttcccggcctgcaaggtggagttctagccccatcgccgacacgccccccactcagcccagcccgcctgtccctagattcagccacatcagaaataaactgtgactacacttggtaaaaaaaaaaaaaaaaaaa

SEQ ID NO: 24724 - DNA, 4628 bp, Homo Sapiens
aatggctgacagaagtgggaagattattccaggacaagtgtatattgaggtggaatatgattatgaatatgaagcaaaggacagaaagattgtgataaaacaaggggagaggtacatcttggtgaaaaagaccaatgatgactggtggcaagtcaagccagatgaaaactccaaagcgttttatgtgccagcccagtatgtgagggaggtcacgcgcaaagctctcatgccacctgttaagcaggtagctggtctgccaaataactccacgaaaataatgcagagtttgcatcttcagagatcaacagaaaatgtgaacaaattgcctgagctttcaagtttcggaaagccatcgtcatctgttcaaggaacaggtcttattcgtgatgccaatcagaattttggacccagttataatcaaggtcagactgtcaacctaagcctggacctgacccataataacggaaagtttaacaatgactcacattctcctaaagtttccagccagaataggacacgctcatttggtcattttcccggtccagagttcttggatgtagagaaaactagcttctcccaggaacaatcttgtgattccgcaggagaaggctctgaaagaatacatcaagattctgaatctggtgatgaacttagcagcagctccactgaacagataagggcaaccacacctccaaatcaaggaaggccagattctcctgtctatgctaaccttcaagaactgaaaatatcccagtctgctcttcccccacttcctgggagcccggcaattcagattaatggagaatgggaaactcataaagacagctcagggcgttgctattactataacagagggacacaggaaagaacttggaaacctcctcgttggacccgggatgcaagcatcagcaaaggagatttccaaaatccaggggatcaagagtggctcaagcatgttgatgatcaaggtagacaatattactacagtgcagacggatctcggtcagaatgggaattgccaaagtataatgcttcatcccagcagcaaagagaaataattaaaagtaggagcctggacaggcggctgcaagaaccaatagtattaacaaagtggagacatagcaccattgtattggacactaatgataaggaatctccaactgcctcaaaaccctgctttcctgaaaatgagtcttctccctcctcaccaaagcaccaagatacagatcaagagaaatatggattattaaatgtaacaaaaattgctgaaaatgggaaaaaggttcgaaagaactggttgtcttcttgggcggtgttgcagggttcatctttactttttaccaaaactcaaggaagtagcacaagttggtttggcagtaatcagtccaaaccagagttcacagtggacctcaagggggcaacaattgagatggcttcaaaggataaatccagcaaaaagaatgtatttgagctgaaaactcgtcaaggaacagaactgctaattcagtctgacaatgacactgttattaatgattggtttaaagttcttagtagtacaatcaataatcaggcagtagaaactgatgaaggaattgaagaggagataccggattcaccaggaatagaaaagcatgataaagaaaaggaacaaaaggatcccaaaaagcttcgttcctttaaagtatctagcatagattcttcagaacagaaaaaaaccaagaaaaacttaaagaagtttcttacacgacgccccactttgcaagctgttcgtgaaaaaggttatattaaagatcaggtatttggatccaatctcgctaatctgtgtcagagagagaatggcacagtaccaaagtttgtgaagttatgtattgaacatgttgaagaacatggtttggatattgatgggatatacagagtaagtggcaacctcgcagtgatccagaaactaaggtttgcagtcaatcatgatgagaaattggacttgaatgacagtaaatgggaagatattcatgtcattactggagccctcaaaatgttttttcgagaattaccagaacctctttttacatttaatcattttaatgattttgttaatgcaattaagcaagaaccaagaccgcgagtcgctgctgttaaggacctaatcagacagttgccaaagccaaaccaagacacaatgcagattcttttccgacatctcagaagagttatagaaaatggagagaaaaatcgaatgacctatcagagtatagcaattgtttttggtcccactctattaaaaccagaaaaagagactggtaatatagcagttcatactgtgtaccagaatcagattgtagaattaattcttctggaactgagttccatcttcggacgttgattcttactgaagacaacctgtggaatagaagctggattccatcagatttcaaatgtttatacacaatgtattttattttttggaccaagcagtgactctttgattttgcactttttttttgagggatcagaagggaaggggagagtcgagatgtgtgttaggccctcatatttgctgctttgttgcaagttgatataactgcgtgtaattatgaattcattttatcctgaatgtttgcatttcatactctgaatttcagtaaaaatcaaaacttaaaattctaaccagtcatatacactggataatttggtaagaaaactgtattttttttccctgaaattggataatgtactttcttctcaagattcatgacttgatagaacaatactttcagttatgttgcaaaggctcttgggcattttaaacaaaatgaagtatatccattttgaaacctgtgtatttctttttcggggtttctgcatgcagtggcagtcttaagtgccaaaattcattataaccccaaaataaccccttgatgaaggcttgctgtcttttactgtgttacacagcatccttactggatatcttagttgcttgtttgggcagcacactaatattacttaaaacactgtgatatactggagttttagttagcggaagtcagttcagggcattttagggctgtcttgctatactgaattgtagctaacaatcctaattatatctagtaccatactgagttattggtatgaccctgtggaaacacacattattttatgtaaatataggctaaagacttaatgtcctttagcttgtgtatataattgtgttgtatagtctcagagtacattctaaccctacatttctaatcattgttattggtaatcttttctgtgaatattaggtttcctccagaaatagtccgttatttgggaaagttaactgtgtgcacttttagatattaactacatttacaggcaaatcactgtaatgagaatggtactggaaaaatactgaatagacttgctaaatggcacatgcactacaagaggaaccttttgggttatttaatatgtacagaaaacattagaaaaaatttattacagaattctaattccagtatgaatagtggaaacccacctgtaaattagatggatgttggatggaaaatgacattgctaaatttgagaatttctttttacctactaatgtagattgctttgtataataaaacacagggtttggaaggttttgttacagggagcatggtctgttgaagatttttaaaatgtatttttctagattaacttctgtacatgaaatgtctaataaaactctaagaggcttagagatttttccattggaaatgtgcattttggtttctaatttttttgttttttcatttactggcatactgttatacctcatttttaaaaatcaactgaatccaatatttcctgtggcaaataacactttcctcatttcataccttttctcctctcttccatgccaacatttctccacccacaacgtacactttttatttctccatcaatatttgaaagcgagtgatttgtgaccaggatttttttttcttagggttgcatttataatttacagattgccttccttgggaacaagtatttttttgtatgatctgtctaaaaacctctcacctgaattttgtggtagaaagtctgtatttgttgttgtgagcgtgttaaattgataacaaaccaaactacttgatagctaaagcagattgtttcgggtggggagaaaaagccctaaatcagaatgtttatatttgcctaaagttgtccttaataatacaatatgctttagatcttgcttatttagtgattgtataccaggaaaacaattagactcaaatcagtgatgttcttgttcttggtgttcatgaacatatatcaaagattaaaattgtcctgtgtttcttgtttcaaggtacgtgtgtgtgtgtgtgtgtgtgtgtgtgtgtgtgtgtgtgtgaagtcttaaatgttttattagtctacagctaatcagtttattgtaatattgtatgtacagtgagattaatgtcttgcgttttcatcctttgtgaattaaaaattctcacttgttttgtaataacaaagctagtaatattttcctgtcttgacagcttggttttatagtagaaaatatattaaaagctgaaataaattatcagtggaattttaaaaaagaaaaaaaaaaaaaaaaa

SEQ ID NO: 24725 - DNA, 3500 bp, Homo Sapiens
ccttcactgcgtcctgagcttccctgagaactggccgctgggccctgaaggtgaggaggctgccccactgctgctagggccccagctatgccgtggtctcctgcccagtctcctgcatgacccaatggccctcctggcccgcctgcatttactgtgcctgctctgtgccgaggaggaagaagaggagaaaggccagcttccaagcccacggcactacctggaagagctgctggctggcttgcggcagcgggcagccctggatgggggcccccgggccttggccactctctgcttccaggcctcgtatctggtggcctgctgcctggctgggcaacctacggtgctgacccccttgatccacggactggcccagctgtaccaagcccggcccatgctggctccccactttgtggacctcttggatcaggtggactctgagctgagggagcccctgaaggtggtgttgcggcaggtggtggtgcccaggccgggcagggatgaagctctttgctggcacctgcaaatgctggcaaaggtggcagatggagatgcccagagtgctaccctcaactttctacaggccgcggctgcccactgcacgaactgggacctacagcagggcctgctgcgggtctgccgggcgctgctgcgggcaggggtgaggggcggcctggtcgacttgctgcaggtgctggccaggcagctggaggaccctgatgggcgtgaccacgcccgcctctactacatcctgctggcacacctggcagcacccaagttgggggtggccctgggcccctcgcttgccgcacctgcactggcctcttcactggtggccgagaaccagggctttgtggcagcactgatggtgcaggaggcaccggccctggtacggctgagcctggggtcccatcgggtcaagggcccactcccagtgttgaagctccagccggaggcgctggagcccatctactctctggagctgcgcttccgtgtggaaggacagctgtatgcacccctggaggctgtccatgtgccctgcctgtgtcctggccgccctgcccgccctctgctcctgcctctgcagccccgatgcccggcccccgcacggctggatgtccatgccctttacaccacatccactggtctcacgtgccatgcccacttgccacccctgttcgtgaactttgccgacctctttctgcctttcccgcagcctccagagggggccgggctgggcttctttgaggagctctgggattcctgcctgccagagggtgctgagagtcgtgtgtggtgtccacttgggccacagggcctggagggcttggtgtcccgccacctggagccttttgtggtggtggcccagcctcctaccagctactgtgtagcaatccacctgcccccggactcaaagctgctgctgcggctggaggcggccctggcagatggagtgcctgtggccctgcggaccgatgactgggccgtgctgcccctggcgggggactacctccgtgggctggcggctgctgtctgagccccgggagaccaggtgggggcaggactgtggcccttgtgggggccaaggcacactcctgtagctctgtcgccaaaaccctgcattccgcagtgccctcgctggcttgttttcttttgggccccggttgggagcaggctcctgggggtgagggtctgtctgagtctgtttttgctgctctagcaagatccctgagacggggtaagttataataaacagaaatgtattggctcagagctctggaggctgggaagtccatagtggagggcccagagcccagtgaggacccttctgcatcttcccatgacagaggacagagtgacaggagtgaggggagagagcgaacccactcccaagataacggcctgagtccacgcaggagggcagagccctcgtggcctgaccacctcttagggtctaatcttatactgttacagtggcaatcgcatttcaacgtgagcgtgggaggggacaaacattcaaaccatagcagggtcataggccccaagaaggcttccagacagaacccggcactgtagagctacagagttccttctcacccagacacactagtgctctccagaatctctgcccaggaggcaggggaaaaatctcctttctgcttcccagagagggtctggccttgcccaaggccactcagtgatttaggaagaaggctgaagctagagtgtggacctgacctgttggacagtacttttctttctttttttttcggggaggggttaaagacaggatctcgctctggcgctctggagtgcagtggtgtgattagggatcattgcggactctgcctctcaggctcaggtgatcctcccatctcagcctgcctccgagtagctgggactacaggtgtgagtcaccactgtattttttgcagacgggatctccctgtttcctaggctggtctcgaactcctgggcttggatgactcttctgcctcagcctcaccaaggtgttgggattgctggtgtgagcccccacacctggccgagccagcgcttctcaactcccaaggtttgcaagctccctgccccagggagctcacgccaggcaggccagtgggcctaagccagaaacagaaagacagcagtggccaggtggagagcttcccaagctgtgccgattagagccagctctgggaagggcctgctaataaggtctagggtctgagaccaagttttttctaatctcagcccctaagaaacctaatttgtgcttaggaatcttcccaggtaagaagaactagttcctctagttgttgtttttttttcccaaacatgcaaacactgaggattgagctgtgtggggtcagctgtgctgccaggcacatgtacgttgcctcatttcatccttgcaacagctctgcagggccccgcagatgaggaaatccgtaggcaggagcggttgagtgattttcctaaggtcacccagctgtttggtaatagtgttttgtcatctggtagcaggtttccattaccatgccatcagagcagacctcagccagggccacagaggtcccaaccgtctctgccctcttctgctgcccctgcctcatgggctcccagccacgggttccccatgggccagctttacgcctcctgatccttccgattggggcagactaggagaggaaagacgggcctgggctgggtgcggtggctcatgcctgtgatcccggcactttgagaggctgaggcgggtggatcacctgaggccaggtgtttgagatcagcctggccagcatggcgagaccctgtgtctaataaaaatacaaaaattagccgggcgtggtggcgggcgcctgtaatcccagctacttgggaggctggggcaggagaattacttgagcctgggaggcagaagttgcagtgggccgggatcacgccactgcactccagcctgggcgacagagcaaggctctgtctcaaaaaaaaaaaaaaaaaaa

SEQ ID NO: 24726 - DNA, 2492 bp, Homo Sapiens
cgccaggaggagccgcgcgctgctggtgctgttgccgccgctgctctagctgccgtcagtcaggctgcgcccgcgtcttcagggcccagtccctcggacccatcgccgcttctagaccctactgcggtctcggatattgccgggaaaatgtctgatgaattttcgttggcagatgcactacctgaacactcccctgccaaaacctctgctgtgagcaatacaaaacctggccaacctcctcaaggctggccaggctccaacccttggaataatccgagtgctccatcttcagtgccatctggactcccaccaagtgcaacaccctccactgtgccttttggaccagcaccaacaggaatgtatccctccgtgcctcccaccggaccacctccaggacccccagcaccctttcctccttccggaccatcatgtcccccacctggtggtccttatccagccccaactgtgccgggccctggccccacagggccatatcctacaccaaatatgccctttccagagctacccagaccatatggtgcacccacagatccagctgcagctggtcctttaggtccatggggatccatgtcttctggaccttgggcgccaggaatgggagggcagtatcctacccctaatatgccatatccatctccaggcccatatcccgctcctcctcctccccaggcccctggggcagcaccacctgttccatggggcaccgttccaccaggagcctggggaccaccagcaccatatcctgcccctacaggatcgtatcccacaccaggactctatcctactcccagtaatcctttccaagtgccttcaggaccttctggtgctccaccaatgcctggtggcccccattcttaccattaagttaacaatggacgaagagatgacgctttgctttttgaagtacatgtatatgcacatgaatgcatatataaaaattgctggtttcactattagagggcattcatgaaagaacaactcttgcacctctcagagaagataactgcctcttgtacttggacgcgtagtacatcatatgtataccatcagataaaagcatagaagtaaatcattcggatgtgatttttatttggttttcatggaaagttaaagtgataaagtatattgaatagttctttgacagaatttgtttaaactatgaaactacacacttaaaaatctaagatgtggattattgttagaatctgcaacttcattggcaaattatttcaagtatttttctataatcactttccccttctaaataaataaacttcgagaataacccatcataatccaaacaaatgatgcctcaacattttgagctgctctgtcggacaaataaacctggtcctcttgaggttatattttggatatacatttttaaactgtcagtaattattgtcagatgtggagttcaatagccagccagtgttcatttttatccttgagcttttagtaaaaacttcctggttttatttttagtcattgggtcatacagcactaaagtctgctatttatggaaactaacttttttgtttttaatccaggccaacatgtatgtaaattaaatttttagataattgattatctctttgtactacttgagatttgattatgagatgtgcatattgctttgggaagagctcgaggaaggaaataattctctcctttgttttgaacctcaaactagataaaccctaggaattgcttaactgcaacaagtaattttcattcccacaaaaacctgaggcagttcttttgcccagagcgttccctgtagccacccccaccccacttgcccttggttctttagaaggagcacacacatcccttgattcctccctgatgtggtaaactggcacactccaggggtctaaaacataaaacagttgtgtttagggaaccttaagtcatgcagacatgactgttctctttgtacaagtgtgaatcaaaatatgtatctctttttcagagtctggttaagctatgtcattgtctactgcatagtttcctgagtctgtttgtaaagtgcttatggctaacagttcagttctgtatttgttgacaggtaaataagtggagttgagtgccatctttgaaaaaattaccctctagctctaacactgaaaataataataaattgtagatctctgcaactaagtttaaagcagtgtgactgtgttgcttaaatatcaagtattgtttataaccaccaaaaaaaaaaagccctggtagttttttggcaccttatgtttaaatcagattcttagatttggagtagacctgaccttgttatttattagataacattttgaatgtatccattggatttctaaaatgtattgtgaatttctcagacaaacaggatttatgctggagctctgttttgcttagaaataaaatatttagtagtttatttctgctctaattaaaatgtcaagaatgccgaaaaaaaaaaaaaaaaaaaa

SEQ ID NO: 24727 - DNA, 3017 bp, Homo Sapiens
gcggggtcctctgtgatacgcagtggcaaaggagaccgccaggaaggcccctccttcctcaggccgccggcagtgacagtcaagaagctgcagaagtggatgtacaaagggcgtctgctgtccctgggaatgaagggtcgtgcccgtgggacggctcccaaagtcacaggaacgcaggcagcctccccaaatgtgggcgctttgaaagtgcgtgaaaaccgtgtcctgtcggtgcctccagaccaaagaattacgctgacagatttatttgaaaatgcctatgggtcttcaatgaagggaagagaacttgaagagctgaaggataatattgaattcagaggtcataagccacttaacagcatcactgtttcaaagaaacgcaattggctatatcagagtactctgaggcctcttaatctggaagaagaaaataagaaatgccaagatagaagtcatttatccatctcacctgtgtctctacctaaacatcagctatcacagtctttcctcaaatcatctaaagagtactgtacatatgtggtatgtaacgctacaaactcttcattatcgaaaaactgtgctttagattttaatgaggaaaatgatgcagatgatgaaggagaaatatggtacaatcccattcctgaggatgatgaccttggtatatcaagtgccttgagttttggtgaggccgactctgctgttctgaagctccctgctgtcaatttgagcatgttgtctggcagtgacctgatgaaagcagagcggcatactgaagactcactgtgctcttccgaacatgcaggtgatattcagaccacacggtcaaatggaatgaatcctatacatcctgcccattccacagaatttgtgcagcagtacaagcaaaagctaggacacaagacacaagaaggtataatggtggaggacagtcccatgttgaaatctccttttgcaggttctgggatcctggctgctacaaatagtactgaattgggaattatggaaccatcttctccaaatcctagccctgtgaaaaaaggcagttcaattaattggtcattgccagataaaataaaatctccacgaactgtgaggaaactttccatgaaaatgaaaaagttgccagaatttagccgaaagctaagcgttaagggaacattgaattatataaacagtccagataatactccttctttgtctaaatataactgccgagaaattcatcatactgatattctgccctctgggaacacaaccaccgctgctaagaggaatgttataagccgataccatcttgataccagtgtatcctcccagcagagctaccagaagaaaaactctatgagttctaagtattcctgcaaaggtggttaccttagtgatggagactcacctgaacttacaactaaagctagcaaacatggatctgaaaacaaatttggaaaaggaaaagaaataatttcaaatagttgtagcaagaatgaaatagacattgatgcttttaggcattatagcttttctgatcaacctaagtgttcacagtacatatctgggctcatgagtgtacatttctatggtgctgaggatttaaaaccacctcggatagattcaaaagacgtcttttgtgcaattcaggtagattcagtaaacaaagcaagaacagctttgctcacatgccgaacaacatttttagacatggatcacactttcaacatagaaattgaaaatgcacaacatttgaaactagtagtattcagttgggaacccactccaagaaaaaatcgagtttgttgtcatggaactgttgttcttcccaccttatttagagtgacaaagactcatcagttggctgtcaaacttgaacctagaggtcttatttatgtgaaagtgactcttatggaacagtgggagaattctcttcatggactagatataaaccaagaaccaataatatttggagttgatattcaaaaagttgtagagaaagaaaatataggactgatggtgccccttctgatacagaaatgtattatggaaattgaaaagagaggctgtcaggtattatcttactatggttccctactacttcctttattgattgattaattgtaagtcttgggggaaggaattcaaggtaatgtaaaaaaatcaaatttagatattttaccattcctattctttatttttattccattactgtttagggtataatttttaacttgactcatgttgtccattattgagagcatgctagatgattccacaaatttatattgcaacacagagcttcatgggtcttataattagaaatcaggattgcttcaaaatggcattaaaaggaaaagtcagagctgataacataggcaaaggatattgattctttatactaatttttgtgatacatattaagactaaaaattacgttgagttatttctgctttagtactatctgaatttataatattggttgaaaagttaagttaaaagacaatgagtaaatattataaaatctgaaatatttatttaataaacttaagcttaacatggaaactatagaaacagcctaagttaatggaattttgcattaagatacagaatacctggattctggtttctcctccattattacttagctgtgtcatgttgggcaagtcacttaatctctgtgggtcttacttgcttgtatctataaaaatagatggagtggctgggcatgggggctcacgcctgtgatcccagcactttgggaggccgaggcgggcggatcgcctgaggtcaggagttcgagaccggcctggccaacatggtgaaaactgtctctactaaaaatacaaaaattagcccgacatggtggcgcatgcctgtagtcccagctacttgggaggctgatgcaggagagttgtttgaacccaggaggtggacattacagtgagcccagattgtgccactgcattctagcctgggcgatagagtgagactccgttgcaaaaaaaaaaagaaaaaaaaaaaaaaaa

SEQ ID NO: 24728 - DNA, 1543 bp, Homo Sapiens
cgtggagatcgctgggagcggttgcggcgtgcggggagctgagttatagctgtgacttctgccctgccaggccgcacacaagctggctgacccggtttgtaaaaatggaatttcaagcagtagtgatggcagtaggtggaggatctcggatgacagacctaacttccagcattcccaaacctctgcttccagttgggaacaaacctttaatttggtacccattgaacctgcttgagcgtgttggatttgaagaagtcattgtggttacaaccagggatgttcaaaaggctctatgtgcagaattcaagatgaaaatgaagccagatattgtgtgtattcctgatgacgctgacatgggaactgcagattctttgcgctacatatatccaaaacttaagacagatgtgctggtgctgagctgtgatctgataacagacgttgccttacatgaggttgtggacctgtttagagcttatgatgcatcacttgctatgttgatgagaaaaggccaagatagcatagaacctgttcccggtcaaaaggggaaaaaaaaagcagtggagcagcgtgacttcattggagtggacagcacaggaaagaggctgctcttcatggctaatgaagcagacttggatgaagagctggtcattaagggatccatcctacagaagcatcctagaatacgtttccacacgggtcttgtggatgcccacctctactgtttgaaaaaatacatcgtggatttcctaatggaaaatgggtcaataacttctatccggagtgaactgattccatatttagtgagaaaacagttttcctcagcttcctcacaacagggacaagaagaaaaagaggaggatctaaagaaaaaggagctgaagtccttagatatctacagttttataaaagaagccaatacactgaacctggctccctatgatgcctgctggaatgcctgtcgaggagacaggtgggaagacttgtccagatcacaggtgcgctgctatgtccacatcatgaaagaggggctctgctctcgagtgagcacactgggactctacatggaagcaaacagacaggtgcccaaattgctgtctgctctctgtccagaagaaccaccagtccattcgtcagcccagattgtcagcaaacacctggttggagttgacagcctcattgggccagagacacagattggagagaagtcatccattaagcgctcagtcattggctcatcctgtctcataaaagatagagtgactattaccaattgccttctcatgaactcagtcactgtggaggaagggtatgtttccccctgtacccacttgaggcaaagataatggaaaaatgccttcaaaattctgaaggaaagttaattttaacctaaaattgtatacccaggcaaagtgctaatcaagagggcaatagaataaaaacattttcagatatcaaaaaaaaaaaaaaaaaaaaaaaaaaaaaaaaaaaaaaaaaaaaaaaaaaaaaaaaaaaaaaaaaaaaaaaaaaaaaaaaaaaaaaaaaa

SEQ ID NO: 24729 - DNA, 3600 bp, Homo Sapiens
caggaaacccaatcgtaaaactaacaccagcttcatgcttcagctgagcagtgccctggctttcttgcataaaaaccagatcatccaccgagatcttaagcctgataacatcctgatttctcaaaccaggttggataccagtgacttggaacctaccctcaaagtggctgattttggtctaagtaaagtttgttcagcctctgggcagaacccagaagaacctgtcagtgtaaacaagtgtttcctttccacagcatgtggaacagatttttacatggctcctgaagtttgggaaggacattacacagcaaaagctgacatctttgctctggggattatcatctgggcaatgctggaaaggatcacattcatagacacagagacaaagaaggaactcttggggagttatgtaaaacaaggaactgagattgtgcctgttggggaggcacttctggaaaatcccaaaatggaacttctcattcctgtgaagaaaaaatctatgaatgggcgaatgaaacaactgattaaggaaatgctggctgcaaaccctcaggatcgtccagatgcttttgaactagaactcagattagtacaaattgcatttaaagatagcagctgggaaacgtgacacatattatttgcaaataccatggatgatatgctgcttctgtttaacagtgatgcaacattatgtggctgaaaaagaatataaaaagctagactctaccctctaagggtttagattttttgtgggattttttttttcctcatttttcttaaatccaagttggccgttttattagtatgtttcaaatgtgtattaccaatgtgggtgtaaatttttaaaaaatgattattgatagaagtttggcaggaaaattctttaagagctaacaagagaagagagtccagttttctggaaatatgtctttaagtattttagacattcctcgtcagtattaggaatttccatgggaaaagaggtttgcatgctggtaatgcaacctttgaaactttgtaaaggaaacatatatgtatatatttatgtatatgtaagtatgtgaatgtgcgcattttgcattccatatgaaaaaaatgccacgtctgtttaaattatttgatgtaggtttgggtttttgagatttgctggtgaagtcagtgacgaaaaataaaccttcccttatcttcctactctgcccctccccctaatgaaatcatattaagttgtttttttttttttttgtaatatacagctttttttttaaggcatcattttcgagggtctaaaattatctggtaaaacaaatgaaattaagtgatccaaagctgctgaagtatgtttgaactctccagtgccctatagctgcaagagttgaattagtcatgcagtcatatggcagcaggttggtgattcagtccgaccttctttaggtaaccgagcatttatttaaccaactataccactgcattgggacgtctgcacttgagcttctacaatctgatataaatctgaatacaggattattctgtttgaaaactttgctatgtgtgaactgtaatacttgatacatttttggtttgaagactttgtctaagcctcattatactgaagttgaagaaaccaaatgagctccaccctcactttgcctgccctgatatgatcacttgttgagtcactggagttcctttcattttggcactgatgctgttttctcttgtctgatttgaaacagtactggtaataatatggttgttgaaaatgtgatcacctttatctaaagtgggagaagatacatacacagtatggcaaatggataaaatattgtggcatcaactacttttaaagtagaaaagctatccattttatacaatcactgatacagtctatgtcaaaaaaccaacagaccattattcctcttgaagttagtttgattttatctttgtatggttgtctacaatttgttttcctgtaaatgcagatagttaaaatctaaaggatagaatgctttcctaaaacagaacattagcctttaaggttaaatagactttacattgtatctaagttaatctttataaagcactagaatttttggtcaaaagtcaaaatagtattagaatattgaaattattgatagctttcataatctcagcttttttgaacttccacaatttttggaatatgtcataatttttttccctgtttcaaatgtgttcagaggaaatagaatgtaaaacatcacaaaaaaaattgcagtacataaaatttctggactatgttagttacttgatctggaagtttaaaatttggactaaaaggttttattgaaataaagcctcttaaaatgaaaaatcatatacttttaacatcacttttaagctaataaatataagaattcttttggaaattagaggtggaaacacactggaacctcatgataattgaccctctggatcaccagattagtttaatttaacagatatgtccaaggaagttgagctatagggagtaagaaaaagcatcatgataacgtctagtcaataacatggcacttcagcagagattcatagatgatggtatgcccatgcatcatttgctcttcaaatatctatgtgcttggagccacagtttcctaagcgcatagtttttggtcctgcctcatgtaaaatagttaatgattatcatttacttggaaagattttacctgtgaagtgaaattctttcattgggggtaagggtatgaggtgatcaggaagtttcttctggaattttatcaagtccttgtattctaaaatagccaagcaaaatgatagtaaattctttgtctttgttctttcagtcagaggtatttattaagtacctactgtgtgctcagcactaaaggtttgttgataaaatgacaattaaaaaatggcatttagccaaaggccttttcagccaggagtaagaaaagatggttagtgatatttggaaatacctggatatttgctagaggaaaaatgaaagcaaaacttcgtacacagtgccttgcccataataggtactcaataagcaattgttcctcatagagtcttttgccatgatttatggtgttttttgaaatttgtcttaattgaaaaaagaccaaatatttcaaatgagcttataggcagctgtggccagtgaaaatatggggttgtacagttagttcctagaatgttattttgcactagttgtcacttagaaagatggggttcctgtagattttttggtgctaagggatactttgtcattatgatgaagtaagtgttaagtgtcagataaatagcacacagaatagttctttctgctggtctgttttttctcttcgttgttgttgtttttaattgtaaattgttatcaatcaaactattgtagcagctacaaagtaattcaccagcatgacaaaatggtcaaaaaataagtcatcagcacttaagaaatgaaagcaacttttgaaattttctgttaaaattgtcaaatatattttatgaagaatttataaaaggggaaaatgattgtaatttattgttcatgacttttttttttaaataaagtgagtttcaataaaaaaaaaaaaaaaa

SEQ ID NO: 24730 - DNA, 1189 bp, Homo Sapiens
aaagaaaggtggtggcgccctcctgcactcagtcaaggccaagacccaaccagccgtcaagaacatgtaccgctcggccaagagtggcttgaagggggtgcagagccttctaatgtataaggatggggactctgtcctgcagagggggggctctctgagggccccagccctccccagccgctcagaccgcctgcagcaacgcctcccaatcactcagcactttggaaagaaccggccccttcgccccagcaggagacgccagctggaagagggaacttccgagcccccaggggcggggacacccccactgagccctgaggatgaggggtgcccgtgggcagaagaagctctggacagcagcttcttggggtctggagaagaactggatttgttgagcgagattctggacagtcttagcatgggagccaagagcgcaggcagcctgagaccgagccagagtttagactgctgtcacagaggagacctggacagctgcttcagcctgcccaacataccaagatggcaaccagacgataagaaactaccagagccggagccccagcccctttccctgccatccctgcaaaatgcctcgtctttggatgccaccagctcttcaaaggactccaggtcccagctgataccctcagagtccgaccaagaagtcacgtctccatcccagtcctcaacagcttctgcagacccaagcatctggggggaccccaaaccctctcctctcacagagcccctaattcttcatctcaccccttcccacaaggcagctgaagattctacagcccaggaaaaccccactccctggctctccactgcacccactgagcccagccctccagaaagcccccaaattctggcccccacaaagcccaactttgatatagcctggacgtcccagccccttgatccttcctcagaccccagttctctggaggaccccagagcccggcctcccaaagccctgctggcagagcgcgctcacctccagccacgggaggaaccaggagccctgaattcccctgctacacccaccagcaactgtcaaaagtcccagcccagcagccggcccagagtcgctgatcttaagaagtgctttgagggttaagaatcaggggtccaagagagaccccagtccctcaataaagccacaagagcccaaaaaaaaaaaaaaaaa

SEQ ID NO: 24731 - DNA, 2727 bp, Homo Sapiens
ggcgcctgccgccagtctcctggcgactttccctatatcgcagagactcatccctctgaccccagcccggaagcactgtccctcggagtccgagacttccacctgggtcgtgtccaaggccccggcgactccccggactcggggtgccgggccaacctccccgccgaggcccacccgccgtcgctatggcgtgcagtttgcagaagctgtttgctgtggaagaggagtttgaagatgaggatttcttgtctgctgtggaggatgcagagaaccggtttactggctcactgcctgtgaatgctgggcgcctgagacctgtctcttctaggccacaggagactgtgcaggcacagtcctccaggctgctgctgttacaccccactgctccctcagaggctttgggcctgccagacttggacctctgcctccctgcctccagcacgcccagtgctgacagccgtccatcatgcataggagcagctcccctaaggcctgtctctacttccagcagctggattggcaatcagagaagagtgacagtgacagaagtgctcagagagacagcaagacctcagtcctcagccttacaccccctactcacctttgagagccaacagcagcaagttggtggctttgaggggcctgaacaagacgaatttgataaagtcctggcaagcatggagttggaggagcctggcatggagctggaatgtggagtcagcagtgaggccataccaatcctgcctgcccagcagcgggagggttcagtattggctaaaaaagcccgggtagttgatctgagtggatcttgccagaaggggcctgtgcctgccatccacaaagcgggtatcatgtccgcccaggatgagtctctagatcctgtcatccaatgtaggactccacgaccccccttgagacctggtgctgtgggtcaccttcctgttccaactgccttaacagttcccactcagcaactccactgggaagtctgtccgcaacgctcccctgttcaagcacttcagcctctccaagctgctagagggaccattcagagcagccctcaaaatcgtttcccttgtcagccattccagtctccaagttcctggttaagtggcaaagctcatttacccagacctcgaactcccaactcaagctgttctactccctcaaggactagctctggattatttcctcggatacccttacaaccgcaagctccagtgtcttccattgggtctcctgttggtaccccaaaaggtccccagggagctctgcagacacccatagtcaccaaccacctggtgcagctagtcactgctgccagccggacaccccagcagcccacccatccctccacccgagccaaaactcgccgtttccctggcccagctgggatcctgcctcaccagcagagtgggagaagtctggaggacatcatggtttccgcgccccaaactccaacccatggtgctctggctaaattccagacagagattgttgctagttcccaggcatctgtggaggaggattttgggcgagggccctggctgaccatgaaatccacgctaggcctggatgagagagaccctagctgcttcctctgtacctacagcattgtcatggtgctgcgcaagcaggcagccctgaagcagcttcctaggaacaaggtccccaacatggcggtgatgatcaagtccctgactcggagcacaatggacgccagtgtggttttcaaggaccccacgggagagatgcaggggacggtgcacaggttgctgctggagacgtgccagaatgagctgaagcctggctcagtgctgctgctgaagcagattggagtgttttctccttcacttcgaaatcactacctcaacgtgacacccaacaacctggtccatatttacagcccggattctggggatgggagcttcctcaagccatctcagcccttccccaaggattcagggagcttccagcatgatgtggctgcaaagcccgaggaaggcttcagaacagcacagaacctagaggcagaggcgtcccctgaggaagaactcccagaagcagatgacctggatggactcctgagtgagcttcctgaagacttcttctgtgggaccagtagttgagactgccccaacgcaggacaacccaccatgagcaggcagctctgggcatgtgtctggtcacatccaagggggagaagaaggccagcatgattggagagtggacacagccggggggcttctgtggttgctcccaccctgggtgttttccctgagagccccctcatctctgcgctgccctcactttgggccttcctttgccgttggcaccagaatccggccggagactggctctccagccaacaagaaaggcctgtcaccctcgccttgggtgtccctctcctgcctcagcttaattttagaggatattgggcctggttttcttgtcccttcataccctagtccctggacagctgaggagatgaaaggagccacaccacaacaatggcggcctgcccctccacacaggggagaagcacgctcaggcttcctctgctttgtctcttcagacctgtggttgctctgctcatccatgcccaaggttcccaggtgcaggacagaggtgtggcctattgtaccttgttctgaaataaagcatctcctgcttaaaaaaaaaaaaaaaaaaaaaaaaaaaaaaaaaaaataaaaaaaaaaaaaaaaa

SEQ ID NO: 24732 - DNA, 2002 bp, Homo Sapiens
gatgaataatgggtatagtggggttggtaattcatcagtttctggccatggtattctcccaagctatcaggaactagtggaagaccgtttcaggaaacctcatgcttttgctgtgcctggacagtcttatcagtctcaatccagacatcatgacactcattttggtcgtttgactcctgtctctcctgtgcagcatcaaggtgccactgtaaataacaccaacaaacaggagggttttgcagtccctgcccctcttgataataaaggaactaattcatctgccagcagcaacttcagatgccggagtgtgagccctgctgttcatcgccaacgtaatcttagtggaagcaccctctatccagtatctaatatcccacgatctaatgtgaccccctttggaagtccagttaccccagaagttcatgttttcacaaatgttcacacagacgcatgtgccaacaacatagctcaaagaagccaatcagttccattgacagtcatgatgcagacagccttcccaaacgctcttcagaagcaagcaaacagtaaaaaaataaccaatgttttgttgagtaaacttgattccgacaatgatgatgcagtgagaggtttgggaatgaacaacctgccctctaattatacagcccggatgaatctcactcagattttggaaccttccactgtttttcctagtgccaacccacaaaatatgatcgattccagcacttctgtttatgagttccaaacaccatcttacctcaccaaaagtaatagcaccggtcagatcaatttttctcctggagataatcaagcacaatcagaaattggagagcaacaattagatttcaatagcactgttaaagacctgttgagtggagacagcttgcaaaccaaccagcagctggtaggtcagggagcatctgatctcactaatactgcatctgatttctctagcgatatcaggttgtcttctgagctctcaggcagcatcaatgatttgaacactttagacccaaatctactgtttgatccaggtcgtcagcagggacaagatgatgaagctacactggaagaattaaagaatgacccattatttcaacaaatttgcagtgaatccatgaattctatgacttcatcaggttttgaatggatagaaagcaaggaccatcctactgttgaaatgttgggttaaattgtgttttataacatgtagcacactgtatctaaagacatatgtattgtatttgtcttaatggaagtgcctcccgcagcagaaatactattaattgtgacattttaaaagcgtttgctgcagaagtggtttcttcagtaggaaatggttagacttgcctcagttcttaacaagtgtctaaagacagtaggctgtagaagaacaagtattaggttttaaattttataatgtgccccatttattcacattgattgactatccagctgttacaagagcagtcgatctttattttgtgtaagttagtttcatttcatcagatgatctgcacagaactcagaataaaccatcaattttaggtataggctgttttgttgttggcattatcttttagatataaaatcatagctagggtgaactgtagacaagaaagtcttccttgaaacagggataatattcaggttattataaatatttaggcttgaagcatagagctactgtagggtgaaaaatctctgtaggactttctggggcttcagtaccatttacacccacgatgaagggcttaaatagaaaataatggaaaattaaatattactttaaggaaagcaaagctgcactaaaatttttaagggaaaaaaaacaagtagccatttatatttgtgaccttgcattaatatttaaatgttgattttaatatggagctagcacacatagatgcgcaggcacgcacacacaaaacaagcaaatgtaactccaggcatttgtaatttaatataataaatacaagcatgttaaaaaaaaaaaaaaaaa

SEQ ID NO: 24733 - DNA, 4860 bp, Homo Sapiens
ggggacagtgctcaataacaaattgtttatcaccggtggaatcacctcatcttccacctccaagcaagtgtgcgtgtttgaccccagcaaagaagggaccatagaacaacggaccaggagaactcaagtggttaccaactgttgggagaataagagcaagatgaattacgcgagatgctttcacaagatgatttcttacaatggcaagctttatgtcttcggtggtgtctgtgtgatcttgagggcctctttcgaatctcagggatgcccttctacagaagtatacaacccagagactgatcagtggaccatcttggcatccatgccgattggtagaagtggccatggtgtgactgtgctggacaaacaaataatggttcttggaggcctttgttataatggtcattacagcgattccatcctcacttttgatccggatgaaaacaagtggaaggaagatgagtaccctcggatgccctgcaagctggatggtttacaagtatgcaacctgcattttccggactatgtactggatgaggtcaggcgttgcaactaatgacatcctcctccctaaaaaaagaggcaaacaaagtatttgtttgcacagagtaattaattaaaacatataaagaaaaacctcaccagttttactatcaaagccattggtctaacattgtaagaatttttcattctgtgctagcatcctttttttcttttcagtggcctcaaactcatgcaataagttaattctaagtgctagctcttgaaactacttccagaagcagttgaatagaatgctccacttatctgggatattgattttctgctttaaacatttctttcagatgttagcgtaggagtcatgtgtcttctaagagaagacccgataagtgtcactggatgtgatttcagtctctgtctctatctgaaacctttttgaagatttatttcagtgtatttcagtctgttatactttttagttttattatttaaaagtttaaaactcttgacctttttgcatggctttttgctgaaaatgcaaaaatataaattttctacaaaattaactttttatattcaaaacactatttctaagctgccttctcttatccgcattgtgttagtgaaagcatattcatactcgcatacaacctataaatacacaaggcacatcccttttatgcgtggttaggattctatatttttaagctagtgcacttacttgcacacacagttcgccatacttgttgaattttagatgtaacgtcttttcacatattaacatttttagaaagttgaaataactggagtcctcatttgctatcaaagtagcctatcttcagtccatactgattcagtaatatttgaactccttatatttctgaaacatgtatggttatgaaaactaacactttatattttattttcaaaagtaaatgttagtgttctttgtcgatgtatgtcttttctttttgaaaatgtttttctttgcagtctgtttaacgttaccctgtttttagtgagaatcggagtggtatatgacaagttctggccctgcagcatgcaagcacttttaaagagcatttaggtaataccagactcctaaatcaaggccccttaaaagtaagtgcaactcccattttttacattcagtaaggctgctgcatttgttattgaatggaaggtagaaactcttagaaaatttgacctcagttttgacttagaggtaagaaatagaattataatgttactggttttatctacttgtttattttgtacaaaatacccagcgacactagggatgtaagccctcagtttttgttttatttactgaaagctattagcatgaaggatagtaaccacaaagttcagaatggatcaagaatagctgtttaaaagcatttataataagtgttttaggattagctgcacctttcaactctttaaatgcagaggaaaaaacatagttgacaaagttaagcaagaataacctgggagtggatcattgaaattgatgccatttgcgcatgagtagtctatatctgatacagactagatctatactggcaaaacttgccagatcttagaatattggtgcaatattgcaatgccttctatatggctgctgatgtataaattttctagtttcactttgtttggtgttttttgtttttttgtttgtttgtttgtttttttgctgctgccaccattgaacataaaatggaagtgtgaagtcatggaaatgtgaagactttggtttttgggggttttttgggcagttattagacatactatgagattaaacctgatcttcaaactccagaattggaggcatttgggtttaagaaaccaggtacataagtagcttttgaaaaaaccattggcattgatttcaaaaatcaataataatcttattttatatatgagacttatattttcattaactagtcctgtcatttacttacagtttccaaacatgaaatttggtatcttgtttcccatggtaatatgggtaaaagtctttttctacatttaaaaaatacattattttatttttgaaagttaggaataagttagccatttaatttttttctacattagtttagtggctttgtatgtgtgctattttgctttaaagaaaataacgtcttcattattttcctcattgatgtcttttgctagaaaagaccaagaaagagccatcaggccaggtatccacatcaaagcctttacactatagtggtggttctctttaattgcttagatatgacttcatgaccctagtcagggtgacatctgggcaaacatttgagtattcttggtcttccattttaaagacagaggccaagatcaaagttcatgttttgtaaaattcgtaaaatcttaacttgaactaactctgggttcagctttacgtaagtcacgtcggacctgatgttagctgtaatcagttttgagctttaaggatagttgctgttgcttgggttctgaatgtatgagaaaactccctgtttatatgtagttctaatttaggttattttaaatccatgattaacttacattcccttttaaaattatggttttattgctgcaagagatttatttttgttatactaaactatggaaaagtttttcatagcatttttttcaagtttattttttgtgtgcttcatttggagtttttgtttatatacattgcgctcaaaaaagtagttttttgaaaaattcagtaagatttgaatctatacagtttaactgttatgacctttatgcgtgttgttttcactttatatctcaaatgccagagttcacaaaaatagctgatcttcattaattacatcttaattagaaccatttgttctcttccgtgtctttgaccttctaagttttgattttaaagaaattccttgcactacagccttttcttaaaatgcaagattctcactttgaaggttttgtgttggaagaaatgctactggtttttaaaaagcaaagcttaactaatagaattattagcttttcttgagacagctttctgtgtcctcattactctgctctgtgtgagtgttactagaatttgtgaaatactgactgagcccttcacttatcttttctaaagcagcacctttggacacctcattctgggaagcctgctcgagtcatagtaaaggacacacgctttatgtggggagaagtggtaaaaatggagttttgtcttaattacatgaaactaagctttaaaatattttataacagattatttgagctgcataatctaaacatgtcaaacgttcagtgggactatttttatatatgtatatgtgggtgtaggtcataacatttcagtttataatataaattgttatttcagtttataagctatctctcagaggagactagctcttttgagaattcataatttaaagttttagactgaagtaaaatgcaacatagataatagtgtaaatcagatataattgagggctatatggcagtaaaactgctagtgccagttttcttgtttgcctgttatacatttttgatttttgtttttgtattctgaacattttgagagatcatatgtttgttcaattacatttagagttggtttgggaataaatatcttctaaaaagagatttatcttaaaaatggaagtcctaaaaattagtttatccagagtttataaagtcaaatattcagtaggcatagactggaatagataaattcatggaaatcatatcctttcagtacaccgtataacttcaatattacacaagtaacattgaggagaatgccatcagctttgttctcccttaaattctttggttttctttttacattttgggaacaactgcatttaaaatgttattagtcagtatatagtaaggattaggtgtttgctttctgaaggaatggtccagtgaggtgattgggagaggttattttctacctaacttgtatatgccctatacctcttgggcatactttgtctatagaaaaatattttgacctttaggtacattttgggccagtagtcaaataatcctagggccgatataaaaatcttagaataatttaaggtttgccttttatacctgttttgaaagcctttacatttttgtcaggtaatttttcccaagccgtggatataatctattcaaacatgtttatgctatccattctgtttttaaattgaaaaaaatgttaaaagtgtttatgaagaaaagtttaaataaaatatttttaatctttaaaaaaaaaaaaaaaaaaaaaaaaaaaaaaaaaaaaaaaaaaaaaaaaaaaaaaaaaaaaaaaaaaaaaaaaaaaaaaaaaaaaaaaaaaaaaaaaaaaaaaaaaaa

SEQ ID NO: 24734 - DNA, 3195 bp, Homo Sapiens
gagctgtcccagattgaagcctgtcagggcccaatgcaaatgaggctgattcccactctggtcagcataatgcaggccccagcagacaagattcctgcagggctttgtgcgacagccattgatatcctgacaacagtagtacgaaatacaaagcctcccctttcccagcttctcatctgccaagctttccctgctgtggcacagtgtacccttcacacagatgacaatgccaccatgcagaatggcggagagtgcttgcgggcctatgtgtcagtgaccctggaacaagtagcccagtggcatgatgagcagggccacaatggactgtggtatgtgatgcaagtggtgagccagctcctggacccccgcacctcagagttcactgcggcctttgtgggccgccttgtttccaccctcatctccaaggcagggcgggaactcggggagaatctagaccagattcttcgtgccatcctcagtaagatgcagcaggcagagacgctcagtgtcatgcagtccctgatcatggtgttcgctcatctggtgcacactcagctagaacctctcttggagttcctgtgtagcctcccaggacctactggcaaacctgctctagagtttgtgatggctgagtggacaagccgacagcacctgttctatggacagtatgaaggcaaagtcagctctgtggcactctgtaagctgctccagcatggcatcaatgcagatgacaaacggctacaggatatccgtgtgaagggagaggagatctacagcatggatgagggcatccgcacccgctctaagtcagccaaaaacccagaacgctggacaaacattcctttgctggtcaagatcctaaagctgatcatcaacgagctctccaacgtcatggaggctaatgccgctcgccaggccactcctgcagagtggagtcaagatgactccaatgatatgtgggaggaccaggaggaggaagaggaggaggaggaggatggtttagctggccaacttttatctgacattcttgctacaagtaaatatgaggaggattactacgaggatgatgaggaagatgaccctgatgccctgaaggatcctctctatcagattgatctgcaggcatatctcacagatttcctctgccagtttgctcagcagccctgctacataatgttttcaggccaccttaatgacaatgagaggcgagttctacagaccatcggcatctaaaaaggggagcctttctacatttgctccttctgggccagccgcaaaccattttgcagccctcactggccttgagatgcactttcttctcaacctaaagtggcatcttgacccttggcccttggcctcggcagtgacactgatgacaattcagaccaggctcaccggtgccgtcacttaggaatgctggaacaaaggacatttctcaaagttcccctgaagacatgccatctctagaaccttttttctccccgactctacccccacctctgttcctagagccctctgctggcgagtccagaaacattattgcccagaaggattatgtgtttatggattattttgccccgcctcaggagcgcaggaagtcactaccatttatattctaaaacagaactatctatgttcataggacttctgatgtgttcagataggaatcctcatgagagatcattatgctttgtgccctggaccactgctgctctgggttctcaggaggaacaggcaagagcagcttcattctaagcctttccagtgacctcagccttgcttctcttctacaacactaaggctcctctgtcagaggaggtcgtcttgtttttgcttcattgcatgacataacccttcccctcaagctgttcctatatatacatgcacacacaaaataagccagacagatggcaatttgatcttccttttttagaaaaaaaaaaaaaaatggggaaaagggattttttttaaatccacctgacccaactatatttaatatgcctctcccacacattaccacagagtctgatattcaaaggttatcccctttccctcaggaagcctctaaagtgcttaagttgtagccctcaaatttgcaacatgtatttttctaggacagtaaagtaatctttacaaatgaatttagttgcatggtataaggtgtctcagcacctgtttgccttctattccctttagaaggtaagtaaaagtaatgggggaaaggattaggtggagcctgtctaaacattctagtgtgtcttggcaaacatagcctgaaatgattcttaaagaactggcattgtttaatcaaatatttttaagggagattccttaattgggaagtttagtctgtttggggttcaaagagtaaatgaggattagaaaatcatggagagaggctgggcgcggtggctaacgcctgtaatcctagcactttgggaggctgagatgggcggatcacttgagatcaggagtttgaggctagcctggccaacacagtgaaacctgcatttctactaaaaatacaaaaattagctgggcatggtggtgcatgcctgtaatcccagttaacttgagatgctgaggcaggagaatcgcttgaacttgggaagcagaggttgcagtgaaccgatatcacaccgttgcattccaaggcaagactcaatcacacacacacacaaatcatggggagaaagatgaaacctgtgttcccctttttttggtagtgcccacatctggtgccccatttttaataaccacaggatatttctttagattgatattctcacaaagaagaaatagaatataggctgggcgtggtgtgtcacacctgtaatcccagcacttacggaggccgaagccagcggatcaccagaggtcaggagttcgagaccagcctgaccaacatgatgaaaccctgtctctactaaaaatacaaaaattagccaggcatggtggcatgcacttgtaatcccagctactcgggaggctgagacaggagaatcgcttgaacctgggaggcagaggttgcagtaagccaagatcgcaccattgcactacagcctgggcaacaagaggagcgaaactctgtctcaaaaaaaaaaaagagaaagaatataaagtgaatctgaatctccactcaaggggatgggccccaaaaaaaaaaaaaaaaaaaaaaaaaaaaaaaaaaaaaaa

SEQ ID NO: 24735 - DNA, 3272 bp, Homo Sapiens
accacacagacccagaagacaatgaaattgtatgcttcttaaaagttcaaatagctgaagcaattaatttacaagataagaatctaatggctcaacttcaagaaacaatgcgctgtgtgtgccgttttgataataggacttgtaggaaactgctggcttcgattgctgaggactacagaaaaagagccccatatattgcttatctcactcgttgtcgacaaggactacagaccacacaggctcacctggaaaggctattgcaaagagttttgcgggacaaagaagtggccaatcgatactttaccactgtctgtgtgagattactgcttgagagcaaagaaaagaagatcagggaattcattcaagactttcagaaactcaccgcagctgacgataaaactgctcaggtagaagattttctgcagtttctttatggtgcaatggcccaggatgtcatatggcaaaacgcgagtgaagaacagcttcaagatgcacagctggccattgagcgaagcgtgatgaaccggattttcaagctcgccttctaccctaatcaagatggggacatacttcgcgaccaggttcttcatgaacatatccagagattgtctaaagtagtgactgcaaatcacagagctcttcagataccagaggtttatcttcgagaagcaccatggccatctgcacaatcagaaatcaggacaataagtgcttataaaaccccccgggacaaagtgcagtgcatcctgagaatgtgctctacgattatgaacctcctgagcctggccaatgaggactctgtccctggagcggatgactttgttcctgtgttggtgtttgtgttgataaaggcaaatccaccctgtttgctgtctactgtgcagtatatcagtagcttttatgctagctgtctgtctggagaggagtcctattggtggatgcagttcacagcagcagtagaattcattaaaaccatcgatgaccgaaagtgaccaagaccaaggcccaccaaggcagcagactgttaatcagacaaacagatctctgagaaggtgcatcagctgctttgaaggctgaagattgttttgtatgatactgcacagcatcaggcattttaaagcagatctttactaaacaggttaatgagctaacaagcaggttctctcgtctttgggctctttcctttctgagttgcatattctattttcttgtccccaagtagagactagtactacaaaaagggaccacatttttcaagtatttctaagtataaaaaacaaaacaaaaatctcttaggaaatgtctagacctccattcttggattccctttctttccttttattttaaaaaagaacagtacccctcttttaagatgctgtcttacattaatgagcatctaatggaaagaaggtatgagttgcactgaggattagaatagtggtgcgttagtggcattatctataaatacactcacctaaattgaaagctaagaaggaaatgtaaatataatatatatttatatttgatgtaatatggacatctgcagattctaataaacaaggactattgctgatagtaggctgtgacatactgtcttgtgaaatggtttccttgacaaaatttaagctgagcttaaaagcaaaaaacaaaaagtacacagaaatatttattaaaatgtaatacagtttattgaactttctaggtatggagtttgatggacagggctgcctttaatgagtgtgaaggtcactaagtcacttagacatctcaccgtggaagtttgtgagcctgcattaggagatagactgattaccatacatgacataaaaaggaacagtggatagctcatactttatggtggttcttctcctccgaaataatatactgcagaaatcccagacagagctccttacaaacctttaattgtaatatatttttgatgattattcacattgaatgcacagaccaagaattcagtgaatgtcattttttaaaaaactaatttgtattgtctgctctagtgatacaagttttactagtgataaactattttaatcaaccatactattcttatggaaaaaatatctattttggcaggtttctgtgcctttatttccctcttctgaaaaaaagtctgtgttttcatagtttggtttgcattgtatatcaataattaatcaggaatgggttttggtgcctgaaaaattggccatggaggcacaccaaagcttcaagcacaagtcttgtacatgggccatcactgtctggtttcacttcgtgtgtttcctaaacacatttagctgcttttttaacaaactcagccccatacttgagtcccttgttgttgggagcatttccaggcatcttttaagggaactgtgacaaacagcctcgggcagatgaacacggaggctctctgttgtctgtctctgagatctttgtgtctgggaatgcctaaagattttatttttttttctttgtttttattttattttattttatttttttgagacagagtctcaccctgttgcccaggctggagtgcaatggtgcgatcttggctcactgcaacctccacctcccagttcaagtgattcccctgcctcagcctcccgagtagctaggactacaggcgcatgtcaccaagcccggctaatttttgtatttttagtagaaacggggtttcaccatgttggccaggatgatcctcaatctcctgacctcgtgatccacccgccttggcctcccaaagtgcgggattacaagcgtgaaccaccctgcccagccagaaactagattttctttatgcctccaccccttcttattcatttactttacaataccaaaataacaaattgcataggagtgtgggatgtggtttctgccttctagagagagatcagaattaaactagtactatgaaatgtccttttgaatgttaggtcaagaaatccatgtacagagtcgtgcacttcattggctgtaactgtcaaacttgccttgtattagaagttaaatcccatcgtaaatacatcacgaggccagctgtgtgatttctgagacctagatgagagtccatttacttcagcctttgattcagtaaatgttaagcagcagaagacttcgaatggttgaaattcattgttacaggatttaactcataaaccaatgagagattttttttttctctgcaatggttgctaagtctattccatgttaacactgtggaaataaatatgaagatgtggaaaaaaaaaaaaaaaaaaaaaaaa

SEQ ID NO: 24736 - DNA, 4592 bp, Homo Sapiens
cgggggagtcgctgttgctgaggctgtcgcctgaggtttttcgcgctcctccctttcctcctcctctttctcctcctccttatccgaaccccagtcagaccgatctgctctgctctcggtgaccttgcaacttcatggatgacgacaaaccttttcaaccaaaaaacatttcaaaaatggcagaactctttatggaatgtgaagaagaagagctagagccatggcagaagaaagtagaagaaactcaggatgaggatgacgatgaactgatctttgttggagagatatcaagttcaaaaccagccatttcaaatattttgaacagaggccactccagctcatcttcaaaaggaataaagagtgagccacacagtccaggtattcctgaaatattcaggactgcaagtcaacgctgcagagacccaccatcaaatccagtggctgcctcgcctagatttcatcttgtatctaaatcttcacaaagctctgttactgttgagaatgcgtctaaacctgattttacaaagaattcacaagttggatcggataattcttcaattttactgtttgactcgacccaggaatcactaccaccatcccaagacataccagcaatttttagagaaggtatgaaaaatacttcatatgtgttgaaacatccttctacttctaaagtaaacagtgttactccaaaaaaaccaaagaccagtgaagatgttcctcagataaatccctccacttcattgcctttaattggctctcctccagtgacatcctcccaagttatgctgtcaaaaggtacaaatacctcatctccatatgatgctggagcagattacctaagagcttgtccaaagtgcaatgttcagttcaatcttttggatcctttgaaataccacatgaagcattgttgtccagacatgataactaaatttttgggagtaattgttaaatcagaacgtccatgtgatgaagacaagactgattcagagacaggaaagttgatcatgttagtcaatgagttttattatggaaggcatgaaggagtcactgagaaagagccaaagacttacacaacctttaaatgcttcagttgctcgaaagttcttaaaaataatattaggtttatgaaccacatgaaacatcacttggaacttgagaagcagaacaatgaaagctgggaaaaccacaccacctgccagcactgttaccggcaatatcccacacccttccaactgcagtgccacattgagagtacacacactccccatgagttttctactatttgcaaaatctgtgaattatcatttgaaacagagcatattcttttacaacatatgaaggacacccataaacctggtgaaatgccatatgtttgccaggtttgccagtttagatcatcaacattttctgatgtagaagctcattttagagcagcccatgaaaacactaagaacttgctatgtccattttgcctcaaagttagtaaaatggcaaccccctacatgaatcattacatgaagcatcagaaaaaaggagttcatcgttgcccaaaatgcagactacaatttttgaccagcaaggagaaagctgaacataaggcgcagcatcgtacatttataaagcctaaagaactagaaggattgcctcctggagcaaaagttactattcgagcttcacttggacctctccagtcaaaattaccaactgcacctttcggttgcgctccaggcacttcttttcttcaggtcacacctccgacatctcaaaatacaactgctagaaatcctagaaaatctaatgccagtagatctaagacaagtaagcttcatgcaactacatccactgcaagtaaagttaatacaagtaagccaaggggacgtatagctaagtccaaagcaaaaccctcttacaagcaaaagcgacagcgcaacagaaaaaataaaatgagccttgctttgaagaacataaggtgtcgtcggggcattcacaagtgcattgaatgtcattccaaaataaaagattttgcaagccacttttctatatacatccactgcagtttttgcaagtacaatactaactgtaacaaagcctttgtaaatcatatgatgagctctcatagcaaccatccaggtaaacggttttgtattttcaagaagcattcaggaactctcaggggcattactctagtgtgccttaaatgtgatttcctagctgattcttccggcttagatcgtatggctaaacacttaagtcaacgtaaaactcatacttgccaagttataatagagaatgtttccaaaagtacctcaacttctgaacccactactggctgctcattgaaatagattcctgctccatggagttcatgcaacctggtgcaagacaagttggaagttcctaagttcaaagttctgaagtattttctcacacaaagggcagttaaacagccaagtttatgacactagctctcattattcagctcttttcagctttcagatgccactacattgttattccaccttatctttgtgtcaggttaacatatcttaacatatttttttctccagttggctctctccaaaaatgccttttgtttttctctgctatacttgacttgccttcagaatattacattccagataatatgactgttcatctttttctgtctgttttgtctgctttcttaatttcttataagtcttacatgtttaggtcagataaccattttttcttcattccttgttcattactgttctatttttcatatttttcaaatgaagaagcaacacataagtttcaaaaaatatccagggtactcctggacagtgtccccttttgatggacacaactgatacctgttctttctttccaagaaatgtgaattatttgactgtgagacgtcctctagtttgtggccttcagaaatcagatcttggggagagtcccttcctacctgactgacctcccataaggctgatgctgatttggccagagatgacctcaaggcccaccaaatagagcacaacttcccattgggagctttggcttttgatcttaagcttatgggtcgattctaaccaagaaaagtccatgagatcagtgcttcaacatccaggttgacgtttaaccattttggctgctgctctttaattttcctctagcaggcatgcagtccaaggaatatcaaaattctgattgtatgggaaccaaggttactttcttgttcttggataaagaaaatttctacaattacagttcccaaagacacagttgttcatgttatttaaagttttatccagtattctaggaattttcagcaatactaatattctcatttttaaacattttttacattttattttgttttattttggtagcttggttttatattgtttttagatcagtgcttcaacatccaggctgacgtttagccattttggctgctgttctttaatcttcctctaacaggcatgcagtccaaggaatatcaaaaattctggttgtattgggaaccaaggttactttcttgtttttggaaaaacaaaatttctacaattacagttcccaaagtcagttattcatgttttcatttaaagttttatccaatattctaggaattttcagcaatactgatattcactttattttttttctttttttaagacagagtcttgctctgtcacccaggctggagtgcagtggcgcgatcttggctcactgcaagctccgcctcctgggttcatgccattctcctgcctcagtctcccaagtacctgggatgacaggcgcctgccaccacgcccggctaatttttaattttttgtatttttagtagagacagggtttcaccatgttagccaggatggtctcgatctcctgacgtcgtgatcagtccgcctcgtcctcccaaagtgctgggattacaggtgtgagccactgcacccgaccgatactcacatttttaaactttttttttaattttattttggtagctaggttttatattgttcttaaatttattttactctattttatttttccatcacttctttgtcccagattcatgaaatttgctgatgtccattttatgtctacttttgaactcttctctttgtgtttgttttgttcttattacaaactccaagacatttcttagaattgtctacagatttcgtgtagctacttattggtagcttcttaatttcatacttgtccagaccattagacattattacatgctctgtcttgggcctatcattaacattagcttagggattctgatttcaaagacataaagaattggcaaaactcttcttacagaacttaaaacaagttttaaagttacatttctatacatctaatacataataccttcttagccattaatgtaattcctctggataaagataatatattcaaaaaatattgggaccaaaaaatgcacttgtttcttgctcatatatatatagatgtatattttttttaatttcttgtttgtttattttggttacattgaatacagatttgctgaacagttttgatgttatttttttaataaaatttgtattgttaaagtgccaaaaaaaaaa

SEQ ID NO: 24737 - DNA, 3053 bp, Homo Sapiens
atctggtaaaacctaaatatgacctggatagaacagatccattagaaaataattatactccagtctcttcggtacctagtatttcatctggccactaccctgtacctactttgagcagcactattacagtaattgctcctactcatcatggaaacaacactaccgaaagttggtctgaatttcatgaagaccaagtggaccataactcttacgtaagaccacccatgccaaagaaacggtgtagagactatgatgaaaagggtttttgtatgagaggagacatgtgtccttttgatcatggaagtgatccagtagttgtagaagatgtgaatcttcctggtatgctgcctttcccagcacagcctcctgttgttgaaggaccacctcctcctggactccccccacctccaccaattcttacacccccacctgtgaatctcaggcccccagtgccaccgccaggtccattgccacccagtctcccacctgttacaggaccaccacctccacttcctcctttgcagccatctggcatggatgctcctccaaactctgcaaccagttctgttcctactgtagtaacaactggcattcatcaccagcctcctcctgctccaccctctctttttactgcagatacatatgacacagatggctacaatcctgaagccccaagcataacaaacacttccagacctatgtatagacacagagtgcatgcacaaaggcccaacttgataggactaacatcaggggatatggatttgccacccagagaaaagcctcccaataaaagcagtatgaggatagtagtggactcagaatcaaggaaaagaaccattggttctggagagcctggagttcctacaaagaagacttggtttgataaaccaaattttaatagaacaaacagcccaggctttcagaagaaggttcaatttggaaatgaaaataccaagcttgaacttagaaaagttcctccagaattaaataatatcagcaaacttaatgaacattttagtcgatttggaaccttggttaacttacaggttgcttataatggtgatcctgaaggtgccctaatccaatttgcaacatacgaagaagcaaagaaagcaatatcaagtacggaagcagtattaaacaatcgctttattaaggtttattggcacagagaaggaagcacccaacagttacaaactacttctccaaaggtaatgcagcctttagtccagcagcccattttgcctgttgtgaagcagtcagtcaaagagcggctgggtccagtaccttcaagtactattgaacctgcagaagcccagagtgcctcttcagaccttcctcagaatgtaactaagttatctgtgaaggacaggttgggttttgtatcaaagccatctgtttcagcaactgaaaaggtgttgtctacatctactggcctaacaaaaacagtgtataatccagctgctttgaaggctgcacagaaaaccttacttgtttccacctctgcagttgataataatgaagcacagaaaaaaaaacaggaggcattgaaacttcagcaggatgtaaggaaaaggaaacaagaaattttagaaaagcacattgaaacacagaagatgttaatttcaaaactggagaaaaacaaaacaatgaagtctgaagataaagcagaaataatgaaaactttagaggttttgacaaaaaatattaccaagttgaaagatgaggtcaaagctgcttctcctggacgctgtcttccaaaaagtataaaaaccaagactcagatgcagaaggaattacttgacacagaactggatttatataagaagatgcaggctggagaagaagtcactgaacttaggagaaagtatacagaattacagctggaagctgccaaacgagggattctttcatctggtcggggcagaggaattcattcaagaggtcgaggtgcagttcatggctgaggcagggggcgagggcgagggcgaggtgtgcctggtcatgctgtggtggatcaccgtcccagggcattggagatttctgcatttacggagagcgatagagaagatcttcttcctcattttgcgcaatatggtgaaattgaagattgtcagattgatgattcctcacttcatgcagtaattacattcaagacaagagcagaagctgaagcagctgcagttcatggagctcgtttcaaagggcaagatctaaaactggcatggaataaaccagtaactaatatttcagctgttgaaacagaagaagttgagcctgatgaagaagaatttcaggaagagtctttggtggatgactcattacttcaagatgatgatgaagaagaagaggacaatgaatctcgttcttggagaagatgatttgactgatcattgatctacatatgctagaactctacctgtgtttcattagtattatctaatgtacttttacatatttgtaaaaacaatttttggtaaaatgtgatgaagatggatttcacaaatagacaaaaaagaagaaaactaccttctgatcttgtattttgaaagattgatgtttgcattttacttcagtaaacaattgctaaagacatcacactagaaacatatgcaatgtttttattacatacttctactggacatcacagaattctttgggttctttgtaatttaatgaataggtctgaaaacttatgaccaatacttgttataacttagaggactttgttttattccaaataaggaatgaatttgcatttaaaatcttaatgaatgttttcaaaactgaatagataacatagtactctaactaaagtctccaagttatgtattataatattacatagtagtatgcttaggctttactatgtattagccttttgttggactgtgtatgtattttaccatatgggttttaatgataatggtgtatgactgctttacatgagtccttatgcatccagatgttataataaagtggaatggtctctttaaaaaaaaaaaaggaaagaaaagagaaaagcaatgacgaaaaaaaaaaaaaaaaaa

SEQ ID NO: 24738 - DNA, 3759 bp, Homo Sapiens
gggcgcgagccaggctgcacgattcactgcgtgctgtcctcacttgttctacaatgagtgccaaatctgctatcagcaaggaaatttttgcacctcttgatgaaaggatgctgggagctgtccaagtcaagaggaggacaaagaaaaagattcctttcttggcaactggaggtcaaggcgaatatttaacttatatctgcctgtcagtgacaaacaagaaacccacacaggcgtccatcacaaaggtcaaacagtttgaaggctccacatcatttgttcggagatcacagtggatgctcgagcagcttcgccaggttaatggtatcgatcctaatggggattcggcagagtttgatttgttgtttgaaaatgcttttgaccagtgggtagccagcacagcgtcagaaaaatgcaccttcttccagatcctccaccatacctgccagaggtacctcacggacaggaagccagagtttattaactgccaatccaaaattatgggaggaaacagcatcctccattcagctgctgacagcgtgaccagcgcagtgcagaaggcaagccaggccttgaatgagcgtggagagcgattaggccgagcagaggagaagacagaagacctgaagaacagcgcccagcagtttgcagaaactgcgcacaagcttgccatgaagcacaaatgttgagaaactgcctatcctggtgactcttcttaagagaaactgaagagtttgttcagcagtttttacaagaattcgggacctccgcttgcttctttttttccaatatttggacacttagagtggtttttgttttttcttttcagatgttaatgtgaaagaaagggtgttgcatttttacatttccctaatgatcttgctaataaatgctacaatagcatcagcttcattttgggtttttgcctcctcccactgtgtgtatgtgtgtatatgtatgttttgaatatgttttctttattaaaaaatattttttgtagtttgaatatgaaatttggaccaaatgataaactgcgctgagtctaaactggctacatgtatttttttctctgatattaagcaggaaggcattttaatgtggtgacatcagatgttatttttcctagatgaaaataaaagtcaagcagtgattagtttcactcactgtcctagctacacttaatttgaagattaaaattctacattgtggaaaacaattgaatttattgggaaaaacagcagtcttagattttgctccttgcatagtaatcttttgcatgaaccatcaccagcgttcaaaaaaaaaaaaaaaaatcagaatcgcagatagaaatctctttcctgagttacagtttaaatactcttgctacttgtatccagggtgtttacttggaattatcatatgaagggtaaaaatttgagagtaaagccctaaagaaaagcctacctaaaaccctctgtgtactcacagatgtttctcttgtcactgtcatagtgatggtcgctggtatggaaaagtgcttatatttttatcaaaaaattgatttgtccaggtaaaggtctgtgtcaatgataatgtgaacaagtagtacatttaaaatgtttgtcttgtctttttacagtcatgcctattttagagacaccttcataatgtccttgggagagggcctttagtttcttggtatctggattttggaggttttgatgttgtttttgctatctatttatttaatgtaatttaatatgtgagtttcttgacaaattgcatttcatggcaattgcaccttgcctggtctgatataaaacaccacaatcacaaacctttacattgcagtcagtttcaatacagttggtcacacacctcgtgattttctattactcaagataataaggggcttagggtctagaagttctgtttcctagagggttaaaatgctaaacataaaaaaagctgtgctttttttgtgaaactaggagacaagctgcacatctcagacacattgtaagcctaccactgcagcgcattgatttttaagctgcctgaatcttcaggacccctatctattccatcctatccattttgctgattgagtcgatatgtattgcagcctcttacataggagcataagatgacttttggattgttaatactgatttaaatagctgaagttctcctaataaagcattcccaaggagagagaaagtttgtctactgggggtaaaaatatcagatggtgcacattaaaagggagatgagatttgtcggagacagatttcagaatccttttagatgatccaattcaagaaaaccctctataaaatttaataaactgtataagttaactataatattttatactttctttttggtgtcttaaaaatttaaagaagcgaggaacatgccatttggtgagtaccgttggaagctattttaatttctaggaaaagccccaaatatcactccaaatagattttgtttgcagatctcagttcagaatgcacacacacacacacacacacacacacacacacacacacacacacagagatgtatttatctttccaaattggattctggtttcagagatagagagttggtataaataattgaaaggataaatctaaaaccccctgacagtccgccaaattcaagaacagaagtggttgccaactctctaacaacaatgtttgggaagctgattccaaagtagctgaggatgaggtcataagcatactgtgaaacccaagattcttcttccctggtagaattacaatagttactcttgataaatataagtattccatgtcttgccctctttcctcactctctgcttatccttttagacctaagtttcattggaaatagcctgaattagaagaaagcccatccgaatctttattagccccctctaatgattagtttccaggctgcgttcatacctttgacctctcagtgtcaaagtcctacctaggcctccccacaacagagagggccgtaacagcaatccctgcccctcctttacctcccagcctcttgcagaggagcccagtgataacacatgtgaagttctttgctgtcctcttgtagaaggtgctgcagtgcaaagtattaatacggtcttagacaaaataactgtcatgatttgggaccagtttggttgagcttgtcagaagacatttcatttgtttcatttctgcacttctctatgaattttgggatactatatttctgtgaaggacttattgtatagacaactcaaaaaggaaagaaactttccagtattaccacttcttcctggaatatagctgtagtatttctcactagtattattagatacctgtgtacagaaagtatgcagttattcaggttaatgtttcatattaaagaatgtatttgtaaaatgtaacatgatcagtagttaccttttttcaagctctgaagaagttcagattacgtgttagacttaagttacagtgaaaactgttttaatactacttttgtggctagcaaaggttgtgcatctatttaaaattatttacaggatgctctaaataaggggcattaaagataggtttagctcttaattttagaaattgtgacactactgatgtctgtcatacagttattcttcagaagttctctgagatgtcaaatataatttttgtttaattcagagataagtaacacctgctctattgattcactattacaacaaaccctaattttgtcattaaatattttaactctgcaaaaaaaaaaaaa

SEQ ID NO: 24739 - DNA, 2993 bp, Homo Sapiens
gtggtggtcggcgtggctgaggtgagaaactggcgctgctgctgcctcggcagcacctgttggtggcggagcctcgtgctggtctgcgtgttggccgccctgtgcttcgcttccctggccctggtccgccgctaccttcaccacctcctgctgtgggtggagagccttgactcgctgctgggggtcctgctcttcgtcgtgggcttcatcgtggtctctttcccctgcggctggggctacatcgtgctcaacgtggccgctggctacctgtacggcttcgtgctgggcatgggtctgatgatggtgggcgtcctcatcggcaccttcatcgcccatgtggtctgcaagcggctcctcaccgcctgggtggccgccaggatccagagcagcgagaagctgagcgcggttattcgcgtagtggagggaggaagcggcctgaaagtggtggcgctggccagactgacacccataccttttgggcttcagaatgcagtgttttcgattactgatctctcattacccaactatctgatggcatcttcggttggactgcttcctacccagcttctgaattcttacttgggtaccaccctgcggacaatggaagatgtcattgcagaacagagtgttagtggatattttgttttttgtttacagattattataagtataggcctcatgttttatgtagttcatcgagctcaagtggaattgaatgcagctattgtagcttgtgaaatggaactgaaatcttctctggttaaaggcaatcaaccaaataccagtggctcttcattctacaacaagaggaccctaacattttctggaggtggaatcaatgttgtatgattctaatgagatacgtgattgtcaagagcctagtgtgctatctaaggtctagcagtcacttcactagtgggcagagacaagttctaattgtattacagcacaaacaaaactgactagtttttaaattgcacaatttttttttttaaagcaagaatcattttctgggtatgtaagtgtaaatgtagatgcaaatttggctgcacctctttatcatgcctgtattggcctataggtctgacatttagtgttttttaattgttttatttctgtgtatttacgaacagagaaataacccaaatattatttctgcttagtgtctttatttataaagcccatgagtagtttgtatgcatctttcctacttgtaaagatgagtaaaagtatgcagttttaaatttataatattattggatgttctttgctttggtagtctttccagaaaggataaacagtggtttttgttttgttttgttttattgtttaagtgggaccacttagcttcccgtttccttactagttaaagaacagacattaattttcagttgaatgtatttttgcaggcatcatattgttacagggccatttacacctattcacaaagcttaaatcctaccttgtgggactgaagtgctcttaatataactgtttattttcactgtgtaatatgcaaagcaaaagggaaattatttggtggatggtagctcaaaattggaactcttgttctaattcagttacattggctttaccctccttagatttttcatcaaagggctgtcccattgcaatcttactaaaacattttgttaaaataaactcttttcctttttatattaataattaggcttttaaataaagatgttattcctttaaaatggtgggcttaccatcattgaagatgtcactcaggtggccttgtttgatcaaaacgccttttttaaaaaccaagctttaaaaacatgtttataatttcatgaagtacatatatattgttcccatagtcttcagctttaaaactataaatatgcccaaattttgttatttgccctactttaagtaggtttattgtgtttgttttttcagtacttgtttttctctgataagactcaggaattctgaaatgtgaaattgtctcaattctttctcttgtagcatgaatcaaatgtatttattaatagcacttatgactatagaatataatttggcatatgattcatattacatatgtattcattttatttttaaaatagtttataaacttaatgatttttttttacaaatgaggttatagatattaatgcaaattttctggtaggtatctctttttttgctatgatgattccaacttatcagagacctcccatttgccttttcattacggtgaaagctttgccctcatctactaaagtacaaaggaattctttggaagcagattattctagtcttatgctagagatgaatttgatcattttaatgtgtgatctttttgctctatcaggtataattgttttcctttcctttataatgcgtaagttttctcacctttgagtaacagtaaagttcatttatatgtccatacctagaagaccagtgcaaatactttgagagcacctgggtctacaggacataattggcatctaaatcctcatttcttgctattagtaggaaaacagatatagtattgtaatacccttattctttttgaatcctaattactcatttcggttttttttctctcttttgaatctagttgctggttttcgtttaatgattttagtttaacaatcccaaccaacaatacatttgatttatttttttctgtctaacctgacaacctttttcttgtgcttcttgtttgttggttagtttttgtgaaaggaatcattgtttaagatcactgttttcatacttgttttacacttcacgtattttgaagtacatttatttactaagcatttgtgacttgaataatttcaccaaatgaatacattttggtagtttgtaatgagttcttctaattgttacactttgcttggtacttaacaataaatatgtaaaggtaaaagaaataattttctgtattctgccaatcttaattttatataataaatcatccatttttttcttaagaaaaaaaaaaaaaaaaa

SEQ ID NO: 24740 - DNA, 4063 bp, Homo Sapiens
tttaaaggacctgaccgagagctgcgaacagtcagacagacgatgattgacttcctgcagaaccacacggaaggaagccggccccctgcctgcccgcgcctagaccccattcagcccagtgatgttctttcccttcttgacaaccgtggcagccattacgtggctattgtctttgaaagcaacagctcctaccttggacgggaggtgatcttagacctgatcccgtatgaaagcatcgtggtgacccgagcactggacggggacaaagcatttctggagaaacttggtgtttcttcagtcccttcgtgttacctgatctacccaaatgggtcgcatggattgattaacgtcgtgaagcctctgcgggccttcttttcgtcttatttgaagtcattgccggatgtgaggaaaaaatcgcttcccttgcctgaaaagccacacaaagaagaaaattcagaaatcgtggtttggagagaatttgacaagtcgaagctgtacacggtggacctggagtcagggctacactacctcctgcgggtggagctggcagcccacaagtccctggccggagcagagctgaagacgctcaaggactttgtgactgtcttggccaagctgttccctggacggccgccagtcaagaagctgttggagatgctgcaggagtggctggccagccttcccctggacaggatcccctacaacgccgtgcttgacctggtcaacaacaagatgcggatttctggaatattccttactaatcacataaagtgggttggatgtcaaggaagccgatctgagttgaggggttacccgtgttctctctggaaactgttccacactttgactgttgaagcctcgacccacccagatgcactggttggcacaggctttgaagacgacccccaggctgtgctgcagacaatgaggaggtacgttcacaccttctttgggtgtaaggaatgtggtgagcactttgaggaaatggctaaagaatccatggactcggtgaaaaccccagaccaagccatcctctggctgtggaagaagcataatatggtgaacggccgcctggcaggccatctgagtgaggatccccggtttccaaagcttcagtggcccactccggacctctgcccagcctgccatgaggaaattaagggcctggccagctgggatgaaggccacgtgctcacattcttgaagcagcactatggccgcgacaacctcttagacacgtattccgcagaccagggggattccagtgaaggaggaaccctggccaggggtgaggaagaggagaaaagactcactcccccagaggtgtcccatggagaccgagacacccagagcgtccgtccacctggtgcactgggccccaggcctgcccttccagagagcttgcatcacagcttggacgggaaactccagagtctggatgggcccggggcccacaaggaggtgggcggggccgcacccttcctcggggttgacttctccagcctggacatgagtctctgtgtcgtgctgtacgtggcttcatccctgttcctcatggtgatgtacttcttcttccgggtgaggtccaggcggtggaaggtcaagcaccaccacccggccgtgtgagtgcccgggtgctgccagccacggcggaagctcccttggaggcagccctgccccgtgccacctgcagctttaatatttatgatcagggattttataaacatgcgggcctggtttcacatcggatggcaccttttggcttcaaagtcctggttttacaaacgctcttctaacaagggaagaacacggggtaattttgtggggatatttgcattcctggcgtactcaagtctgttcatgctccttttgcaggtcttacagcaaaaagacttctgtatttttactcttctagatgtgaaaagagggtgcagagtccaggccagatagtcttccccacacactttcatctcgtttcctccactccgccccatcctgcagggccttgtttttgtatttggagaacctcgcccatcccccccgcggctcctggctcccccccccccaccttggccctccctgcaccctccactcccctcgctcccccctccccccgctccccccacgccccctgctccaggctgccaagtgttttcctttagccgggcggggacagacagagccggaagcgcagtcggcctctgcagcccctccaagcaagtgctccagggactatcctgtgtttgtagctgcttccctagggcaggttcctgagggctctccttgttcctccgggtgttcgacaccagacgtggggatttcaacaggggaggagccaaggaattctgtggctgtgctgcgtttcagaaaataacccccagaggccttgggctgtggacctgggggttggaaggatgggggctcatttaaccctcagaggcagcgcctttgtctgtctatctggtgacaagagagagacaagtaaatgggggccgttgggacggcgggtgcctggagggcagctctgggctcagcgggcagtgcttagagcacaggcccctctgttgggggatggggaggagagcagtctgcccttgggagcgtaggccccagggagacttctaaagccccccctgtcgtctgctcttcacccagcaccacagaggcacctgctgcacacacaagcatctcactcggcccacggagggggccaggcttcctttgcctgaagctgttttgggaagggtctccacacaggcactgatctcccaagctttggtcatgatgtcttttaccatttgataattttaaacattgtttttaaacccaaaacatttagtggtccgttgcctctgaagatgtaaacaaacaaatacactatttctgggaacatttatattgagattctttgtggctattggtgtgtctcacaggcaaaatttgatttggctaaaataggctcagatgtatttgtgtgcccgtgtgtgtgtgtgtgtgtgtgtgtgtgtgtgtatgagagagagagagactttgacggttgtagatattttttccgctttgcctactttatgttgtataatcatgtgtttactaacaagttgatgacatggatgtattcataagaccatgtaatattgatgtgattgttgccgcttgagaaaaaaaggcaacagctgattctttcaacaactgtcacagaatggctgggctgagaacgctgcccagggccctgcagctggcgggagaggtgtctggtgggagcggtgtctggtgcgtcagcctgctgcttcgtgtctcactcgagagttgcttctggtttcacactttttaacccctctgtgctttagcagccgtgaccttgccttcattgcttcatccagtgcaggcctgggttattgaagacaccaaagtgtttctcttccagtttgaaaaccaggcaggtttacacgtgggtttcagtgtatttgcctttgaacccttcaaactaaactttagccttttggctggtgttgaatgtctttagctggggtgacctggagtgacctgggacggtgttgtggtttaccgtctccagcttcagcctttccagaaacccttgtggagggcagtgttggctgcaggtttcatcatattgcagtttgaggtcaccactatttggggaacaagcttgcgtcctgctgaggggcaggattttcagcagagcgtcggtggggctgggccgtcgtggaggtggccccaggagtcatatggccatactcagacacaccttgtgtggcctgctcagagctggatgccacctttaggcaatgtttagagtctattttctaaagttttaagtattttaagaggtattgagactaatgaatataatagttcagtaatttaaatgcttatttattttcagtggaaggatttttattaaaaagaagctaattgacatggaaatgtcagtgaaatttcttacctgcaaggaaagtgaacattttgtatttaagtaaactataatgtgcacattttaataaagaaatctgacatttgaaaaaaaaaaaaaaaaaaaaaaaaa

SEQ ID NO: 24741 - DNA, 2753 bp, Homo Sapiens
cttcggggccttatcttcttatctatccacagctccaccttgtacgcactcctgaaggccatggtgaggttcggttgcatcttggctttaggctgagaattgggaaaagatcccaaatctcaaagtatcgtgaaagagatagacccgtcatacggagaagccctatatcaccatcacaaaggaaagctaaaatctatactcaagcttccaagagtcctacttccacaatagatttgcagtctgggccttcccagtcccctgctcctgtacaagtctacatcaggcgaggacaacgcagcaggcctgacttagtagaaaagacaaaaactagagcacctgggcactatgaattcactcaagttcacaacctaccagagagtgactctgaaagcactcagaatgaaaaacgggctaaagtgagaaccaaaaagacctctgattcaaaatatccaatgaagagaatcaccaagcgacttagaaaacacagaaagttctacacaaacagtagaaccacaatagagagtccttctagggaattagcagcccatttaagaaggaagaggattggagcaactcagacaagtactgcctctttaaaaagacaacctaagaaaccttcccaacccaagttcatgcaactgctttttcagagcctaaagcgggcattccaaacagcacacagagttatagcttctgttgggcggaagcctgtggacgggacaaggccagacaatttgtgggcaagcaaaaactattatccaaaacaaaatgccagggactattgcttaccaagcagtatcaaaagagacaagaggtcagctgacaagctaacgccagcaggctcaaccattaagcaggaggacatattgtggggaggaacggtccagtgcagatcagctcaacagccaagaagagcttactctttccaacccagacctcttcgactgcccaagcccacagattcccaaagtggtattgctttccaaactgcctcagtggggcagcctctgagaactgttcaaaaggacagtagtagcagatcaaagaaaaacttctatagaaatgaaacctccagccaggagtctaagaacttgtccacaccaggaaccagagttcaggcccgaggaagaatcctacctggttcccctgtgaagagaacctggcaccgacatcttaaagacaaactcacacacaaggagcataaccaccccagcttctatagggagagaaccccacgcggtccttctgagagaacccgtcataacccctcttggagaaaccatcgcagtccctctgagagaagccaacgcagttccttggagagaagacatcacagtccctctcagaggagccactgcagtccctctaggaaaaaccattccagtccttctgagagaagctggcgcagtccgtctcagagaaatcactgcagtccccccgagaggagctgtcacagtctctctgaaaggggccttcacagtccctctcagaggagccatcgcggtccctctcagagaagacatcacagtccctcagagagaagccatcgcagtccctcagagagaagccatcgcagtccctctgagagaagacatcgcagtccctcccagaggagccatcgcggtccctcagagagaagccattgcagtccctctgagagaagacatcgcagtccctctcagaggagccatcgtggtccctctgagagaagacatcacagtccctctaagagaagccatcgcagtcccgctcggaggagccatcgcagtccctcagagagaagccatcacagtccctctgagagaagccatcacagtccctctgagagaagacatcacagtccctctgagagaagccattgcagtccctctgagagaagccattgcagtccctctgagagaagacatcgcagtccctctgagagaagacatcacagtccctcagagaaaagccatcacagtccctctgagagaagccatcacagtccctctgagagaagacgtcacagtcccttggagaggagccgtcacagtctcttggagaggagccatcgcagtccctctgagaggagatctcacaggtcctttgagaggagccatcgtaggatttctgagagaagtcacagtccctcagagaagagccacctcagtcccttggaaagaagccgttgcagtccctctgagaggagaggacacagttcctctgggaaaacctgtcacagtccctctgagagaagccatcgcagtccctccgggatgaggcaagggaggacctctgagaggagccatcgcagttcctgtgagagaacccgtcacagtccctctgagatgaggccagggaggccctctgggaggaaccattgcagtccctctgagaggagccgacgcagtccccttaaggagggactcaagtacagtttccctggagagaggcccagccatagtttgtctagagatttcaagaatcaaacaactctcctcgggaccacacataaaaatcccaaagcagggcaagtgtggaggcctgaagctactcgatgaggcgaggtccgcccctattattcattgtcctaagtcttcatcgtgctgcccttttccaggcttctttcctgctcagccactgcctccaattcctgcgcccccagcgtggaaaggcttccatttctctctaccgggggggaggcgggtgagaatgggtctgtaatttctctaagatgaataaaggggcactaaatgaaaaaaaaaaaaaaaaaa

SEQ ID NO: 24742 - DNA, 2306 bp, Homo Sapiens
agcggctgctgtaggcgccgacggagcgagcgggcgtgcggagcgggcgacagtggcgtgggatctgcctctctgcgagcagctgggagcggcggcggcggcgccatgagcgggggcaccccttacatcggcagcaagatcagcctcatctcccaggcggagatccgctacgagggcatcctctacaccatcgacaccgaaaactccaccgtagcccttgccaaagttcgatcctttggtacagaagacagaccgacagatcgtccaataccacctcgagatgaagtctttgaatacattatattccgtgggagtgacattaaagaccttactgtttgtgagccaccaaaaccacagtgttctttgcctcaagacccagctattgttcagtcctcactaggctcatcgacttcttcattccagtccatgggttcttatggacctttcggcaggatgcccacatacagtcagttcagtccgagttccttagttgggcagcagtttggtgctgttggtgttgctggaagctctttgacatcctttggaacagaaacatcaaacagtggtaccttaccccaaagtagtgcggttggttctgcctttacacaggatacaagatctctaaaaacacagttatctcaaggtcgctcaagccctcagttagaccctttgagaaaaagcccaaccatggaacaagcagtgcagaccgcctcagcccacttacctgctccagcagctgttgggagaaggagtcctgtatcaaccaggcctttgccatctgccagccaaaaggcaggagagaatcaggagcacaggcaagctgaagtacacaaagtttcaaggccagaaaatgagcaactcagaaatgataacaagagacaagtagctccaggtgctccttcagctccaaggagagggcgtgggggtcatcggggtggcaggggaagatttggtattcggcgagatgggccaatgaaatttgagaaagactttgactttgaaagtgcaaatgcacaattcaacaaggaagagattgacagagagtttcataataaacttaaattaaaagaagataaacttgagaaacaggagaagcctgtaaatggtgaagataaaggagactcaggagttgatacccaaaacagtgaaggaaatgccgatgaagaagatccacttggacctaattgctattatgacaaaactaaatccttctttgataatatttcttgtgatgacaatagagaacggagaccaacctgggctgaagaaagaagattaaatgctgaaacatttggaatcccacttcgtccaaaccgtggccgtgggggatacagaggcagaggaggtcttggtttccgtggtggcagagggcgtggtggtggcagaggtggtaccttcactgcccctcgaggatttcgcggtggattcagaggaggtcgtgggggccgggagtttgcggattttgaatataggaaaaccacagcttttggaccctaaaaggtctggattgatcgtactgctttctgaaagaaagacaacaaagttgctgcatagtctacaaacaagtctctgaaaataggtgaatttctagctcttcatggtcctgaacattgatttcagtctttgcaaagaatgaagaagtgaattcgctgtacatttgtcaccagcactgggtttttgttttttgtttgtttttccgcttaatttcaaagataaaatgcagttacttttgggggtggaaggctcatcttaaaacatgagcattaaatatatttggaatagcagaaggttaagtaatttcttatgtatagttaaactaaagcagtacttcagtgggacttaacaagtattttttcatcactgaaaggtttttttttttatcactaaattgtatttggcaattgcaagttgcctgcagatagggccgtgatactgtgttttgagccacagaaggttgtgtgtgtgtgtgtgtgtgtgtgtgtgtgtgtgtgtgtgtgtatgtgtgtgtctttttcctcctttcttttggggaatcctgtaatatgaggtagcttatttcgtcaattaattagggtgctggatggtagagaattttgtcagtcaactatgtacacacagtaaatactgtttcttaggcaaaggtaacttttttatatagttgtaaaattccattatattccattgccaaagaaacattaagaactttgtatagctgtataaaaagcaactaattttttaaagaataaacattttaaagtcagcaaaaaaaaaaaaaaaaaaaaaaaaaaagaaaaaaaaaaaaaaaa

SEQ ID NO: 24743 - DNA, 2799 bp, Homo Sapiens
cattttggaagctgctccacgtcaaagaatagagttgacctttgatgaacattattatatagaaccatcatttgagtgtcggtttgatcacttggaagttcgagatgggccatttggtttctctcctcttatagatcgttactgtggcgtgaaaagccctccattaattagatcaacagggagattcatgtggattaagtttagttctgatgaagagcttgaaggactgggatttcgagcaaaatattcatttattccagatccagactttacttacctaggaggtattttaaatcccattccagattgtcagttcgagctctcgggagctgatggaatagtgcgctctagtcaggtagaacaagaggagaaaacaaaaccaggccaagccgttgattgcatctggaccattaaagccactccaaaagctaagatttatttgaggttcctagattatcaaatggagcactcaaatgaatgcaagagaaacttcgttgcagtctatgatggaagcagttctattgaaaacctgaaggccaagttttgcagcactgtggccaatgatgtaatgcttaaaacaggaattggagtgattcgaatgtgggcagatgaaggtagtcggcttagcaggtttcgaatgctctttacttcctttgtggagcctccctgcacaagcagcactttcttttgccatagcaacatgtgcatcaataattctttagtctgtaatggtgtccaaaattgtgcatacccttgggatgaaaatcattgtaaagaaaagaaaaaagcaggagtatttgaacaaatcactaagactcatggaacaattattggcattacttcagggattgtcttggtccttctcattatttctattttagtacaagtgaaacagcctcgaaaaaaggtcatggcttgcaaaaccgcttttaataaaaccgggttccaagaagtgtttgatcctcctcattatgaactgttttcactaagggacaaagagatttctgcagacctggcagacttgtcggaagaattggacaactaccagaagatgcggcgctcctccaccgcctcccgctgcatccacgaccaccactgtgggtcgcaggcctccagcgtcaaacaaagcaggaccaacctcagttccatggaacttcctttccgaaatgactttgcacaaccacagccaatgaaaacatttaatagcaccttcaagaaaagtagttacactttcaaacagggacatgagtgccctgagcaggccctggaagaccgagtaatggaggagattccctgtgaaatttatgtcagggggcgagaagattctgcacaagcatccatatccattgacttctaatcttctgctaatggtgatgtgaattcttagggtgtgtacgtacgcagcctccagggcaccatactgtttccagcagccaacccttttctcccatcacaactacgaagaccttgatttaccgttaacctattgtatggtgatgtttttattctctcaggcagtctatatatgttaaaccaatcaaggaacttactctattcagtggaaacaataatcatctctattgcttggtgtcatttataggaagcactgccagttaaagagcattagaagaggtggttggatggagccaggctcaggctgcctcttcgttttagcaacaagaagactgctcttgactgataacagctctgtcaatattttgatgccacaataaacttgatttttctttacattccttttatttttcctttctctaaatttaatttgttttataagcctatcgttttaccatttcattttcttacataagtacaagtggttaatgtaccacatacttcagtataggcatttgttcttgagtgtgtcaaaatacagctagttactgtgccaattaagacccagttgtatttcacccatctgtttcttcttggctaatctctgtacttctgccttttaattactgggcccttattccttattttctgtgagaaataatagatgatatgatttattacctttcaattatatttttctcagttatactagaaaatttcataatcctgggatatatgtaccattgtcagctatgactaaaaatttgaaaaagataaaaatttctagcaagcctttgaagtttaccaagtatagtcacattcagtgacagcccattcattccagtaaagaatcatttcattcactttgggagaggcctataattacatttatttgcaatgtttctcttcgctagattgttacatagctcccattctgttggttttgcttacagcatatggtaaccaaggttagatgccagttaaaattccttagaaattggatgagccttgagattgcttcttaactgggacatgacatttttctagctcttatcaagaataacaacttccactttttttaaactgcacttttgacttttttatggtataaaaacaataatttataaacataaaagctcattgtgttttttagacttttgatattatttgatactgtacaaactttattaaatcaagatgaaagacctacaggacagattcctttcagtgttcacatcagtggctttgtatgcaaatatgctgtgttggacctggacgctataacttattgtaaagaccttggaaatgtggacataagctctttctttccttttgttactgtatttagtttgtgataaatttttcactgtgtgatatttatgctctaaatcactacacaaatcccatattaaaatatacattgtacctgaaaaaaaaaaaaaaaaa

SEQ ID NO: 24744 - DNA, 3062 bp, Homo Sapiens
ggggctcgccgggccggcgcctgcgggataccggggacctcctgctgcgcggggacggctcggtcggggcgcgggagcccgaggccgcggaacctgcaaccatggtcgtgccactagccagctcggaagcccagaccgtgcagtccctcggcttcgccatctaccgcgcgctggactgggggctggacgagagcgaggagcgcgaactcagccctcagctggagcggctcatcgacctcatggccaacaacgacagcgaggacagcggctgcggtgccgccgatgagggctacgggggtcccgaggaggaggaggaggccgagggcgtcccccgcagcgtgcgcacctttgcccaggccatgcggctgtgcgcggcgcggctgaccgacccccggggcgcacaggcgcattaccaggccgtgtgccgcgcgctcttcgtggagacgctggagctgcgggccttcctggccagggtccgggaggccaaggagacgctgcagaagcttcgggaggacgagccgcatctggagacgcctcgggcagagctggacagcctgggtcacacagactgggcccgactgtgggttcagctcatgcgggagctccgccgcggagtgaagctgaagaaggtgcaagagcaggagttcaaccccctccccaccgagttccagctcacgcccttcgagatgctgatgcaggacatccgggcccggaactacaagctgcgcaaggtcatggtggatggggacatcccgccccgggtgaagaaggacgctcacgagctcatcctggactttatccgctcacggcctccactgaagcaggtctctgagaggcggctgcgcccgttgccaccaaagcaaaggtccctgcatgagaagatcctggaggagatcaagcaggagcggaggctgcgcccggtgcggggcgagggctgggctgcccgcgggtttggctctctgccctgcatcctcaacgcctgctccggagatgccaagtccacctcctgcatcaacctgtcagtcacagatgctgggggcagcgcccagcgcccgcggccccgcgtgctgctcaaggcgcctaccttggctgaaatggaagagatgaatacatctgaggaagaagagtctccgtgtggggaggtgacgctgaaacgggaccgctccttctcagagcatgacctggcccagctccgaagtgaggtggcctctggcctgcagtcggccacccaccccccaggagggacggagccaccacggccccgagctggcagtgcgcatgtgtggaggcccggctcccgagaccagggtacctgtcccgcgagtgtctctgaccccagccaccccctactcagcaaccggggctcctcgggggacagacccgaggcctccatgacccccgatgccaaacacctgtggctggagttcagccaccccgtggagagcctggcgctgactgtggaagaggtgatggacgtgcgccgtgtgctggtgaaggccgagatggaaaagtttttgcagaacaaggagctcttcagcagtctgaagaaggggaagatttgctgctgctgccgggccaagttcccgctgttctcgtggccgcccagctgtctcttctgcaagagagccgtctgcacttcctgtagcataaagatgaagatgccttctaagaaatttggacacatccctgtctacacactgggctttgagagtcctcagagggtatcagctgccaaaaccgcgccaatccagagaagagacatctttcagtctctgcaagggccacagtggcagagcgtggaggaggcgttcccccacatctactcccacggctgtgtcctgaaggatgtctgcagtgagtgcaccagctttgtggcagacgtggtgcgttccagccgcaagagcgtggacgtcctcaacactacgccacgacgcagtcgccagacccaatccctctacatccctaacaccaggactcttgacttcaagtgacagccccaggtggccaggcctccaggaggcaccaggcaggccctgtatcaggctaggacgctctgagctgtgcatgtacatatatacatatatagatacatttataatatatacacacagtctatatatttatatacactgtttcctggccccagagctcatttgggttcaggcgcacttcaaaaccctccctgggggaggctgtttcttctcaggattccttgccagggaggaaggggagggaacagggtgggttttctcactgaagagagaaagcagaaggttctagatcctggcacagactgcatcccatgttcccatgctcttctccgtccccaggaatgcgaacggcagtttcccttccccagtggacgtctaggtggggacagggtatcttggctcccagctggaccagagtgccctgcttgcctctgctctccctttgtggggactcaggcagcagaggcatctgggaagtctctgagtaggcagggtcctcctgggaggcacccccacctgtttgaaaggtctggccaggcgtggtggttcaggcctgtaattccagcactttgggaggccgaggagggaggatcacctgaggtcaggagtttgagaccagcctggccaacatgatgaaatgttgtctctactgaaaatgcaaaaattagccaggtatagtggcaggaacctgtaatcccagctacaggggaggctgaggcaggagaatcgcttgaacccgggaggtgtaggttgcagtgagccgagattgcaccactgcactccagcctgggcgacagagcgagactctgtctcgaaaaaaaaaaaaggtccgtgccaagctgctccctgcccttgccctttccctttccctggggtccaaaccacatgtgtcctgcctctcctggccctaccacattctggtgctgtcctcactcgcccctggcccagaggctcctgaagatgctgggcggtcctggcacagggaggagcagctctgtaaatctgtgcacatggccactcttggcctaataaaggaggtctcacagtcaaaaagaaaaaaaaaaaaaaaaa

SEQ ID NO: 24745 - DNA, 3062 bp, Homo Sapiens; identical to SEQ ID NO: 24744

SEQ ID NO: 24746 - DNA, 2008 bp, Homo Sapiens
gcggacagccccgtgaacggcttgccaaaggggcgagagagtcggagtcggagccggagccgtgagcagagctactcgaggtccccatcccgatcagcgtctcctaagaggaggaaaagtgacagcggctccacatctggtgggtccaagtcgcagagccgctcccggagcaggagtgactccccaccgagacaggccccccgcagcgctccctacaaaggctctgagattcggggctcccggaagtccaaggactgcaagtacccccagaagccacacaagtctcggagccggagttcttcccgttctcgaagcaggtcacgggagcgggcggataatccgggaaaatacaagaagaaaagtcattactacagagatcagcgacgagagcgctcgaggtcgtatgaacgcacaggccgtcgctatgagcgggaccaccctgggcacagcaggcatcggaggtgaggcggggttgcagtgactggtggccgcaagcccttccctggggagtacctgatggctgccctttgacccccggtggctgccctttgacccccgggtgtgctctcagcgcaagtggtcctagaacaggattctttttggaaatgtctgtcgactggaccttggtggatttggaaatggaactgagggaccggtgacacgtgcttcagaccggtctggggtgcggcgcacacctgggcccgtgcagggctcagctcggcagcagctctgagggcagctcaatgaaaaagtgaatgcacacgcccttgttggcgtggcctggcatggcctggtgctatcggcagccgctctccactccccgactgatactcaattacgtgaagccaagaaagatgatttttagaacctttgcctatattaggttgtacttatgtacatattttgcagtgtttcacaggagaaagtggccttaactgccccttattctctctccacgttgtaaataaacatgtgtttaatacaagttaaagctatgtatgaaaactcagaacttgaatcccgtcagcttaaaacttgtgtagggaatcctgacttttaaaatgtgagggtatttggatctgtgttgaaagtcgtatatttttatctgtgcggtgctgagtgcaggccaccagctcctaaatagaggttccctatatgcgcgtatgacatggtgaataaacacaactctctccactcaggacatccggagcgttatggacgtggtaggtggtcgttctgtgtgcttgtgaaagtgtccaggcgtgtgcacagccagtgcgcccacttccgggctccttgctccctgctgtactgaagttttggattttgcatccaatcctgtgtgcctgcccttctgccgaaggcttgtgaggggcctgagtcctctgcccatcaggatgacaggctccttcctgcagggccataggagggaagctttggaaacacagaatgattccaaggtgctctcgttcctgagggggactggtttgtaacccatgacatctgtgggcgagagaggcagctgggagcaggacacttggagggtcaccccacgggggtggcacctgcactctgagtgccccccactgtcatcagctgcctcttaccgtggacacagttttggttttggggactagggggccccactcctggtggtaccgtttggacttactagggcagtgggacatataggccggggctagtgggataacggggagttacgcctgatgacttttttgatggaatcctgcattagatagctggtgggaccccccctcagaattggggaactgaggagactccagggagggtgtccttccagggagagcagctatgaggggccccctagcttcctgtgcctggaagtaagagaaccagtaaagggccatacacacctgtacccaagagaccgctctccatttgctttctttttttactaaataattgtaaaatattattatgacataaagaaccatttaaggccaaaaaaaaaaaaaaaagggcggcc

SEQ ID NO: 24747 - DNA, 4122 bp, Homo Sapiens
ctaaaacacctacagaatctttttgtaccaagattaacgacatacttctggccccaccaactgttcaaggtggcattgctgagaatctagcagagaagttgattggtgttctctttgaggtgtggttactagcttgtactcggtgcttcccaacacctccttattggaaaacagccaaggagatggtggctaactggaggcatcacccagcagtggtggagcagtggagcaaggtcatttgtgcactcacttccagattgctacgctttacatatggtccttcatttcctgcatttaaagttcccgatgaagatgccagtctgatccctccagaaatggataatgagtgtgttgcacagacatggtttcgctttttacacatgttaagtaatcctgtggatttgagtaacccagctattataagctctactcccaaatttcaggaacagttcttgaatgtgagcggaatgccgcaagaattgaatcagtattcctgccttaaacatctgcctcaaatattttttcgtgccatgcgtggaatcagctgtctggtggatgcattcttaggtatttctagaccccgatcagacagtgctcccccaacacccgtgaatagattaagtatgcctcaaagtgctgctgtcagtaccacccccccacataaccggaggcaccgggctgttactgtgaataaggccaccatgaagacaagcacagttagtactgctcatgcctctaaagttcagcaccagacgtcctccacctctcctctgtcaagtccaaatcagactagttcagaaccccggccactgcctgcccctcggagaccaaaggttaacagcatcttgaatctctttggatcatggttatttgatgcagcatttgttcactgtaaacttcataatgggataaacagagacagcagcatgactgccattacaacacaagctagcatggagtttcgacggaaagggtcacaaatgtccacagacaccatggtttccaatcctatgtttgatgcaagtgaatttcctgataactatgaagcaggaagagctgaggcttgtgggacactgtgtaggattttttgtagcaagaagactggagaagagattctgccagcttatttatccagattttacatgcttttaattcaaggtttgcagataaatgattatgtgtgccatcctgtcttggccagcgttattctaaactctcctcctttgttctgctgtgacttgaaagggattgatgttgtggttccttactttatttcagctcttgaaaccattttgcctgacagagaactctcaaaattcaaaagctatgtaaatccaacagaattgcgaagatcctccattaatatcctgctttctttgttgcccctccctcatcattttggcacagtcaaatctgaggtggtcctggaaggaaagtttagtaacgatgacagctcttcttatgataaaccaataacttttctgtccctgaagttgagacttgtgaatatattaataggtgccttgcaaactgaaacggaccccaacaacacccaaatgatattaggggcaatgttaaatattgttcaagattcagcacttttggaagccattggttgccagatggagatgggtggtggagaaaataacctgaagagtcatagtcgcaccaatagtggtattagttcagcaagtggtggaagcacggagcccacgactcccgatagtgagagacctgctcaagctctcttaagagattatgctcttaatacagattcagctgctgggctcctgattcgcagcattcatctcgtcacccaaagactcaactcccagtggcgccaagacatgagcatatcactggcagctctagagctcctctctggccttgcaaaggtaaaagtgatggttgactcaggagaccggaagcgagccatcagttctgtgtgcacctacattgtttatcagtgtagtcggccagctcctttacactccagggatctgcactccatgatagtggcagcttttcagtgtctctgtgtctggctgacagagcaccctgatatgcttgatgaaaaggactgccttaaggaagtactggagattgtggaactgggtatctcaggaagtaagtccaagaacaatgagcaagaggtcaagtacaaaggagataaggagccaaaccctgcatctatgagggtaaaggatgctgctgaagccaccctaacatgcattatgcagttgctcggcgcatttccttcacctagtggtcctgcctctccttgtagtcttgtgaatgagaccactttgattaaatactccaggctgccaaccataaacaagcatagtttccggtactttgtcttggataacagtgtcatcctggcaatgctggaacaacctcttggaaatgagcagaatgattttttcccctctgtcactgtgctggtccggggaatgtctggaagacttgcttgggcacaacagctttgtcttttacccagaggagcaaaagcaaatcagaagctttttgtacctgaacctcgcccagttcctaaaaatgacgttggatttaaatattctgtgaaacatcggccatttcctgaagaggtggacaagattccttttgtgaaagcagatctcagcattccagatttgcatgaaatagtcactgaagaattagaagagagacacgaaaaattaaggagtggcatggcccagcagattgcttatgaaatacaccttgagcaacagagtgaggaggaattgcagaagagaagttttcctgacccagttacggattgcaagcccccgcctcctgcccaggaattccaaacagcccgcctttttctctcacactttggatttttgtccttagaagcactgaaggaacctgcaaatagtcgtctacctcctcaccttattgcacttgattccacgatacctggattttttgatgacattgggtatctggatctcttgccatgtcgtccttttgacacagtttttattttctatatgaagccaggtcagaaaacgaaccaagagattttaaagaatgtggagtcttccagaactgttcagccacatttcctagaatttttgctttcccttggctggtcagtagatgtgggcagacaccctggttggactgggcatgtttctaccagttggtctattaattgttgtgatgatggtgaaggatctcaacaagaagaagtgatttcctctgaagatattggagctagcattttcaatggacagaagaaggtgctgtattatgctgatgcccttacagaaattgcttttgtggttccttctcctgtggagtccttaactgattcattggaaagtaacatctcggaccaagatagtgattcaaatatggatcttatgccaggaattctgaaacagccatccctgacacttgagcttttccccaatcatacagacaatcttaattcctcacagaggctcagtcccagttccagaatgaggaagctgcctcagggtcgccctgttcctccccttggacctgagacaagagtttctgtagtctgggtggaacgctatgatgatatagaaaactttcccctctcagagctgatgacagagatcagtactggtgtggaaactactgcaaatagtagcacttcactgagatctacaactcttgaaaaagaagttcctgtcatcttcatccaccctttaaacactggattattccggataaaaattcaaggagccactggaaaatttaatatggtcatccctcttgtggatgggatgattgtcagcaggcgagctcttggctttctggtgaggcagactgtaattaacatttgtagaagaaagagactggaaagtgactcctacagtcccccccatgtccgccggaaacagaaaatcaccgacattgtcaacaagtaccggaacaagcagctggagccagagttttatacttcacttttccaggaggttggactcaagaactgcagttcttagaccactgaatttctaagactgttgaactccagtttgggaactataacacagcagaacagtttgataggtgatcactgtaaaaataaaaacaaatcactcccaaaaaaaaaaaaaaaaa

SEQ ID NO: 24748 - DNA, 4122 bp, Homo Sapiens; identical to SEQ ID NO: 24747

SEQ ID NO: 24749 - DNA, 3856 bp, Homo Sapiens
caggagcggaaactggagcaggagaagctctccggtgtggtgaagagcgtccaccggcggctccgcaagaagtaccgagaagtgggagattttgataagatctggcgagaacactgtgaggatgaagaaactctttgtgaatatgccgttgcaatgaaaaatttggcagataatcattgggcaaaaacttgtgagggcgaaggtcgtattgaatggtgttgtagtgtatgcagagaatatttccaaaatggtgggaagagaaaagcacttgagaaagatgaaaaaagagctgtacttgccactaagaccactccagccttaaatatgcatgagtcttctcaacttgaaggtcatttaaccaacctcagctttacaaaccctgaatttataactgagttgctacaagcctcaggaaaaatcagattacttgatgttggcagctgctttaacccatttctgaagtttgaagaatttctaactgttggcatagatattgtacctgctgtagagagtgtctataaatgtgatttcctgaacttacagcttcagcaaccactccagcttgcacaggatgctatagatgcttttttgaagcagctgaaaaaccctattgattctcttcctggagagcttttccatgtggttgttttctctctccttctttcttattttccatctccttaccagcgatggatttgctgcaagaaagcccatgaactgttagtgttaaatggtttattactaatcatcacacctgattcctcccatcagaaccgtcatgctatgatgatgaaaagctggaagattgctatagagtccctgggctttaaacgcttcaagtactcaaaattttcacatatgcatctgatggcatttaggaaaatctctctaaaaaccacaagtgacttggttagtaggaactacccaggaatgttatatattcctcaagatttcaacagtatagaagatgaggaatattctaacccttcctgctatgttcgatcagatatagaagatgaacaactagcatatggtttcacagaactccctgatgcgccatatgactcagattctggagaaagtcaagccagctctattcctttctatgagctagaagaccccatattacttttaagttaatatagaagcaaaaagcccctttcagtccaggctcctaaactaattgcttacaccaattggaaatactaacatgaactcagtactgaaaacctggtttgcataaaagaaatgcagaggtttacagagtttgctatttttttctacttctcaattttaaaatttattcttatatagaaagcttaaagtttcatgcagagtgactcatgtcatagcagaaactactgttactttagcatttagcactatcatagaaaggtacctttttctctttagtgctattgtgaaaacaagcataatttgctatatgttttccttttcaacttttcagtgttgactataaaccattgaatggaaaactttaagatgtagaaagctgtagattgcactttgatgactcacaagttaaatgtgatacagaaaaatagatcggttagttgttttgtgatgcacttatctttttcttttttctaactaaaattgtgatgttacagaaagtcattttatgttccttttttgtctgatgatccaatatttactgaactttttgtaattggtgataattctttttatttcttccttatattaaaagctcatttgacagcatcagacattgggggagagatgtcccccaaagtgtgtattctaattttattagccctatccaataaacaccattgccaaagtagtattttcataactttcttgttgatttgggccttggtgtgaagtatatttacctgagagttcacttttacttttcttaaacttaggcttcatttacaaaatgttttatttaagcaaggaacaatgtaatactcaataatgacctaaaacacctttttgaaagggtttgcacttggaagagagtttatgttctgttgaaaccaactttgatagggtcctcacctttccgttaaggaggtgccgcactacaagtttcaaattatatggaaaaacctaaaattaaccctctgttggtgatctcataaaatggttttgaccttttggtatcttaatttctatctaaactttatcagaaaattttctttgaatatatcaattagttggctgtgggaattttccctttccacattaataaatgcctttctgtgtttctgaatcagaagcaaatgattagggaaaaatatatgtccaaacaagacaagattagtttaaacagttaagaacatttagtccacattgtcttgtcagccagcaattgtcatggaagctatcatttttaagagtgccactgtgtggatttttctttcaagtggttattacattaaaattacctcatactgaggtttttgcactgaaatatcacagtttcagatttcatggttaatgttgtgcgtatgtttgtatgtttttaaaggaaacttgcattttcaatagttgatcctaaatttcataaactgcacttctttactctggtaaagctgatgtttttgtgcttattgtgaattgccgtagtacctttgaatgtcaaactttatttagaaatataaaacttatcctttatgatataaatggttgagtgtatgtacccagtatttctaattaaatttcacatgctaaattaatgaaagtaacaagattgtaattttttaaagtcagttgattaaatgcaataaatattggttgctcaaatatgccacaaataactcgaaatttttcatttactttcaacagcataagattctttaatatttaggattgactgttctttccagttaagcactgaaggattatgtcttgtagcttccccaagagaaggggaaggaaaaaaaagcactatgttaaggataatacagaactcttttgaactattttggtagtaccttttaccatactgtttgctttttgatttgggtaaatatcttaagagcaaagaaaacaatacaccaaatgaaaatgctttgaaagtaaatgaaaacagcgcttttgaaaggctggtatagtatgaccctggagtcagcctttgtgttacagcgaaaatgttggtgctataaattctgattgtttacagatgttgattctgcttatgctccaaagtgtgcatgatgtattttacgtagtactctgaggaagtctctttataaaacctactaccacttagtataaatttgtttgaatttatatcatttgttactgtaaattcagcttattccaattaggttggcacagatttaaactgatacacattccacaaaaaccaattcagtgtataagtattgaagtataagcagtcattgcagcttgatgccagatcatgtatgtaataacaagtggaagttaatagggccttctaatactgtatgggtactcctaagaattatttcattttggatataaagaagttatgaggcctcctgtcacattcacagctggttctccaaaataatttggttgtttcaaaaacaaatggtaatcatttggttggattcttcagtatcatgactagatcatgtggttttaccatagttgccaagtggtgggaggtagcatacctgaaaatgtacgtgtgtgtttgttgtattttttcacattttgtgaacaaagcacatttattaaaaattttaaattttctagtaaaaaaaaaaaaaaaaaaaaaaaaaaaaaaaaaaaaaaaaaaaaaaaaaaaaaaaaaaaaaaaaaaaaaaaaaaaaaaaaaaaaaaaaaaaaaaaaaaaaaaaaaaaaaaaaaaaaaaaa

SEQ ID NO: 24750 - DNA, 2319 bp, Homo Sapiens
cggcagctcccgcggcagcggccggcgccccgggatctgggggcgcaccctcagggtcgcagggggtgctgatcggggacaggctgtactccggggtgctcatcaccttggagaactgcctcctgcctgacgacaagctccgtttcacgccgtccatgtcgagcggcctcgacaccgacacagagaccgacctccgcgtggtgggctgcgagctcatccaggcggccggtatcctgctccgcctgccgcaggtggccatggctaccgggcaggtgttgttccagcggttcttttataccaagtccttcgtgaagcactccatggagcatgtgtcaatggcctgtgtccacctggcttccaagatagaagaggccccaagacgcatacgggacgtcatcaatgtgtttcaccgccttcgacagctgagagacaaaaagaagcccgtgcctctactactggatcaagattatgttaatttaaagaaccaaattataaaggcggaaagacgagttctcaaagagttgggtttctgcgtccatgtgaagcatcctcataagataatcgttatgtaccttcaggtgttagagtgtgagcgtaaccaacacctggtccagacctcatgggtagcctctgagggtaagtgactaagacttctcctctgctgtccaagcgctttggtgcagggacagcggcatcttcagccaatccagtgcaggctctccaccgaaggctggctctagactggtggtacgcacatagcatagccatggccgactcctgctgtggttctctgacgattgtgcttcttgttaatcctctgtcgtgctttggtaatcgtattgattagagttggtaactgtcttgacttgaattttgtccctttaaaactgctgtacctgtatgataaagatgcagtacctttctcttaaaaaaaaatgctatggaaagctgtgagaattgaagagacaaattggctgtgtcagtgtggggttatgtcatgatttctagaagccctgaagttgctcttttgagcagctttgcatgacacgctctggtaaaaggtgtgcatctttaaattatttcatggatactttgaaaaatattgtatcacttcaaatacagcaataagtttatatgttctcaagatttcatttgtttttaagaattttaagttcgtggattaatatcactacttgaatactgacagttgttgattagacaccgaaaggttactgattgttgaatgtatctgtgttagagctgtgcactggcacgcttgcatcaggggctggggccacacggccgccacacagattcccccgtgatgcctggagctgcttccagagccgggtgtctccaagaggcacctgtaggacttcccatttagaaatctcttgagtgggtttgtatgttaccttctccaaggtttatttaggacagagatattgctggaaggtcatgggtcagattccctcacaacccacctcgtctgcgggtgcagccccactccaaggctccccgttattggggtatgtgaggagcagtaaatataaaaccagttcaactgtcctcatggaatcaccctttctgtttttgcagtattcataaagctagtgtaaggtctggttttagtctattaaatcttagagatctaaaggaaatgctcaaaatgtagccaggttttaaatgctttaacttttaaaaaatgtaaatttttgtatgtttatagcttctaaatatgaaagttaaagaatgtactgtgatgaaatgttcagtattatgttgcttctcagtatcatgttgcttctcagtattgtgttgcttctgattctatgaatgttcattttaagaccccttgttgaaatgggacagttggcagcggctctgatgagcccgagaagaggcctgcccttgggtgcggagtctccctccgcacgatgctcccacgcgtccaacttgcacccaaggggcttttccctcttccaagtggactccttcaaggaagctgcagctcggtcagcagagaaggggcctgccgccagcgccctggaggaagaggaagaggaacccaagaggatggcttgtctcccagcagccacaccggctttgtgctcagccagttcatttgagtttgcatgtttctctgcactatggattttgagcatttagatttctttaatcaaaagcgttttagtgactccagtagacattttctttctgaggcatcgtgctttgcatgagagcaggccaaggttgaggggaaaagtaaagttaaagtcggttctctttcatagcaacgaaaaaaaaaaaaaaaaaaag

SEQ ID NO: 24751 - DNA, 5862 bp, Homo Sapiens
agaaaaagtaatcagttaaaggagatcaggcgtacagaactaaagagatattatagtattgatgacaatcaaaacaaaacacatgataaaaaagagaagaagatggtggttcagaagccccatgggactatggaatacactgctggaaaccaggacaccctaaactccatagcactgaaatttaacatcactcccaataaattggtggaactgaataaacttttcacacatactattgttccaggccaggtcctttttgtgccagatgccaactctccttccagtaccttaaggctatcatcatccagtcctggtgctactgtctctccttcatcatcagatgcagaatatgataaattgcctgatgctgacttagcacgaaaggccttgaaacccattgaaagagtcttatcgtctacttctgaagaagatgagccaggtgtggtgaaatttttaaaaatgaattgtcgatacttcaccgatggaaagggtgtggttggcggtgttatgatagtgactcctaacaacatcatgtttgaccctcataaatctgatcctctggttattgaaaatgggtgtgaggagtatggtctcatctgccccatggaagaggttgtttccattgcgctctacaatgacatttctcacatgaagatcaaagatgccttgccatcgcctggagaatgggaagacctggcttcagaaaaggatatcaacccattcagtaagttcaaatctatcaacaaggaaaaacgacagcagaatggagagaaaattatgacttcggattccagaccaatagtacctttggagaagtccacaggacatacacctacaaagccctcaggcagctctgtgtcagagaaattaaagaaactggactcctctagggagacatcccatggttctcccacagtgactaagctcagcaaggaaccttccgacacttcttctgcatttgaatctacagccaaagaaaactttctaggggaagatgatgattttgttgacttggaagaactttcttctcaaactggtggtggaatgcacaaaaaagacaccttgaaggagtgcctttctcttgacccagaggaacgaaagaaagctgagtcacaaataaacaattctgccgtggaaatgcaggtgcagtcagccctagcctttttgggaacagagaatgatgttgaactgaagggggcgctagatttagaaacctgtgagaagcaagatataatgccagaagtggacaagcagtctggttcgccagaaagccgagtagaaaacacactgaacatacatgaagatttagataaagttaaactcattgaatattacctgactaagaacaaagaagggccacaggtatctgaaaatttgcagaaaacagaattaagtgatggaaaaagtattgaaccagggggaatagacattacccttagtagttctctttcccaggcgggtgatcccataactgagggcaataaagagccagataagacctgggtgaaaaagggagagcccctcccggtaaaactgaactcttctacagaagcaaatgtgattaaagaggctctagactcctctttggaatctactctggacaacagctgtcaaggtgcacaaatggataataaatctgaagttcagttgtggctgttaaagagaattcaggtacccattgaagatatacttccttcaaaagaagaaaaaagcaagaccccacccatgttcctgtgcatcaaagtgggaaaaccaatgagaaaatcctttgccactcacactgcagccatggtccagcagtacggcaaacggagaaagcagccagagtactggtttgctgttcctcgggagagggtggatcatttgtacacattctttgttcagtggtctcccgatgtctatggaaaagatgccaaagagcaaggctttgtggtggtggagaaggaagaactgaacatgattgacaacttcttcagtgagccaacaaccaagagctgggagatcatcactgttgaagaggcaaagcgcaggaagagcacatgcagctactatgaagacgaggacgaagaggtgctgcctgtcctacggccccacagcgcgctcctggagaatatgcacatcgagcagctggcccgacgccttcctgcaagggtgcaagggtatccatggagactggcctatagcacgttagagcacgggaccagcttaaagacgctctaccggaaatcggcatcactagacagtcctgtcctattggtcatcaaagatatggataatcagatttttggagcatatgcaactcatcctttcaagttcagtgaccactattatggcacaggcgaaacttttctctacacattcagccctcattttaaggtctttaagtggagtggagaaaattcatactttatcaatggagacataagttctttagaacttggtggtggagggggacgatttggtttatggctagatgctgatttataccacggacgaagcaactcttgcagcactttcaataatgatattctttccaaaaaggaagacttcatagttcaggatctggaggtgtgggcatttgattgaaattcagactgccttaaaatataacattaaaaagactgggttcgatcagccctcctaaagctggctggaaaaagaagccccagcccagcctgcctcatcccaccccaatgcttcctttctgccatcatctcagagcatgatcacattgcagaaagattctggaaggtccatgtagagggcagacattgaagaaagaaacttaaaatccaggttgttgaaaagactttgtactcccacttcctccaaatccatacagtgaggaatcagagtgtttatagatatatgagttgaatgcaatttttatttttggtaactgtgaaaaataagatactgtggatatatacatgccttgtgtatttatcagcataattttcattaccaaaatgtacagctattatttgccatggaaaaggttagtctcatttagaaaaatcgaaagtgcacagcacttaaagggaatatatgaggttttttttttttaaaaaaaaacttttatttattatttgtagtatattgtctgaaatgtgtcggcagttttttttcttttaatgtgtcaaatcttgaaatattaaatgtatacattttgtgctatgttttgggaacaaatctgtttgatttatatagttttatattgaattttttttgccctgattgtttagggtgataggtcttaagcagcatatatctatatatctgtatgtgggtatatagagatatatgtgtgtgtgtatgtatatgtacatatacatatatatgagtgtataattctaaatttctaaaaactcattatgaatgttcatcaatttgactattataggccagctttccatttagtcaataaaagcgtacatttttagttacttaccttgaacatattcgtgtgaaaaagaatacatcatttctcacagtcttaagttgatatttatagaaatgaatacctttgtgaacctagacttagaacaaatcctgcttttgaaaaaaaatgttttgcttcttacaaaatcatttgtgttaataacaaaaactttattttcggagtgttctttgtataacttttccaagcttttacattaacgagcaggcctctgtcttaaaagggactcagtatattaatttctgcattttttaaatcaaatgaaaaacgtcaaattggaccaattgtcttggtttcttgattcatttatttgagaaaaaaacaatacaaagaaatgcattcatatcaaaattggaatagaaaggaaaacctatttttaagatatcaacctattttcacatcataaaacatctattacataaaataaaggtccaggcatagtggctcttgcctgtaatcccagcactttgggaggccgaggcaggtggatcactcaaggtcacaagtttgagaccagtctggccaacatggtgaaaccccatctctactaaaagtacaaatattagccgactatgtggcgggcacctgtaatcccacctactcgggaggctgaggcaggagaattgcttgaatccgggaagcagaggttgtagtgagccaagatcgtgccactgcactctatcctgggtaacagcgagactctgtcttaaaaataataacaataataataataataaagacttacttaaccaatattattgattaccagacttttatgaaagccaaagactgcttgctagtaggaaaaaatttcaaataataaccaaagctgaaaaatggtctgtcataaattatttccccggtaatttttgaaaggaaaaatgtataacaagtactatttacatatctgcatttaaaaaagcaattcttagaatacttcctttacattattctcctattttagacattttgtgaaagagaacaaattgtccagtggcctcctgtcagatcaacaattattatactccttaattccatgcaaatttaaatgaatgctataaaattttaaatctgtagcctgggtgtacgtttcactcaagttctcctactgaggactcttgactaacagcatactggcagtttcaccttaacctgctcgttaaataatgtgttggtgtgagatatcaggaatgtctcatgatatcacgtttaccatttacaccatctgcaaccatatgctattaataaaatggaaaaaaacaaaatggtcattttgcatatacttcactctgacctagtttagtccatgatactataattgtgagagcatatccagatgctgtgttctctatgtaaaacagtattgtccattcagaaatgtgtgacccttcatttatggatattgactatatgtaatgcagtgctatcccaatattttcaataaaggactttatgcattcagtgattttctttcccaaagattcattcatcaggtatttactgggtaccagagtgtttatttttgtgagaggatggtgaaatatccaagactaaacaaggtccagagctcatgttttcactgctgccctggaaactccctcttcattccctgtagccaccctcctaattgtctcatcagttcacggaaactgctctcattatggttaccagagacaactcttggctgtatctaccagtctcttctaatctttctagctgtgcaatgaatgacaacctcctcctcttaacatctgtcttaacctacttcataatttccgtaagggacactttactctctgataaattttctttggcatcctgacacctagcccctagatgttgggctagatgaagaccccaagcagtcttcattgcttcataattcctcagttcataagtccatatcaaaggacttgggtgggaggaggcaaccaaatgtttcttcagactctactgaaaatgattagatgcatccccgtgctacaagccaccagagacatcctgcactattataagtatgtcttcccttaatttgatctccctctccttgatgccttttaaagttttagagacacattgatatggtttggctgtgtgtccccaccaacatctcattggaattataatccccacatgttgagggagggacctagtgggatgtgattagaacatgggggcggtttcccccatgctgttctcatgatagtgagggagttttcatgagatctgttttaaaatgtttggcagttccaccctcaccctctcttctgctgccatgtaagatgtgccttgcttcccctttgccttctgccatgattgtaaatttcctgacgcctacccagccatgtgaaactgtgagtccattaaacctcttttctttataataaaaaaaaaaaaaaaag

SEQ ID NO: 24752 - DNA, 3299 bp, Homo Sapiens
atccaacagctcagcaaacaagtgtctgctgaaggtggcagcatatgctgcccagcttgagcagtaccagaaagccattgagatctatgagcaggttggggcaaacacaatggataatcctttgttgaaatacagtgcaaaggattacttcttcaaagctgccctctgccacttcatagtagacgagttgaatgccaagcttgctcttgagaaatatgaggaaatgtttccagcatttactgattcaagagaatgtaaattattgaaaaaactcctagaagctcatgaagaacagaacagtgaagcttacactgaagcagtgaaggaatttgactcaatatctcgcttggatcagtggctgaccaccatgttgcttcgcatcaaaaagtccatccaaggggatggagaaggagatggagacctaaaatgaaatgtttttgtctttgtggcatgcagctaactcctctttagttttgtcttagggtcaagtgatctttatgggatgcctatttaatggcttaattttgttgcatatgagccagacggcctgtgtattgtttaagctcgccaagtctgtgttgctgtgaaatgaatgaaggagaggctcctgttcatcttgtggtaatgatgggttgtttcatgcttatcagaacccccagcgttttctgagaagtacttcagaatctcattcctcatatttcattggtatttgtggagcctatgtttaatgttgccacgtgtttttatgtcctttttgttggacttgagtactcagcccagttgttctcatagatgctttgcattttctctgtgctttggcatctgaatatgttctttaaatgtgtgtttagtttaggacagttactaggaatgagtttataacttcattagaaatcatttctatttttgttatcctgtgattattttgatggtgctagtgactagtttctttgctttttgtgttgttccgtatgctaacatgtgcatggcaaaaatttagaatagccagggtctgtaggcatcacattgtgaggaagggagctttctggaagtacttgcttcatgtatggatgagtgtcaaagtgaatttgatttgtacttagacacacgcgtttacacacacacacatatcacaagatctgttagaaatggaatttttctctttttctggagatagttttcacttttagttggagtggaaatccctttatatttacattgaagtattttaattggcatagcctgctcattattttcatgtttatacactttcccacgttgaggtggtgtgttctgtgctgtgactatagaaatcttggtcagggctggatagattatctaagtcaagcttgagaatgaatgtatgtaattttcctgtttattgtacatgatgggttaggtggggtgaatgtggtacaggaatgtcctgtatgcccaagtgggcaagaaccccaacttgtttctcaggggacttgattgttctcttagctggtggaatatgttggcttatgtgtttgaactctgtcgtgtttaattggtttatataatatatgtatgctatcttgatttatgaacttgatcctattaatttatatgctgatattgtactttagacatacgcttgtctcctgaatgtcctctgaatatttatagttaaatgatttatatttgaaatgtgttgccagacttaacccagcagacactctgacatcacggagcttcactgatgacaggtaacgaaacttcctatgttatgtcaggtagtagtaagtagtattggaatgatgttttcatttttggtggctctcaactggaattggtagtgtttccaggccaagggtcgactgcaggttgtttgagaaatgatgagtaggtcagtctaggaagaaagagaaagtagcaggaaaggaagtgggaagggccagccaaggacagactgtagaggatccacatcaggtggccacgaggacttgcaggctatagttatggtggtgacatgcatgaggtgggctggtagagcaggaagctctgtgatgtcagagcatctactgggactacaggtgcactgtagtccccactactgggggtggcaatgaagacactctgtctgttgggccctagaatttaatgtggatttcctccttccttccaagttctgagattcttaaatgagagctggctgtcttctagaggtaagacctggaatggagtccagttggtactttttcactccctcttagaatctcttatgaaaaaatgatcatagagaaaagtggggttttgtttccccacctaataatatatcctacaaccagccaaatgcacttttgtgaaaatggggtgtgaggagtggttctgcagcttgagtcctctggttttaagtagtttgtttctacttgtttaaagaatcttctggtctgaccacttaaagtaaaaactacatgatttattttcgggcaattatgtttagctttcatcattatactccaacagacccgtctgaaggggtatttttttttaacaataatgtttgtaacattttgttgtgtcaattagagggtcacttgtttgtattgcaataaacactgggaccagttccggggttaagaattaatttttgtttttaatatttcacatgaaaagaatcaaagtaattgtaatggctagaagagacctgccagaagattaaaaaaaagaatgagagaaaagcccagttagtggtgtgcaaacttacttcctttaaatgtcccatggatgtaggacagtgccatgtttcaagatgcctgtgagctaggtcttcaagatttatagaatgttacttatgaacaaaatataattatttatggtacaattcttgtactttagcaaatctggagttagttcatagtcaaagtcagttaatatttcttagaggaaagttttgctttttgtggcaacatttttatagcttgtgtgagttcttttttatttaatgatttgaaagcagtatttttgcacagtcgtgaccgtgtgtggtggcgtcactgtaaccaaagtatatgcaccagcccttgtgcatttattgtttctcctgattttgtggatttaaatgtccaaatgcaaacctttgtgacttcctttggaggacttggcagcacagcatgcccccgtgacctgcctgctgtggtatgagctatgaccaagagcaggcttcctgctccatggagtcctgagttgctctggggcaggggattacgttatgaaaactaaccatgtgtaacaataaatctaccttagcagaaaaaaaaaaaaaaaaaaag

SEQ ID NO: 24753 - DNA, 1253 bp, Homo Sapiens
aatgcccatggttatgcccagtgcagatccccgctccttgtctttcccaatcctgaaccctgccctttcccagcccagccagccttcctcaccccttcctggctcccatggcagaaatagccctggcttgggttcccttgtcagcccccacggtccacacatgccccctgccgcctccatcccacctcccccaggcttgggcggtgttaaggcttctgctgaaactccccggccccaaccagtagacaaactggagaagatcctggagaagctgctgacccggttcccacagtgcaataaggcccagatgaccaacattcttcagcagatcaagacagcacgtaccaccatggcaggcctgaccatggaggaacttatccagttggttgctgcacgactggcagaacatgagcgggtggcagcaagtactcagccacttggtcgcatccgggccttgttccctgctccactggcccaaatcagtaccccaatgttcttgccttctgcccaagtttcatatcctggaaggtcttcacatgctccagccacctgtaagctatgtctaatgtgccagaaactcgtccagcccagtgagctgcatccaatggcgtgtacccatgtattgcacaaggagtgtatcaaattctgggcccagaccaacacaaatgacacttgtcccttttgtccaactcttaaatgacggacctgactggggaggaagaagaagagaaactgatgtgaacaggaagcgcgggttcaagatttctaaaactctatatttatacagtgacatatactcatgccatgtacatttttattatataggtaatgtgtgtatagaaagtctgtattccaatgttcgtaaatgaaactatgtatattatgcagaaacagtctgttccccctcatcttgcaattcctttgggggatgcagattgtagggaagatgatgtttagtttggccttgaaattatgatatccctgcccagggctgttttcaaatacaatataaaaaccacctaggaacctgctgttgctctaaggccattctgctttggtttggctcagcctctagtccatttccttaaggctcatgtatgcagatttaaagcctggtgctcacccactgtccaaccagatgccttgcttaccgaaagcctccagaagcctcagtattgttttagccactctactccaaatggataaaatgagactctgattgaggaaaaaaaagtaaaaaaaaaaaaaaaaag

SEQ ID NO: 24754 - DNA, 2267 bp, Homo Sapiens
cacaattgaaaggtggtcagcattctcaagctgctccagtgaaatggattttccaagataatctacagccttttacgccatctcttgttcctgttaagtcttcaaataatgtggcttcaaagattttaaaaacttttgtagataggaaaaatttgggagataatactataaatatgccaccattgagtaccatcgatcctagtgggacgcgatccaaaaatatgcctattaaagataatgctttggttatgtttaatgggaaagtctatctgttggctaaaaaggggacagatgttctgccatcacaaattgaccaacagaattctgtttctcctgatactccagtaagaaaagacacgttacagacagtgagttcaagtccagtcacagaaatatccagagaggttgtaaatattgttttggctaaaagtaaatcttcccagatggagacaaaatcactttccaatacccagcttgcttccatggccaatctaagggcagagaagaataaagtggagaaaccatctccttctaccacaaatccacatatgaaccaatccagtaactacttaaaacagagtaagactttattcacaaatccaatctttccagttggatttagtacaggacacaatgcccccagaaaagtaacagccgtcatttatgctagaaaaggaagtgtcctccagagcatagagaaaataagttcctctgttgatgcaacaactgttacttcacaacagtgtgttttcagagaccaagaaccaaagatccataatgagatggcatcaacatcagataaaggtgcccaaggaagaaatgacaagaaagattctcaaggaagaagtaataaggcattacatctgaagagtgatgctgaatttaaaaagatatttggccttactaaggatttgagagtgtgccttactcgaattcctgaccatttgacctctggagaaggtttcgattcctttagcagtttggtaaagagtggtacttacaaagagacagagtttatggtgaaggaaggagagagaaaacagcagaattttgataagaaaagaaaagcaaaaactaataagaagatggatcacataaagaagagaaaaacagagaatgcttataacgcaatcataaatggggaagctaatgtcaccggttcccaactcctaagcagtattttaccaacttcagatgtgtcacaacataacattctcacgagtcacagcaaaaccagacaagaaaagagaactgagatggaatactatacccatgagaagcaagagaaaggcactttgaattcaaatgcagcttatgaacaaagtcatttcttcaataaaaattataccgaagatattttcccagtgacaccaccggagttagaagaaaccattcgagatgaaaaaataagaagacttaagcaggtgctgagagagaaagaagcagctcttgaagaaatgcgtaagaagatgcaccaaaaataaaatctcctgtaaagacttcagtgaaatagctgttttttaaaatatacttcagcattaataagttaattgtaggtgtgttctgaaagtgtctttgaatatgaagcttgttttttcatcagtcgattgtacaactttaaggaatacagaaaaggttgattcacatatgacttgtgaataatttacatggggtatctatacctttgtcttagatacctttttttggaaggataaattttatatttttctattattttaactagaattctccaagtttgaatatttgggcagggtttttgttattgtttgtatctttacctaaattgctcaggcattattccagcagtagatagtgactgtgtattactgaaattttacaattcaagagaggaaatcagctccaaacttagcttttccagtggatttgtatatgtacttgctttatctctttacccttaaaatgatgataccttgtattcaccattgttttttttaatgtcgtgaaataatatgtattatggcaacattatttaaacattcaaacatttctcaagaatgagcaacatttgtaactttacaatgtaattttatataatccaaaggtattttagaattcaggccatttgatgttttgtttgcttatagtgatgtgttcccaggcaaatgctgctttttttttttggggactatgtacatacgttactgagattgtgtaaaaagtagatcctgaacagttatcacatttaatatttcttaaactgtaaaagtgaaaaaaaaaaaaaaaag

SEQ ID NO: 24755 - DNA, 2294 bp, Homo Sapiens
cgggaaccggcaggggaacgggataaagttcccggagaaaggaaaggagagcgtgggatagtaaaagagaagacgcggagaagaggagaggacctacaagaacggaggacaggggcgcacgatggtcccggggggagcggaaacaaaggcacgcaaaacggaaaagcgtgtgtaggggagcggaaaagaaagtcaccaccgtggcctgcgacgaaatggcgaaaagtcttttgaagacagcctctctgtctggaaggacaaaattgctacatcaaacaggattgtcactttatagtacatcccatggattttatgaggaagaagtgaaaaaaacacttcagcagtttcctggtggatccattgaccttcagaaggaagacaatggcattggcattcttactctgaacaatccaagtagaatgaatgccttttcaggtgttatgatgctacaacttctggaaaaagtaattgaattggaaaattggacagaggggaaaggcctcattgtccgtggggcaaaaaatactttctcttcaggatctgatctgaatgctgtgaaatcactaggaactccagaggatggaatggccgtatgcatgttcatgcaaaacaccttaacaagatttatgagacttcctttaataagtgttgcgctggttcaaggttgggcattgggtggaggagcagaatttactacagcatgtgatttcaggttaatgactccagagagtaagatcagattcgtccacaaagagatgggcataataccaagctggggtggcaccacccggctagttgaaataatcggaagtagacaagctctcaaagtgttgagtggggcccttaaactggattcaaaaaatgctctaaacataggaatggttgaagaggtcttgcagtcttcagatgaaactaaatctctagaagaggcacaagaatggctaaagcaattcatccaagggccaccggaagtaattagagctttgaaaaaatctgtttgttcaggcagagagctatatttggaggaagcattacagaacgaaagagatcttttaggaacagtttggggtgggcctgcaaatttagaggctattgctaagaaaggaaaatttaataaataattggtttttcgtgtggatgtactccaagtaaagctccagtgactaatatgtataaatgttaaatgatattaaatatgaacatcagaattactttgaaggctactattaatatgcagacttacttttaatcatttgaatatctgaactcatttacctcatttcttgccaattactcacttgggtatttactgcgtaatctggaacatttagctaaaatatacacttttggcttaaaaattattgctgtcaattccaataataattcttagcttataaccaaagagcagtgtttaaaaggagagcttctatacaaaacctattcctggcgttacttttcatacaatttttgttctgttttacctggaaataatttaccaaaataactgagtgttgctgctaaagaacaaaagtggggaggtatcagggaacaagaaaacaagaaagggtatgatcaatcattttcttctgctccaaacagctggagtaaaattcatgggaaatggcccttcatttaaaaaaagatgtacctcactacccactacaaatttggaactttgttcttttcaataattagttttctattgtaaattacctactaaacagtggtagccatgacatggaaagtcaactgattctacaattggacattcatttgtgtgccctggaatttccaactagtaataaacaactactgttgatgtagttttaaaccacttgaagggactcatgaagcatcctgcaacataaatttgcatttttacatcagatttcttttttttcctgaaaaacaactaaccttctaacaactatctttcaaaagtaaatgtaataaaaatgcacaacataaaatgtttatgatcccagcaatacactttttaaaaaatgtgaaagtcaaagaattaagttctagttctgactcatcacaagaggtcaaaagtatttgctactgtaacattcaattcacatttgagaatcatggtaaaaataacttgcatttgccttaccatcatgatcctactgttgagttaggaaaatatggttagacagactcacattactttttttcagaggtaaactctagattactgtgtcaacccaatactatttggccatagatgtaaaaactaccaaataaaagtggattttgtggtctacaaaaaaaaaaaaaaaaag

SEQ ID NO: 24756 - DNA, 2617 bp, Homo Sapiens
cggacgcgtgggcggccgagccagatgcttccgagaagccggcggaggccacggccgggtcaggcggggtaaatggtggcgaagagcagggcctcggcaagagggaggaagacgaacccgaggagcggagcggggacgagacgccgggatccgaggtgccgggtgacaaggccgccgaggaacagggagatgaccaggatagtgaaaagtcaaaaccagcaggctcagatggtgagcggcggggggtaaagagacagcgggatgagaaggatgaacatggccgagcttactatgaattccgagaggaggcttaccacagccgctcaaagtctccactgcctcctgaagaagaggcaaaagatgaggaggaggatcaaactcttgtgaacctggacacgtatacctcggatctgcattttcaagtgagcaaagaccgctatggagggcagccacttttctcagagaagttccccaccctttggtctggggcaaggagtacttacggagtgacaaagggaaaagtctgctttgaggcaaaggtaacccagaatctcccaatgaaagaaggctgcacagaggtctctctccttcgagttgggtggtctgttgatttttcccgtccacagcttggtgaagatgaattctcttacggtttcgatggacgaggactcaaggcagaaaatggacaatttgaggaatttggccagacttttggggagaatgatgttattggctgctttgctaattttgagactgaagaagtagaactttccttctccaagaatggagaagacctaggtgtggcattctggatcagcaaggattccctggcagaccgggcccttctaccccatgtcctctgcaaaaattgtgttgtagaattaaacttcggtcagaaggaggagcccttcttcccaccaccagaagagtttgtgttcattcatgctgtgcctgttgaggagcgtgtacgcactgcagtccctcccaagaccatagaggaatgtgaggtgattctgatggtgggactacccggatctggaaagacccagtgggcactgaaatatgcaaaagaaaaccctgagaaaagatacaatgtcctgggagctgagactgtgctcaatcaaatgaggatgaagggtctcgaggagccagagatggaccccaaaagccgagaccttttagttcagcaagcctcccagtgccttagtaagctggtccagattgcttcccggacaaagaggaactttattcttgatcagtgtaatgtgtacaattctggccaacggcggaagctattgctgttcaagaccttctctcggaaagtggtggtggttgtccctaatgaggaagattggaagaagaggctggagttgaggaaggaagtagagggagatgatgtgcctgaatctataatgctggagatgaaagccaacttctctttgcctgaaaaatgcgactatatggatgaggtgacatatggggagctggagaaggaggaagctcagcccattgtcactaagtacaaggaggaggcaaggaagcttctgcccccctccgagaagcggacaaatcgccgaaacaaccgaaacaagcgtaaccggcagaaccgaagccggggccaaggctatgtgggcgggcagcgccgaggctacgacaaccgggcctacgggcagcagtactgggggcagcctggaaacagagggggttaccgtaatttctatgatcgatacaggggagactatgatcgattttacgggcgagattatgagtacaacagatacagagactattacagacaatacaatcgggattggcagagttactactaccaccacccccaggacagagaccgatactacaggaattactacgggtaccaagggtatcggtgaagcccctgccatggtcacctgtcagccatgaagctgaatctctgggggtgccaggcacccccgcaaaacacaaccaaggaaaacaggggctgtcggggtggggctgagctgccggggaggggtggtggggggggagggtgctcaagcaggggtgggggaggggggaggtggaaacaaacaacaaaactgtacattttttttaaagtttgttgaaaagaatattgtcttattctataaaacatttcaaacctagttagagatttgtaatcaaaaaacatttgcgcagaaagcagcacttagggctgcctgttctataccctacagtcagacaggaaaagaactgaaaatggcacccttctgacattctgaggcagctggactggcagccaagtaaaggagagtgatgaggtggtgtggggagggtggggaggcagcgcgagggtgctctccacagcaggtaggagcaggcaggagtggggacagagggagagcttgtgactgggacagtgaaaataaacgattggctcttatcaatcacttgcaccaactaaaaaaaaaaaaaaaaaaaaaaaaaaaaaaaaaaaaaaaaaaaaaaaaaaaaaaaaaaaaaaaaaagaaaaaaaaaaaaaaaaagggcggccgctcgcgatctagaactaggaagcagaagaccgacgaggatgactagacagcaaaaaaggaaaagttaaactaaaaaaaaaaag

SEQ ID NO: 24757 - DNA, 2905 bp, Homo Sapiens
cggacgcgtgggcgggttcgactggaggggcgggggagtcacctgcgagcggctgcgctggcggccagcccgcccaccgcgtctggatcgcgccggctgcgcggggctgcggacagcacacaccctggaaggccccggcggggaacgggcagagtccgcgccctgcgtccgcgaccaggaggatcggaccttcgccttcgctgtcgccgccgccgccgcccgcggccgtcggggctattagtgaaagatggtggatcgcttggcaaacagtgaagcaaatactagacgtataagtatagtggaaaactgttttggagcagctggtcaacctttaactatacctggacgagttcttattggagaaggagtattgactaagttgtgcaggaaaaagcccaaagcaaggcagtttttcttgtttaatgatattcttgtatatggcaatattgtcatccagaagaaaaaatataacaaacaacatattattcccctggaaaatgtcactattgattccatcaaagatgagggagacttaaggaatggatggctaatcaagacaccaactaaatcttttgcagtttatgctgccactgctacggagaaatcagaatggatgaatcatataaataaatgtgttactgatttactctccaaaagtgggaagacacccagtaatgaacatgctgctgtctgggttcctgactctgaggcaactgtatgtatgcgttgtcagaaagcaaaattcacacctgttaatcgtcgccaccattgccgcaaatgtggttttgttgtctgtgggccctgctctgaaaagagatttcttcttcccagccagtcctctaagcctgtgcggatttgtgacttctgctatgacctgctttctgctggggacatggccacatgccagcctgctagatcagactcttacagccagtcattgaagtctcctttaaatgatatgtctgatgatgatgacgatgatgatagcagtgactaaggacacatttgggagtatttaatcaggtgtggctatctgagaaatcaactttgggggaaatgtaagattctgagctctctctctgttttgttctagccatgaatttgcctgagaaacttgtaacctatgtgcctcaatatattccatagaaagtaggtccccctgccttctcccactcctcacactcttctacagggataggcttttgcaaatatatcagataaattttttgtttcttgtttatttttaggttattttcttggaaggttgggaaaagatgtttgttttaacaggtcatgtactacgttgttgttttcatttctgttataagtaaaactaaaagcacagaatggtgggaaaggggctataatgtggttcattaataatgttagcagcttttttctaaccatcctgtctaatggttaagacaccagtaacaaaaacacatgatttggaaatactttggctttttcatatacctagtggtgccttatcataatagcactgttacatgaaataagcccctaccttcttactttctggtttgttgaaaaaatacactggtgctctttgaagtgataaaatgagtgtttatgaatgggtgtaattaggaaatacttctcatctgacagctacaaataactaagtttggaggtattttcactctatatgaataaatatttttccataaaatagttgtgattatatttttgttttatataggtcccaaattataattgtcaaatatatattttaaattaataaaagttgtcattcttaggaatttggtttgaaatttatcagttatacagaattgtcatactgcattagcttctacctttagtaagacatattttttaggtataaattcttatgctttaacattatttctggattgaaaatcttataaaacccttgaaaataaacagtctcttttttacaaagcctgtgttagagcacagatttacctaggcttgaagatttggaagaaataatatgtaagaatggcctcaaggcagaccactttaagtttggctagacttcatatcgtggaagtattgtctatttcagtgtgaaactatcttgaatttgcaaatatagtgttatattttataaagttttgtaaaatcccaaacaatatttctatttttgtaaaacaattgtatgtataatctgtatttgaaatcattttgcaatctatggaaatagagtagcaattgctatttctaaattgtgaactttaagtcaatctagatttattttgagaagtaattgttcactctttacttttgaggcagccattaggttgaaagtatatatttatcatataaaacttgatgcgttttgcactactctttccatttatatgctgcaaacaactacagtctttgaaatatggaaaatcagcagtctaaagtttgttttaaattctaaatttaaaaaatcttcaaatctgaatataccgcaaatgtcatgagaagtttgattcagtaacttgtgatggaggattctttggtatcttactgtttggttaaggcactaattttacttacctattagattttgaaagtatctgagatatacaaatctccctgtaggaaatgtgaaagaaaagcacaacaaaactagggttttttgttcatttgcttgcttttatgattttttttggtttgttttaatatcaggtggatttttgtttctaagcaatatatacataaaatcaaccaacatatctgaaaaggatcatgaaacctgagaaatgctaatggagatttgctggtacataggaatctagcaaattcaggaaccaaggggaaatgttgtgagataacatttacattgtcaacctttattgactttgtttttacaataaaaaatattttacaactcaaaaaaaaaaaaaaaaag

SEQ ID NO: 24758 - DNA, 3884 bp, Homo Sapiens
gccggaaaggacccggcctcgagatggcagagcggaggcgttccctgggctgagctgagcacctcctccctgagacagcagcggtctaacccccggcgcgggagggacccagccagggggctgtcctagtagattccggcattgcctccaccccgctgtggcggagacgcagagggcgggtcgcgctcgagggtcagggaggagagtgacccggccctggtccagggccctccctgcccgccttggggccagaactccagccctggggagtgggcagggcctgttttccgtgcctcacgccctgcttttcgcctccttcagcgctgtctgctagctgcttttcctgctctctctccctggaggcgaacccttgtgctcgagatggcagccaccctgctcatggctgggtcccaggcacctgtgacgtttgaagatatggccatgtatctcacccgggaagaatggagacctctggacgctgcacagagggacctttaccgggatgttatgcaggagaattatggaaatgttgtctcactagattttgagatcaggagtgagaacgaggtaaatcccaagcaagagattagtgaagatgtacaatttgggactacatctgaaagacctgctgagaatgctgaggaaaatcctgaaagtgaagagggctttgaaagcggagataggtcagaaagacaatggggagatttaacagcagaagagtgggtaagctatcctctccaaccagtcactgatctacttgtccacaaagaagtccacacaggcatccgctatcatatatgttctcattgtggaaaggccttcagtcagatctcagaccttaatcgacatcagaagacccacactggagacagaccctataaatgttatgaatgtggaaaaggcttcagtcgcagctcacaccttattcagcatcaaagaacacatactggggagaggccttatgactgtaacgagtgtgggaaaagttttggaagaagttctcacctgattcagcatcagacaatccacactggagagaagcctcacaaatgtaatgagtgtggaaaaagtttctgccgtctctctcacctaatccaacaccaaaggacccacagtggtgagaaaccctatgagtgtgaggagtgtgggaaaagcttcagccggagctctcacctagctcagcaccagaggacccacacgggtgagaaaccttatgaatgtaacgaatgtggccgaggcttcagtgagagatctgatctcatcaaacactatcgagtccacacaggggagaggccctacaagtgtgatgagtgtgggaagaacttcagtcagaactccgaccttgtgcgtcatcgcagagcccacacgggagagaagccataccactgtaacgaatgtggggaaaatttcagccgcatctcacacttggttcagcaccagagaactcacactggagagaagccatatgaatgcaatgcttgtgggaaaagcttcagccggagctctcatctcatcacacaccagaaaattcacactggagagaagccttatgagtgtaatgagtgttggcgaagctttggtgaaaggtcagatctaattaaacatcagagaacccacacaggggagaagccctacgagtgtgtgcagtgtgggaaaggtttcacccagagctccaacctcatcacacatcaaagagttcacacgggagagaaaccttatgaatgtaccgaatgtgagaagagtttcagcaggagctcagctcttattaaacataagagagttcatacggactaagctgtaattatgatggctgagaaatgattcatttgaagatacaattttatttgatatcaatgaacgccctcaagactgagctgcttttatcatactctcctagttgtgggccacgatttaaaccatcagagatgacaagccatttgaaattctgaccctcagctttgggaatgttatctcctccaaaatggtgatttttattcactcaatgggttacttcattaaaagcagccccacaagtaactggaaatctgaagaccaggggacaaatgctggtgaatgcctaggcctggaaatggagtaaatctttcaatgttattttctcccatccttggcccaaggaactatgctaagtgaaacgtgggactgtaatagggtggtaatggctgctttggaaaaaggcaactagagactctgcctaaattgccacacctattcacacaccatagtagttgggcacacacatcttcccttccaaagggctttttccttgagttgctcatgcatttgtatcttttccatcttcctgagggcaagattttgcacgatgaaggcaatgattgtaacttttctccttctcattgtttctaattagctcctttaaagcttgcatctttgtgaaggctaactgaagatacggttggaaaggaaaaatgagacacaggtttggggaccaaggacccatcaatgatggtgactttagcagaagatgcccacagttattactgccattaatcagatttatgaattttctttggggatcactatagggaatattgtatagaaaatatcttcaagaaaagataggaccatcagtgacagttaagtgtaaggagcaagtggaattgagtccttcagggaaggaaccacagagtcccttcccaaggaatgtaggtcgtttctgtgttctttcccttctaatctttaagatcaactcttcctatcctgctaactctaagatttgataagggccacatcccagtgtttatcttagcttgcatcagggcatgtgtatgtacagtaatgtgtattcctgtggtttttctaatagaaactgaatttacagagacttagcatgttcttgggtgatgtgagtcatgtgacagaagtacagacataactccaatgtgagaaatgtccttttttcattatggaaaataatttaaacactagtgctttagtgtgcactctcctgtaaggtctgtctttgtacagagctaagcacttgtttgtatgtgtttgtcaattgtggaagataatgaccagacaaataggtcgattgtcctattctcagaatgaattatcttctatggtaatgaagaactctttggcttagtcagaaggaattaacgaacctcggtaggaatgtatttccatcctcccaccctacagatataagaggttaaaataacagttcgcccaatttaagcccagtagtgtcagttttcctaatctcagtccaggtaggaattaagaaatatctcaagtgttgatgctatccaagcatgttggggtggaagggaattggtgcccagaaaatgggactggagtgaggaatatcttttcttttgagagtacccccagtttatttctactgtgctttattgctactgttctttattgtgaatgttgtaacattttaaaaatgttttgccatagctttttaggacttggtgttaaaggagccagtggtctctctgggtgggtactataatgagttattgtgacccacagctgtgtgggaccacatcacttgttaataacacaacctttaaagtaacccatcttccaggggggttccttcatgttgccactcctttttaaggacaaactcaggcaaggagcatgtttttttgttatttacaaaatctagcagactgtgggtatccatattttaattgtcgggtgacacatgttcttggtaactaaactcaaatatgtcttttctcatatatgttgctgatggttttaataaatgtcaaagttctcctgttaaaaaaaaaaaaaaaaaaaaaaaaaaaaaaaaaaaaaaaaaaaaaaaaaaaaaaaaaaaaaaaaaaaaaaaaaaaaaaaaaaaaaaaaaaaaaaag

SEQ ID NO: 24759 - DNA, 2855 bp, Homo Sapiens
gaagatggacccggcgccctcgctgggctgcagcctcaaggatgtgaagtggagctcggtggccgtgccgctcgacctcctggtcagcacttaccggctgccccagatcgcgcgcctggacaacggagagtgcgtagaagggctgcgggaaaatgactatctgctgattcattcctgccgccagtggaccaccatcactgcccacagcttggaggagggtcactatgtcattgggccaaagatagagattccggtacattatgcagggcaattcaagctgctggaacaagaccgagatataaaggagccagtgcaatatttcaacagtgtggaggaggtggctaaggcatttcctgaacgcgtgtacgtcatggaggatatcacattcaacgtgaaggttgcttcaggtgaatgcaatgaagacactgaagtttacaacatcaccctgtgtactggggatgaactcactctaatggggcaggcagaaatcctttatgcaaagacattcaaggaaaagtcacgactcaacacaatcttcaaaaagattgggaagctcaattccatcagcaagctgggaaaaggcaaaatgccgtgcctcatttgtatgaatcaccggaccaacgaaagcattagccttccattccagtgcaagggcagatttagcacccgaagtcccctggaacttcagatgcaagagggcgaacacaccatccgcaacattgtggagaaaaccaggcttcctgtgaatgtgactgtgccaagccctccaccgagaaacccatacgacctccacttcatccgtgaggggcaccgctataagtttgtgaacatccagaccaagacggtggtggtttgctgtgtgctgcggaacaacaagatcctccccatgcactttcctttgcacttgactgtccccaagttcagcctcccagaacacctggtgaagggagagagctggcccgaaaccctggtccatcactggctaggtatctgccaagaacagttcgacatcgatgagtattcacgggctgtccgtgatgtgaaaaccgactggaatgaagaatgcaagagccccaagaagggtcggtgctctggccacaaccacgtgcccaattcgctcagctacgcccgcgatgagctcacccagtccttccaccgactctcggtctgtgtgtatggcaacaatctccatggcaacagtgaggtgaaccttcatggttgcagggacctggggggagattgggctccctttcctcatgacatcctgccctatcaggactctggagatagtgggagcgactaccttttcccagaagctagtgaagaatcagcaggcatcccgggaaagtcagaacttccctacgaagagctgtggctggaggaaggcaagcccagccatcagcctctcactcgctctctgagcgagaagaacagatgtgatcagtttagaggttctgtccgatccaaatgtgcgacttctcctcttcccatccctgggactctgggagcagcagtgaagtcttcagatactgccctacctccacctccagtgcctcccaaatctgaagccgtcagagaagaatgccggctcctgaacgccccacctgttccaccccgaagcgcaaagcctttgtccaccagtccctccatccctcctcgcacagtcaagccagcgcggcaacagactcgctctcccagccccaccttgtcctactattcttcagggctacacaacatcagcgtcactaaaactgacacaaatccttctgaaagcactcctgtttcctgctatccatgtaaccgagtgaaaactgattctgtggacctgaaatccccgtttggaagtccttctgctgaagctgtgtcctctcggctctcatggcctaaccattattcaggagcatcagaaagccagaccaggagtgacttcctgctggatccaagcaggagttatagttaccctagacaaaagacgccaggcacaccaaagagaaactgcccagcaccttttgattttgatggctgtgagctcctggccagccccactagcccagtcactgcagaattcagtagcagcgtctctggttgtcccaagtcagccagctactctctggagagcacagatgtgaaatctcttgcagctggtgtgacaaagcagagtacgtcatgccctgccttaccccccagggctccaaaactagtggaagagaaggtcgcctccgaaacatctcctttgcctctgaaaattgatggtgctgaggaagaccccaagtctgggtcaccagatctctcggaggaccagtattttgttaaaaagggcatgcaggacatcttctctgcctcctaccctttctcatctccgctccatctccagctggcccccagatcctgtggcgacggttccccatggcagccacctgctgacctatcaggactctctatagaggaagtgtccaagtcactacggttcattggtttgtccgaagatgtcatatcattctttgttactgaaaagattgatgggaacctgcttgttcagctaacggaagaaatcctctcagaggatttcaaattgagcaaattgcaggtgaagaagataatgcaattcattaatggctggaggcccaaaatatagccaaataacccccggccagcatggaacaaaactgatcaatgcgtgtgctagaaggggtgggctgggacacaatttcatgtttttgcactaaaaaccttctctgtaaatagggataagagaaactcttactatgcagattacgtttttgaatggtgaacaggctattttgtacatcaataaaaatgctgtacagaacaaaaaaaaaaaaaaaaaaaaaaag

SEQ ID NO: 24760 - DNA, 4696 bp, Homo Sapiens
gaaatatcggctcatcaaattggggtctcaatttgctacaggaagaaaacgtgattccagatatactaaaacttgcaaaacagtgtgaagttctttccatcagagggacctgtgtatatgtacttgggctcatagctaaaaccaaacaaggctgtgatattctaaaatgtcacaactgggatgctgtgaggcatagtcgcaaacatctgtggccagtggttccagatgatgtggaacaactctgtaatgaactttcatctatcccaagcactctaagtttgaactcggagtcaaccagctctagacataatagtgaaagtgaatctgtgccatcgagtatgttcatattggaggatgaccggtttggcagcagctctactagtacatttttccttgatatcaatgaagatacagagccaacattttatgaccgatctggacccataaaggataaaaattcattccctttctttgcttctagtaaacttgtgaagaatcgtatcttaaattcgcttactttgcctaacaaaaaacatcgtagtagcagtgatccaaaaggagggaaattatcatctgaaagtaagacaagcaacaggcgaatcagaacacttacggagcccagtgttgattttaatcatagtgatgattttacacccatatccactgtacagaaaacattacaattagagacttcatttatggggaataagcacattgaagacactggtagtacaccaagcattggagaaaatgacttaaaattcaccaagaattttggtacagagaatcacagagaaaatacaagccgagagaggttagtagtagaaagttcaacgagctcacatatgaagatacgtagccaaagtttcaatacagacactacaacaagtggcataagttcaatgagctcaagtccttcacgagagacagtaggtgtagatgctacaactatggacacagactgtggaagcatgagtactgtggtaagtactaaaactattaagacaagccactatttgacgccacagtctaaccatctgtctctctccaaatcaaattcggtgtccctggtgcctccaggttcttctcatacgcttcctagaagagcacagtcccttaaagcaccctctattgctacaattaaaagtctagcagattgtaactttagttacacaagttctagagatgcttttggctatgctacactgaaaagactacagcaacaaagaatgcatccatccttatctcactctgaagctttggcatctccagcaaaagatgtgctatttactgataccatcaccatgaaggccaacagttttgagtccagattaacaccaagcaggatcgattttaaaaagaagcatgtcgggggaatcaggagcttaagacctacaataacaaacaaccttttcaggttcatgaaagccttaagttatgcatcattagataaagaagatttattgagtcctattaatcaaaataccctgcaacgatcttcctcagtgcggtccatggtgtccagtgccacatatgggggttcagatgattacattggtcttgctctcccggtggatataaatgatatattccaggtaaaggatattccctattttcagacaaaaaacataccaccacatgatgatcgaggtgcaagagcatttgcccatgatgcaggaggtcttccatctggaactggaggtcttgtaaaaaattcttttcacttgctacgacagcagatgagtcttacggaaataatgaattcaatccattcagatgcctctctgtttttagaaagtacagaagacactggactacaggaacatacagatgataactgcctttattgtgtctgtattgaaattctgggtttccagcccagcaaccaactgagtgcaatatgtagtcattcagactttcaagatattccatattctgattggtgtgagcagactatccataatcctttagaagtggttccctctaagttttcggggatttctggatgcagtgatggggtgtctcaagaaggctcagctagcagcaccaaaagcacagaattgttactaggtgttaaaacaattccagatgatacaccaatgtgccgtatactccttcgcaaagaagttctaagattagtcattaatttgagtagttcagtttcaactaaatgtcatgagactgggcttttaacaattaaggagaagtatcctcaaacatttgatgacatatgcctttactctgaggtttcccatttgctgtcacactgcacattcagacttccgtgtcggaggttcatacaagaattatttcaagatgtacagtttctacaaatgcatgaagaagcagaggctgtgttggcaacaccaccaaagcaacctatagttgatacatctgctgaatcctgacctcatatttatgatggatatagatacatactatatatattcatatttgtggatttcctaaaagcctcagaaaatacgactgactaggcagcaaagacaggagtatcttctgtacactgttccgcagttactggtacatgaacagttggaactgctgactttcctaaccaaaacaacttccttctctcctttgttgagccttttgaggggttcatgattcattaccacagttttaagagtttcagttaccattgtatgcaagagccaagcactgaatacctacataggttttctattttctttcattttaaaagcgtaatgacagtggaacaataatgggatatgcagaagcacccttcacaagttatttctgaatgatttttagggtaaataatacagatgccttgtttgttaactaacttgtggaaagcaggaatcagtgtctctaaggctgcatcctattaccacaatggggtgtgctataactgctggtattagagagggaactttggccctttcacgtttttcttaatgtttgtaacactacttcagaggtttataacctcaaagcagaagaagagcctcaacaacccgggacttataagttatttttatgttactagacttgcataaagattcttgttttccaactcttcattttgttgcaatgtgttattacaggatatatgaaccaattaaggtttttcactacagttcttgaataaaatttaaaaatcattttttattttaattaaaaatatttcccatttatagaatgcatatatttgcaatggacttccactttcatcaactttccatctcatcgctttaaacaggaacttgaacaagcactgttagtttagacctaaaggataggaaagcattaaataatactttggatctcctgaggaaaagataagtttgcttgcaatttacacattccatggggaaagaagagccatatttccttaaaaaaaaattaataaagcttgttattgagaaaaattgtagtgaaaagccttaagtaccaaattttaaagcagcagtaacttaatttttatatcagtgtttttgttttgcacaaactaaatgcagtggtaggtgggtttatgagtatattaattgcctttatccatttgtgaagttaagttgatgagggcaaggtttttgtttgtttaatttgtatatgtctaaaggtatttggaactttttacaggaattaaacatatatgcaaatttgtatataaaaatagcatggccatcatttgaatgcttgtaaatgaaaggattatcttttttgagatctatatataaatagaaatagaaaatccagctggactgattaggattcttttttaattcatttgtgtataacatttttattacaattacacatcagttttgacacagtcatagcaacattaatattttcccatgatgcagatcctttttgtaatgggcttgttctttgagatctctgtaaagaaccctgtgaactagaaaacataactcacagagatacttttttaaaaaatttatttactggaactgaaagttccagttgggatgaagcatttcatctcacttcataacacctctttgactgcacttcagtgaattgttcttatgtgcactgtgtagcaacttacattataacaaagcagataagggctgtaagctgctgcttatgttgaaaagtggttcttcagattttctctcataaaatccagttgaagataaataatttttttatactttatcactgaacccaagtgtttatttaaatgtcaacagtacttctaagaacgttgcctgtcatcgtggtctttggtcttggataactaaactgcctttccagagaaccaaatgtcagagttactagaccaaatagtggttaaaacctccaaaggaagtaatgtaatcttattcataatgggattaacatattttagacattcattttaaacactacctcagttaatatagagtataaaaatctgtggtttaatccctcaaaagttaacagtaattttttttttgtcttacacacacacacaccccctcccccaccatcactatccctgtaccctcaccttggtcatctatcctgaaataaggcttagttagtattggcctgaatgttttgtgttttttttttgtttttttttttttactgttactttgaaaaatatgtatgtataccttatcatatctgcctatatcacttactttggggagatactcagagctttgtggttatcagtataccaaaaaaaaaaaaaaaaaaa

SEQ ID NO: 24761 - DNA, 3613 bp, Homo Sapiens
caggaatgcctccaggcatacctccattaatgccaggtgttcctcctctgatgccaggaatgccaccagttatgccaggcatgccacctggattgcatcatcagagaaaatacacccagtcattttgcggtgaaaacataatgatgccaatgggtggaatgatgccacctggaccaggaataccacctctgatgcctggaatgccaccaggtatgcccccacctgttccacgtcctggaattcctccaatgactcaagcacaggctgtttcagcgccaggtattcttaatagaccacctgcaccaacagcaactgtacctgccccacagcctccagttactaagcctcttttccccagtgctggacagatggggacacctgtcacaagctcaagtacagcttcatccaattcagaaagtctgtctgcatcttctaaagctctgtttcctagcacagcacaagctcaggcagctgtccaaggacctgttggtacagatttcaaacccttaaatagtacccctgcaacaactacagaacccccaaagcctacattccctgcttatacacagtctacagcttcaacaactagtacaacaaatagtactgcagctaaaccagcggcttcaataacaagtaagcctgctacacttacaacaactagtgcaaccagtaagttgatccatccagatgaggatatatccctggaagagagaagggcacagttacctaagtatcaacgtaatcttcctcggccaggacaggcccccatcggtaatccaccagttggaccaattggaggtatgatgccaccacagccaggcatcccacagcaacaaggaatgagacccccaatgccacctcatggtcagtatggtggtcatcatcaaggcatgccaggataccttcctggtgctatgcccccgtatgggcagggaccgccaatggtgcccccttaccagggtgggcctcctcgacctccgatgggaatgagacctcctgtaatgtcgcaaggtggccgttactgatcttacttcatccagtctaatagccctgccataggacaggctgaggctgagtctcagtgttgccctgttcagtctgagcagaatttcagcatttgctacttactggtagagaagaaaaatcccacagccctgccagtacaggttagtttaatctgtaagtacctgatgttcctatttttttcaaacatatccatataactcacacaaggaagaaagctgtgcggttacttaaatgttagtataactaataatagatccattggacactttaaacactcagtacttgggccaaagtagatctaggtttgctaaccccagttgtaataaaggtgtaatactgctcctttgttatctccttgtggttcaacctaagtagatacattgtacataaaaggaaaagacagtttcagttggctatgcccttgttgatagatgatatggagtccagggctttgggtccagggtcttttacttaagctatttcatgctggttctctcattcaccttttaactttttacattatgaatcaacctaagaaaaaaggcaagtttcctcacatctagaaatgataaatggtgtacagtcataagctagaatatgtttttataatgcttttttgttcttttagcaacacttgtaaatacaagtactcctctatttttgttctttttttgtaaactataacgtatcccgttggtgtaccagtgagttcattttactgtaaactaagaataacatacctttttaatactgaaagttgactactcatcaagaaatgtagctagattctttatgtaacacttttgaggggcagtggggacataatgggttgtggaaaatgtgttttaacatttttattttttttttattctacccgagttcattgttgtttgaaccatcctctaaagatttcctttaacctctaaatgttgtgcttttaggttgataacaaatgtaaagcactgaggagggaggaataaagcatacaagttaatttctaattttcgcaagcctgaaccatcctaatctgatagtaggatgtatggcttcttccttttcaccttgtgtgatgtttaatttgagacgatctagccataaaactagtaatcttgaattcctcttgagctggatggtgattagccattgtgaaaacagattatatggaaattgtgcatattgctaaattttaaaacatggatttatcaactgataataaaatatatcttacaagataaccacttgttttttaatgtaaaattgcacaagggcttaagtttcattgcctttcacagtttaatctgtatatgaaatggtgtagatacagtggaaatggttttccttaaaaccatctctttaaagctgcctttctggtgagtactgttttatacttttatatattataattttatcttctaaaattaactgaaataggacactttgattaaagaggtgagcactctgaatttctacatctttggatattacttgaatcaagaatattagaaaattattttaccacctggcatttcccttttaatttgctagttcacttttttctgaccttcacttaacagactataaatacaaaaactttgaacacataaattatttcattttggtgagatggaataaatgtttaaaattagtatttaagaaagttcttaaacattttttttagttggcagccaaaagatttttcttagtgctttggagacattgcataggtgtaaaattaagataccagaacttcattctgttcttgttgaagctgttgttgtggtgattcatgagcagtaagctggagttagagtggaagaagggtttaccaaaattcttcctgcagactagttgcttacagggtttctttgagaggcttaaaaatttcaaaagtattatttaagccactctaaccctgcatgaaaaattggagttagaaatactgatttctgagaccacgtataccagtgaaaattagcttctgagtaaatttctaatttatgccctgctttatttagcctcgctatatgtaacacatggattattttttccctctagtttttaactatatcctagattaaaaccagcatatgctaagaatgtttttacattctgtttcctcctgtgatctttctgaaccaataataaacagtcaactgtgatgctttttagtatgaacaatgatagttttctaaaatctgaaaatcaatacctgagtatgtgatgtggcaatgcattcttctagataagcactaaacaaagtatggaccctcaatttatgtctttaagatttaaagtgaagtaaatttctaaggaactgtgtcctttcctagcaggaataaacagtgaaaatttggtaagtatttaacttgaagtgcatgtaatagtgatgagagtaagtagccaaatttccgtaatataaggtaatgtttaaaagtgagcaataattattgcatctcttttgcgacttcatgtagatgtgattaacattttttacaaatttgcctgcataaagattaaattggaacataccttaaaaaaaaaaaaaaaaaaaaaaaaaaaaaaaaaaagaaaaaaaaaaaaaaaaaaa

SEQ ID NO: 24762 - DNA, 3448 bp, Homo Sapiens
cgcagaaagtatgtcccttctctcaccatgagctggctctccagttcccagggagtggtactaacagcctaccaccccagcggcaaggaccaggccgtcgggaacagccatgcaaaggcaggggaggaagccacctcgagtcgcagatatggccagtacactatgaaccaggaaagcaccaccatcaaagttatggagaagcctccatttgatcgatcaatttcccaggattctttggatgaactatctatggaagactattggatagaactagaaaacatcaagaaatctagtgaaaacagccaagaagatcaagaggtggttgttgtcaaagagcctgatgagggagaattggaagaagagtggcttaaagaggccggtttatccaatctcttcggagagtctgctggagatccacaggaaagcattgtgtttttatcaacattgacgcggacccaggcagcagcagttcagaagcgagtagagacggtctcccagaccttgaggaaaaaaaacaaacagtaccagattcctgacgtcagagacatatttgctcaacagagagaatcaaaagaaacagctccaggtggcactgaatcgcagtcacttagaacaaatgaaaacaaataccaaggaagagatgacgaggcatctaaccttgttggtgaagagaagctgatcccacctgaggagacgcctgcccctgaaacagacatcaacctggaggtatcatttgccgagcaagcactcaatcagaaagagagctccaaggagaaaatccagaagagcaaaggcgatgatgccacattacctagtttcagattgccaaaagacaaaacgggtaccacaaggattggtgacctcgcaccccaggacatgaagaaagtttgccatttagccctaattgagctgactgccctctatgatgtattgggtattgagctgaaacaacaaaaagctgtgaaaatcaaaacaaaagattctggtcttttttgcgttccattgacagcgctattagaacaagatcagaggaaagtaccaggaatgcgaatacccttgatctttcaaaaactgatttctcgaattgaagagagaggtttggaaacagaaggcctcttacggatccctggagctgccattagaatcaagaatctttgccaagaactagaagcaaagttttatgaagggacttttaattgggaaagtgtcaaacagcatgatgccgccagcctgctgaagctcttcattcgggagttgccccagccactgctcagtgtggagtatctcaaagcctttcaggctgtccagaatcttccaaccaagaagcagcaactacaggctttgaaccttcttgtcatcctcctacctgatgcaaacagggacacactgaaggcccttcttgaatttctccaaagagtaatagataataaagaaaaaaataaaatgacagtcatgaatgtagcaatggtcatggccccgaatctctttatgtgtcatgcattgggattgaagtccagtgaacagcgagaatttgtaatggcagctgggacagcaaataccatgcacttattgattaagtaccaaaaacttctgtggacaattcccaagtttattgtaaaccaagtgaggaagcaaaacacggaaaatcataaaaaggataaaagagccatgaagaaattgctgaagaaaatggcttatgaccgagaaaaatatgaaaagcaagataagagtacaaatgatgctgacgttcctcagggagtgattcgagtgcaagctccccatctttcgaaagtttccatggcaatacagctaactgaagaactaaaagccagtgatgtacttgccaggtttctcagccaagaaagtggggttgcccagactctcaagaaaggagaagtttttttgtatgaaattggaggaaatattggggaacgctgccttgatgatgacacttacatgaaggatttatatcagcttaacccaaatgctgagtgggttataaagtcaaagccattgtagaagacttaacaagctgcagataaccatgtggacttctgtcataattcttgctgagtcaagagtgtaaataaaagaaatggcaggactcatattattcagttgtacccaagtatttaaaaatgactctcttaagccttaaaaagtcatagatttgtgctgctgccagaattatattaattattattaatgttattattagaaaaaaaatttctggagtgagagtaaagaggcttaattagtttgtgggcagttttcatatgctctgtgaaatgtgtccagatgtgacatagtttttttttttaatatgtggaaatgtcttctcttcccattcttttctcctaaaatcatatatactgtaatatatgctctctcacctctattacctcctcacatctaccctttcccagttaggtttgctttttgaccaaaaagataacaaataccaggtatggcaagttgtgaagacagcacattaaaacatacctaatttcacagtattcctgtcacgacagaatgttagtattcatctctttgaatcatttgctcaaataataacattccaccttttcctgctgtatcacaggaagtgatttgcattttttttcagttcatctgacttatgttcacagaaccgtatcagcgaccaagaaaataggactgtcagaagctgccagttattactgaaccattaaatacttatatactaagaataaataaaatatacccatgtgaaataataattggattatggataacaagagagtgaaagccaaagcactttctgtctactgtactcttctaaatggaattttaaaagtcatagctggctttacgtgttgtcattattagcattataaatatgcatgatagtataatccagtaatggttgaagaatgtattttacttaaagagggatttttttttttaagtcctgaataagtctactggaagaattattcttctgggtgaaaaagcttttgtttgtgttcttattttaaataatcggagtcaatttattaaaatgttcttgaaagtactattcccagggattttaatgcacaaaccatattgtgacaagagatgagcctctgtactgtaaataagaaatgaagtagagaaatgttaaatattttatgagtttagaatatagtaaataaaaggtgatgtaaatgaatgctgcacaaacggtgttcatgatacttttagtagtactttaggaaaaactacacattctcagaagctcttgatgtctctaatgaagggggggaatgctgttaatgagaacagtcataaatttttagcatataattacaagaacagcctgtggatatgatcacttaaatgattttgtggtgattcgtgccattgcttttttatttaaaagaaaattttgtaattaaatgcctttttctaaaaaaaaaaaaaaaaa

SEQ ID NO: 24763 - DNA, 3839 bp, Homo Sapiens
  misc_feature (3838)..(3839): n is a, c, g, or t
gacctgacgcaggcaaaacccatttatggcggttggctgctcctggctccagatgggaccgactttgacaacccagtgcaccggtctcggaaatggcagcgacggttcttcatcctttacgagcacggcctcttgcgctacgccctggatgagatgcccacgacccttcctcagggcaccatcaacatgaaccagtgcacagatgtggtggatggggagggccgcacgggccagaagttctccctgtgtattctgacgcctgagaaggagcatttcatccgggcggagaccaaggagatcgtcagtgggtggctggagatgctcatggtctatccccggaccaacaagcagaatcagaagaagaaacggaaagtggagccccccacaccacaggagcctgggcctgccaaggtggctgttaccagcagcagcagcagcagcagcagcagcagcatccccagtgctgagaaagtccccaccaccaagtccacactctggcaggaagaaatgaggaccaaggaccagccagatggcagcagcctgagtccagctcagagtcccagccagagccagcctcctgctgccagctccctgcgggaacctgggctagagagcaaagaagaggagagcgccatgagtagcgaccgcatggactgtggccgcaaagtccgggtggagagcggctacttctctctggagaagaccaaacaggacttgaaggctgaagaacagcagctgcccccgccgctctcccctcccagccccagcacccccaaccacaggaggtcccaggtgattgaaaagtttgaggccttggacattgagaaggcagagcacatggagaccaatgcagtggggccctcacaatccagcgacacacgccagggccgcagcgagaagagggcgttccctaggaagcgggacttcaccaatgaagcccccccagctcctctcccagacgcctcggcttcccccctgtctccacaccgaagagccaagtcactggacaggaggtccacggagccctccgtgacgcccgacctgctgaatttcaagaaaggctggctgactaagcagtatgaggacggccagtggaagaaacactggtttgtcctcgccgatcaaagcctgagatactacagggattcagtggctgaggaggcagccgacttggatggagaaattgacttgtccgcatgttacgatgtcacagagtatccagttcagagaaactatggcttccagatacatacaaaggagggcgagtttaccctgtcggccatgacatctgggattcggcggaactggatccagaccatcatgaagcacgtgcacccgaccactgccccggatgtgaccagctcgttgccagaggaaaaaaacaagagcagctgctcttttgagacctgcccgaggcctactgagaagcaagaggcagagctgggggagccggaccctgagcagaagaggagccgcgcacgggagcggaggcgagagggccgctccaagacctttgactgggctgagttccgtctcatccagcaggccctggctcaggagcgggtgggcggcgtggggcctgctgacacccacgagcccctgcgccctgaggcggagcctggggagctggagcgggagcgtgcacggaggcgggaggagcgccgcaagcgcttcgggatgctcgacgccacagacgggccaggcactgaggatgcagccctgcgcatggaggtggaccggagcccagggctgcctatgagcgacctcaaaacgcataacgtccacgtggagattgagcagcggtggcatcaggtggagaccacacctctccgggaagagaagcaggtgcccatcgcgcccgtccacctgtcttctgaagatgggggtgaccggctctccacacacgagctgacctctctgctcgagaaggagctggagcagagccagaaggaggcctcagaccttctggagcagaaccggctcctgcaggaccagctgagggtggccctgggccgggagcagagcgcccgtgagggctacgtgctgcaggccacgtgcgagcgagggtttgcagcaatggaagaaacgcaccagaagaagattgaagatctccagaggcagcaccagcgggagctagagaaacttcgagaagagaaagaccgcctcctagccgaggagacagcggccaccatctcagccatcgaagccatgaagaacgcccaccgggaggaaatggagcgggagctggagaagagccagcggtcccagatcagcagcgtcaactcggatgttgaggccctgcggcgccagtacctggaggagctgcagtcggtgcagcgggaactggaggtcctctcggagcagtactcgcagaagtgcctggagaatgcccatctggcccaggcgctggaggccgagcggcaggccctgcggcagtgccagcgtgagaaccaggagctcaatgcccacaaccaggagctgaacaaccgcctggctgcagagatcacacggttgcggacgctgctgactggggacggcggtggggaggccactgggtcaccccttgcacagggcaaggatgcctatgaactagaggtcttattgcgggtaaaggaatcggaaatacagtacctgaaacaggagattagctccctcaaggatgagctgcagacggcactgcgggacaagaagtacgcaagtgacaagtacaaagacatctacacagagctcagcatcgcgaaggctaaggctgactgtgacatcagcaggttgaaggagcagctcaaggctgcaacggaagcactgggggagaagtcccctgacagtgccacggtgtccggatatgatataatgaaatctaaaagcaaccctgacttcttgaagaaagacagatcctgtgtcacccggcaactcagaaacatcaggtccaagtccgtaattgagcaggtctcgtgggatacctgaaatgcacccgcttcccggcccatgcaggagagtctgaaggaaggcctgacggtgcaagaacggttgaagctctttgaatccagggacttgaagaaagactaggtgtgtcccatccaagttgagcacgcgccttccccagcttgcagcagcacaccccaagcgctgcttttcacctgtacctttgttttattattattattattattgctgttgttgtcatcgttaactgtgggcatggaatgcgtgaggctggcttctgggttgtccacaccactctctgctgtgttgacttcctgttgtcttcatcaaagcttttttccgtggtattctaaaattaggccagcagtgggggctgggagggcatctgtgttagtcctttcctggctgtgacccgccacactcactgtcagtattaaggcccagcagcctgttgataagctaccctgtctcaccatgtgctggtgtggaaacggggcccagccagcacgcctcaaggtagatggaatccccactggtcagagaaaaagctatgcggacactccagcttggcctgggtcacagcactgactcctcacccgctagtctggctgttaagaggagaaagtgcactgccttccagcccaggaggaggacagcattttgtatttgttccactgatgcagcttagaaccacacccctgagagtcgtggcaaacctttcacaacctggaaaatgttgaaagcaaccattcctatttttgtttgttttttattaaatcttgcacaaaaaaaaaaaaaaaaaaaaaaaaaaaaaaaaaaaaaaaaaaaaaaaaaaaaaaaaaaaaaaaaaaaaaaaaaaaaaaaaaaaaaaaaaaaaaaaaaaaaaaaaaaaaann

SEQ ID NO: 24764 - DNA, 3369 bp, Homo Sapiens
caccagcctcgtggccagctctgcgtctgcggtcaccaccaaggctcccggcatctccaaaggggacagtcagtcccagggactggcgaccagcatccggtgggggcagacgcctatcaatcagtccacaccctgggacactgatgagccaccctccaaacagatgagagagagtgacaatccaggcacagggccatgggtgaccacggtggccgccgggaaccagcccaccctgatcgcacactcctatggagtggcccagcctcccaccttcagcccggctgtgaacgtccaggccccggtcattggggtgaccccctcactgcctccccacgtggggccccagctcccgctgatgccaggccactactcgctccctcagccgccctctcagccactgagcagcgtggtggtcaacatgcctgcccaggccctgtatgccagccctcagcccctggccgtgtccacactgcccggtgtggggcaggtggcccgcccaggacccaccgctgtgggcaacggccacatggcagggcccctgctgcctccaccgccgccagcccagccgtccgccactctccccagtggtgcccctgccaccaatgggccccccacaaccgactcggcccacgggctgcagatgctgcggaccattggcgtggggaagtatgagttcaccgacccggggcaccgtagagaaatgttgaaggaattgaaccagcaacgcagagcgaaagcgtttacagacctgaaaattgttgttgaaggcagagagtttgaagtccaccaaaatgttctagcttcctgcagcttgtatttcaaggacctgattcaaaggtccgtgcaagacagcggccagggcggccgggagaagctggagctcgtcctgtcgaacctgcaggcagacgtcctggagttgctgctggagtttgtctacacgggctccctggtcatcgactcggccaacgccaagacactgctggaggcggccagcaagttccagttccacaccttctgcaaagtctgcgtgtcctttctcgagaagcagctgacggccagcaactgcctgggcgtgctggccatggccgaggccatgcagtgcagcgagctctaccacatggccaaggccttcgcgctgcagatcttccccgaggtggccgcccaggaggagatcctcagcatctccaaggacgacttcatcgcctacgtctccaacgacagcctcaacaccaaggctgaggagctggtgtacgagacagtcatcaagtggatcaagaaggaccccgcgacacgcacacagtacgcggctgagctcctggccgtggtccgcctccccttcatccaccccagctacctgctcaatgtggttgacaatgaagagctgatcaagtcatcagaagcctgccgggacctggtgaacgaggccaaacgctaccatatgctgccccacgcccgccaggagatgcagacgccccgaacccggccgcgcctctctgcaggtgtggctgaggtcatcgtcttggttgggggccgtcagatggtggggatgacccagcgctcgctggtggccgtcacctgctggaacccgcagaacaacaagtggtaccccttggcctcgctgcccttctatgaccgcgagttcttcagtgtagtgagtgcaggggacaacatctacctctcaggtgggatggaatcaggggtgacgctggctgatgtctggtgctacatgtccctgcttgataactggaacctcgtctccagaatgacagtcccccgctgtcggcacaatagcctcgtctacgatgggaagatttacaccctcgggggacttggcgtggcaggcaacgtggaccatgtggagaggtaatgaggccacggtcaggacaggggcatgctctttgctcaccaagaactgaaatcacgtcactcactgtacctcccaacacccactcagtggcgatggagcagagcctggaccattcatatgggcagtcatcccaggctcttcagtcacagcaccgggggcagcagggtgtgggatacaagcagatgggatgacatctgtgtcacctttgcagtcgctgagatgggagatggggcgcttctgtcgcgacaacccatttaggtgtcagacaagctggaggcccaagatccagttgcagaaggcctgggatgagccagaccctcctggccaggcagtcagggaacaccctgcaccatgagcaccagcccagagactgctggggtttcgggcaaagctggaagcaatgtttaaaatgcaggtcatgccagtggcggtgcctccttgtcctgccaagcggggggtcccacaccagggagctcccttcctccctccagccacacacaccaggacatctgttcgtaatacagagaaaggccactgcatacaaactaagcaatttagggagaacattcttgccaaccctctagaactttccagaagaaaaaataagccaaaggaccacgtgtgaacctgccctccgctgggagtcccagcctggcttcctcccaaggccattgtggagggtcagatacaggcatgaggggcgtgggctgaagtgggtgcttccggatgagaatacaaaatccttttcccttgagccagggagactgttctttcttacagagaacagatgcctgggggaaaagctcaggaagctttgtcaggcagcagaacggaggcttagtcctgcttttggagaaactagtgcctggagggtaacccgtcaggctgacctggcccaaagcacaacccaggggagacagctaagattgccagagcccctcctgcacctgagcccaccacccccaccgccatgtgtcaccagaaagcacatcttcccgtgggacatcatgttgcctatgaagccacacatacccctcaatttgtatttttcccccttggtggctaattggacacttgacaaatgttacagcaaagacggttgcagagtgaggcaggctctgaatgctcattgtgggcttttaactcctcccccaagtggagcccagagatggctcagtaacaacatttagttatcatattgatctggcaatcatgggcattcccacgtgaaaatgaggatattagcgcagttgctggacctgggttggccccggtgctggcagccttcagtgtgacccactgcccagctatgcataccccaagcattctggaagcatcggcttccgatcatttgtcatccaataataaacaaacacatgaaaaatgagacattttctctgtaggagtaaactgaactggatccgtcaaaaaaaaaaaaaaaaaaaaaaaaaaaaaaaaaaaaaaaaaaaaaaaaaaaaaaaaaagaaaaaaaaaaaaaaaaa

SEQ ID NO: 24765 - DNA, 3482 bp, Homo Sapiens
ggaaaaactcctgattctgaagataagttgttttctccagttattgcacgtaatctggctgatgaaatagaaagctatatgaacctaaaaagtcccctaggtagtaaatcttctagtatggaattacacagagaggaaaacagagagtctggcatgactactgcatttattcatgctctagagaggagatcaagcctacctttagatcatggttcaccagcacaggaaaatcctgaaagtgaaaagagctcacctgcagtgtccaggtctaaaacttttactgggcgtttcaagcagcaaaccccctctcgaactcataaagaacgttcaacttctttgtcagcactggtgcgttcttcgccacatggctcgttgggttctgtagtaaattctttgtcagggctaaagctggataatatactctcagggcccaagatagatgtcctgaaatctggtatgaaacaagcagcgacagtagccagtaagatgtgggtagctgttgcgtctgcctacagctactcagatgatgaggaagaaactaatagagactacagcttcccagctggcctagaagaccatattttgggggagaatatatcgcctaacacaagtatctcagggttggtccccagtgaacttacccagagcaacacaagtcttggcagtagcagcagtagtggagatgtaggaaaactgcattatccaacaggtgaagttccatttccaagaggcatgaaagggcaagactttgaaaaatcagatcatggttcttctcaaaataccagcatgtctagcatctatcagaattgtgcaatggaggttttgatgtccagttgttcacagtgtagagcttgtggagctttagtttatgatgaagaaattatggctggatggacagcagatgactcaaatttgaatacagcttgtccattctgtaaaagcaacttcttgcctcttctcaatatagaattcaaagatttgagaggttctgcaagctttttcctgaaaccaagtacctctggtgacagtttacaaagtggaagcattccattggcaaatgaatccttggagcacaaacctgtatccagtttagcagaacctgacttgatcaactttatggacttcccaaaacataaccagatcataactgaagaaacaggctctgcagttgaaccaagtgatgaaataaagagagccagtggagatgtccaaactatgaaaatttcatctgtgcctaatagtttatcaaagcgaaatgtgtctttgactcgaagtcacagtgttggaggcccattgcagaatattgactttacccagcgaccgtttcatggcatctcaacagttagtcttccaaatagtctgcaggaagttgtggatcctttaggaaaaagacccaatcctccccctgtttctgtgccctacttgagtcctctagtactccgtaaagaacttgaatctttgctagaaaatgaaggtgatcaggtgattcatacatcttctttcatcaatcaacatccaatcattttctggaacctcgtttggtatttcagacgtttggaccttcctagtaacttgccaggacttatcctcacatctgaacattgtaatgaaggtgtacagcttcctctgtcatctctgtcccaggatagcaaacttgtgtatattcagctgttatgggataatatcaaccttcatcaggaaccaagagaacctctgtatgtctcatggaggaattttaattctgaaaagaaatcatctctcctgtcagaggaacaacaagaaacaagcactttagtagaaaccatcaggcagagtattcagcacaataatgttcttaaacccatcaacctactttcacagcaaatgaagccaggcatgaaaagacaaaggagtttatacagagaaatcctcttcttatcattagtgtctctaggaagagagaatattgatattgaggcatttgacaatgaatatggaattgcatacaatagtctgtcttcagagattcttgaaaggttgcagaaaattgatgctccagcaagtgccagtgtcgagtggtgcaggaagtgttttggagcgcctctcatttaaatagagattcactagaatgttgacacacaaggcttggggattagatttcatctggaaacattcaagtttttttttccaaatcgtaagaactggtgaatacggaattgaagtaactcttggggacaatatataatgaattatgattcatattgcattaccttgaaatatgaagtgccatttgaatgtcccagggcttattaatattgaagattttcaacccctgaactgcttttctgcctctgtggaaaactactttgggattcttcagtatttgtagtagtttgatagaaataatgaggaaccatattcattctaggcattgtttatatttgaagttactgagtttgaggaatggcaaattaaatttgcctaacccccaaaacaaatgaaatatctcaattataaaagcaacatggccgggcacggtggctcaggcctgtaatcccagcactttgggaggctgagcaaggtgggtggatcacttgaggccaggagttcgagaccagcctggccaacacggtgagaccctgtctttactaaaaatacaaaaattagccaggcgcaccactgtagtcccagctactcaggctgaggcaggagaatcgcttgaactgaggcagaggctacagtgagtggagatcacgccactgcaactccagcttgggtgacagagtgagaccgtctcaaaaaaaaaaaaaaaaaaaaaaaagagagcaacatatttgtgtaagtttgtatatgtgtagggctgtgtaggtatgtgtatatacagccatattctaagtgtatatttattaaaatagattgcatgttgcaatacggttttctgaaaggggtctcattgactattaaataaatgactactactaaacttgtctgtagtcattaatcttaaaattacctgaaaatctgatgacagctgccttccctaactttaatgtattaggttggcacaaaattaattgtagtttttgccactattaatggcaaaaaccgcaattatttttgtaccaacataatacacctttcatattatgtattatcttgcttaatgggttttatcttgattatccagttacttccatcctcttcccaatgttaatttgcaatagttttaaaatgggaacaaatgaatcaatcatcagatagttaaaatgaaattaaatcagctgcctaataatttatggaattcattggaatgtgcttaaaatgctaaagtgtatgtcattgaacatgaaatcttttttcaggcacatacattgttggtattgatgactttttaaaacctgtgggataaacttgcactgcacacggaagttttattcttgtatatttagatttgtatgcttgtgagtaaaaatgtgcatttgtaaaaaaaaaaaaaaaaaaaa

SEQ ID NO: 24766 - DNA, 2703 bp, Homo Sapiens
gaagaagaaagaaaagcctatcgaaatcaagttgaggaatccactaaacaaatacaggttcttcaagcccaattgcagaggttacacatcgatactgagaatctccgggaggagaaggacagtgaaatcacaagtactagagatgaattgcttagtgcccgagatgaaattttgctccttcatcaagcagcagcaaaggttgcctctgagcgggacactgacattgcttctttacaagaagagcttaagaaggtgagagctgagcttgagcggtggcggaaagcagcgtctgaatatgagaaagaaatcacaagtctgcaaaacagttttcagcttagatgtcaacagtgtgaggaccagcagagagaagaagcaacaaggttgcaaggtgaactagagaagttgagaaaggaatggaatgcattggaaaccgaatgccattctctaaaaagggaaaatgttttgctatcatcagaactgcaacggcaagaaaaagaattgcacaattctcagaagcagagtttagagcttaccagtgatctcagcatccttcaaatgtctaggaaagaacttgagaatcaagtgggatccttgaaagaacagcatcttcgggattcagctgatttaaaaactcttctcagtaaggcagaaaaccaagcaaaggatgtgcagaaagagtatgaaaagacacagactgtactctcagaactgaagttgaagtttgaaatgactgagcaggaaaagcagtcaatcacagatgagctcaaacagtgtaaaaacaacctgaagctgctccgagagaaaggaaataataaaccctggccctggatgcccatgttggctgccctggttgcagtaacagccatcgtgctgtacgtgccaggtctggccagagcttctccatgagagcgttccttgagtccgtacaccgtcctccctctagaagctggcatcacactcatgctggggacaaacagaaccattttcttcctctttacctcttaaaacagcagaagtacaagaatacagctgtagggtcattgctttaaattatataaaatgtatctgtctataaagaagatataaaattgtgactttattctactgtaagcaataatttgcttgcaatttttcatgtaatttttaaattagtatgttaagattctgaatattatggtggcctaaagtaggcttcttggtacaccagattatttataacattaaatttatgagtattttactctgaattctgatcaccagataattcatttttctgatttgataactacccaaaccaaacaaccaatacatacatgggaagagaggccctgtgtgctcagtgcctatcagtttgaaatatatacacatatatatattttttacatatttacgccatttttacttgttatgaaaccactgagctattgggaacaagacttagagacaactatttgcgtggattttttttttttttaaggaaaaatacgtttggaaaataaactgttatggtgataatttggggaatatgtgcacgcttgttcagccttaatgtgacttgaagatgtggaggacatcaactttgaaaaactttccatgagagtgtattttcttgagcaaactgaagtatttctgggagcaaaaacatagtaattacacaatttcagtgcagtcaaccaaaatgttgagtcaattggaatgtaatttattaaaccatgtatttaaagagatatttttctttaaaagccaagttactttctcatatacagcattttaggaagcatgattttttttttctatcatctattcctccaagcatgtttaattgaagaaagtattaatatctctttagataagcttgtattgacctaatttggtttatgatgtgtcagagctaattcatgttcagggtgagcgttgtacctaccaacaaatttcctggttgggtatgcaaatggttattttctttttattgttgttaattgggactttctgttaatgaaaagcactattcccaagattaatagtgttctatgcacaatgaagcacctaaaaacactgcttgatattataaatttaaaacacaagtgaaagtttagccatggttttgtgcggcatcatagttatgtcaataaagtttatttaggtcatagaatatcctaaagtatcacatagttaaatttttcagtcagtgaagaccgggagggaatgtcagtgaattggcttgaatgttctgtggcaatccacaggtctagccaaatattgaaataggagtttagggtataatttgccttgtgatgtttggcagtcactgtttatactttaaaggttatattttaagctatttgagattgcttttgggaagatcactagatttatggaggaattagtcacaaatgacttgtagaaaatactgtcatatagttcatttcatcattttctgttgcaggaagccactccaccacagaatgctaatatgccagtggtacccagtacctcttgtatataggttattgcaaatattgttctgaaatgcttaacttcagaattacattttttaaagtaaataattgttttaaatctattttgtaaagatataaagtacaatagaatttctggagtacagattaaactatttgcactaacacacgtgacgtgcatgatttaataaaataactttactctccctaaaaaaaaaaaaaaaaa

SEQ ID NO: 24767 - DNA, 3636 bp, Homo Sapiens
atgggatccttgcagggaatcgccaccaagattttgattagaattttgtcagatgctctgataagaaaagaaactgacctgaaaagctcaactattgttactccaattattttgaggactgaccctcagggatttttcttttactggacagatcaaaacaaggagacagagctactggatctcagccttgtcaaagatgccagatgtgggagacacgccaaagctcccaaggaccccaaattacgtgaacttttggatgtggggaacatcgggcgcctggagcagcgcatgatcacagtggtgtatgggcctgacctcgtgaacatctcccatttgaatctcgtggctttccaagaagaagtggccaaggaatggacaaatgaggttttcagtttggcaacaaacctgctggcccaaaacatgtccagggatgcatttctggaaaaagcctatactaaacttaagctgcaagtcactccagaagggcgtattcctctcaaaaacatatatcgcttgttttcagcagatcggaagcgagttgaaactgctatggaggcttgtagtcttccatcttcaaggaatgattcaatacttcaagaagatttcactccagaagtgtacagagttttcttcaacaacctttgccttcgacctgaaattgataacatcttttcagaatttggtgcaaaaagcaaaccatatcttaccgttgatcagatgatggattttatcaaccttaagcagcgagatcctcggcttaatgaaatactttatccacctccaaaacaagagcaagtccaagtattgattgagaagtatgaacccaacaacagcctcgccagaaaaggacaaatatcagtggatgggttcatgcgctatctgagtggagaagaaaacggagtcgtttcaactgaaaaactggatttgaatgaagacatgtctcggcccctttctcactatttcattaattcctcgcacaacacctacctcacagctggccaactggctggaaactcctctgttgagatgtatcgccaagcgctcctgtctggttgtcgctgtgtggagctggactgctggaggggacggactgcagaagaagaacctgtcatcacccatggcttcaccatgacaactgaaatatctttcaaggaagtgataaaagcaattgcggagtgtgcatttaagacttcaccttttccaattctcctttcgtttgagaaccatgtggattccccaaagcagcaagccaagatggcggagtactgccgactgatctttggggatgcccttctcatggagcccctggaaaaatatccactggaatctggagttcctcttccaagccctatggatttaatgtataaaattttggtgaaaaataagaagaaatcacacaagtcatcagaaggaagcggcaaaaagaagctttcagaacaagcttccaacacctacagtgactcttccagcatgttcgagccctcatccccaggagccggagaagctgatacggaaagtgacgacgacgatgatgatgatgactgtaaaaaatcttcaatggatgaggggactgctggaagtgaggctatggccacagaagaaatgtctaatctggtgaactatattcagccagtcaagtttgagtcatttgaaatttcaaaaaaaagaaataaaagttttgaaatgtcttccttcgtggaaaccaaaggacttgaacaactcaccaagtctccagtggaatttgtagaatataacaaaatgcagcttagcaggatatatccaaaaggaacacgtgtggattcatccaactatatgcctcagctcttctggaatgcaggttgtcagatggtggcacttaatttccagacaatggacctggctatgcaaataaatatggggatgtatgaatacaacgggaagagtggctacagattgaagccagagttcatgaggaggcctgacaagcattttgatccatttactgaaggcatcgtagatgggatagtggcaaacactttgtctgttaagattatttcaggtcagtttctttctgataagaaagttgggacttacgtggaagtagatatgtttggtttgcctgtggatacaaggaggaaggcatttaagaccaaaacatcccaaggaaatgctgtgaatcctgtctgggaagaagaacctattgtgttcaaaaaggtggttcttcctactctggcctgtttgagaatagcagtttatgaagaaggaggtaaattcattggccaccgtatcttgccagtgcaagccattcggccaggctatcactatatctgtctaaggaatgaaaggaaccagcctctgacgctgcctgctgtctttgtctacatagaagtgaaagactatgtgccagacacatatgcagatgtcatcgaagctttatcaaacccaatccgatatgtgaacctgatggaacagagagctaagcaattggctgctttgacactggaagatgaagaagaagtaaagaaagaggctgatcctggagaaacaccatcagaggctccaagtgaagcgagaacgactccagcagaaaatggggtgaatcacactacaaccctgacacccaagccaccctcccaggctctccacagccagccagctccaggttctgtaaaggcacctgccaaaacagaagatcttattcagagtgtcttaacagaagtggaagcacagaccatcgaagaactaaagcaacagaaatcgtttgtgaaacttcaaaagaaacactacaaagaaatgaaagacctggttaagagacaccacaagaaaaccactgaccttatcaaagaacacactaccaagtataatgaaattcagaatgactacttgagaaggagagccgctttggaaaagtccgccaaaaaggacagtaagaaaaaatcggaacccagcagccctgatcatggttcatcaacgattgagcaagacctcgctgctctggatgctgaaatgacccaaaagttaatagacttgaaggacaaacaacagcagcagctgcttaatcttcggcaagaacagtattatagtgaaaaataccagaagcgagaacatattaaactgcttattcaaaagttgacggatgtcgcagaagagtgtcagaacaatcagttaaagaagctcaaagaaatctgtgagaaagaaaagaaagaattaaagaagaaaatggataaaaagaggcaggagaagataacagaagctaaatccaaagacaaaagtcagatggaagaggagaagacagagatgatccggtcatatatccaggaagtggtgcagtatatcaagaggctagaagaagcgcaaagtaaacggcaagaaaaactcgtagagaaacacaaggaaatacgtcagcagatcctggatgaaaagcccaagctgcaggtggagctggagcaagaataccaagacaaattcaaaagactgcccctcgagattttggaattcgtgcaggaagccatgaaaggaaagatcagtgaagacagcaatcacggttctgcccctctctccctgtcctcagaccctggaaaagtgaaccacaagactccctccagtgaggagctgggaggagacatcccaggaaaagaatttgatactcctctgtga

SEQ ID NO: 24768 - DNA, 1960 bp, Homo Sapiens
ctgagccagtcgttcctgtcggaagggcgggcctgctcatcctgacgagaatttgcttttctgctttataggggattgcaggccaggcccactgacaggagcaccttgagaaccacctgaacacaagagaatgagggtgccccaaagtggaaggaagcttctggcccctgggccgttttgggaagggcccaggatactcacgggggctgaagggcaatgtgaagagtgactgcaagtcctggcattttctgtggtgtcagcaaatgcccctttattttaaatgattccagacatctgggcagcatagcttggccaccatcactcaggcttgatcctgctgttgagctgctcctgtctcctgtttacctcactcctgttgggaaggccatcgcatgctcctaggctccagagtcccctgtaggtctctaccagcaggtcgcctctgggagaacgtttcatcttcaggctctagaaactcctgttgcggaattgctggctttagtagaaaagatatgtcaggatttagaaatcgtattgaactctcctggacttctgctccatgatttcattttgctttcacgaaccagcgatccctaccttggggtgggaaattcaattgtaggcagcaaataactcaaccctcctgtaacccctgaggattataacgaccccatgacccccgatgacagccagcagtttggtgactagagttttttgagcctgccattctcagtagcagctttggtctggagatggaacgtggagcagggaatctgacagccacgtttctcgtgatcacgtggactggagttgtttttgttatctggggtggaaaattgcaatgatcaagtttcttttttattttttttttacttagaaaagcaaatattgtgtttttgtaataaatccctttcagcaaaattgcggaggatcattcatccactagggccccacctgaggcacagcgctgactcatcacggtggtaccagtaggtcagccatctggaaacagaagtggccctaattgggccaaaatgtggtaagactcgctggcctcaggcagggccaggccagttccctcacttctctgcacacctattcccagattccatccagagcaaagctgatgtttatcgtctcattgtacttaggctttcgtactttaaaaaattatgactttttaaaaataagccttcagcagacagaagtgaagaaatttagcctgggttgcctcagcaacaaagtctgcggttcctaagagccacatgttggggaagtggggtgaccaaacttggtgacataggttgattgatcagaccctcagccttacaagcaagagctcatgcagatccacagagccatgcacatcctgtcttcctgaccttcctcaggtggcaccacctgcgccccatggacctgctgtatcggtgtcatgtggaggtctgatgaatcctttaaaacctaactgtgatgtcgtaaatgtaactgtgctacctttatatctactgaagggcagcgtctgcatccgagggaaattcaacatgaaacaaccatcgttttagttgcactcagtctgtccatatgacatacacatgaagtgaatgtttccttatgttttcaggtctacaatgtttagtacatgtaaataaggaaaaaatttgataaatatggtaaattaagttatagcgtgtcatttgattcttattttgctgtctcttgttatttaattttcctaatgctccacatctaggttccttcctaggtggtgggaacaccttgcagacgtgtgtgcaccaggacacaccgcggcccaggcagccacaccgagaaagcacacatctccactgatggcagccacccgactctccagttaacctcttttactctttaattctgatttactgtgatgatttaataaagtggaaacacagcaaaaaaaaaaaaaaaaaaaaaaaaaaaa

SEQ ID NO: 24769 - DNA, 1855 bp, Homo Sapiens
ttttttttttttttttgccagagaaaacgtttaattccctcatgaccaagacaaaaaagaactggcttcaacaactagctgggtctgtgctggcctccaagaccttgaatagcccagatatggagaggttaggtaatgtggccatagtgggcgtgggatgagacatcatcagttcacgccaacacccgtggctttcctcagcagcccaggtttctccatttccccctctgggctctgaatttgtcctcctgtcccagactcatagcctcccctaaagggcagaaggtaccagtgaggctgaggctgaaggaacacccagagactccaagatcggaggggagggcccactccctggagcctactgaccccctccagctggactgacagcctgccagggacaaagcaggaccctgaccacaggaccctcgggaatagcccctctactcttgctccccagggaactcccctggaagagggaccctcagcatttctgggagtccaggggcctgctgcccacaatccccaggtagcctcagataaggaaaaagataacaagttggtactgaaaataaagcaagcgaagagggatttaaaaaatctcaacttccttttcatcctgacaggatttccccaagcgtgctgcagaaaaagcagcatttaaatagagtcctgaggtaacagttttccgagtgcccaggcactcgaggcggggccgggctggcccattgttgacagtgtcccacagagccagcctgccactaggcctctagcactgagctcttggcctccacatactccagggccttggccttgactgcctgcacatccttctcagtgccatgctgcttctcgtagtccaggtagcgcttgaagaagaacttcattctcttgggggccaagctcagatgaatgacccgctcaaagatgtcccggacgtccttctggctgccgtgcttgatggtcatgtcgatatagaccgaccagacatctgtgcgctttgggtaggtgctcagcgtgttctcaaaaatggctttggcccgctctgcatcccccagctgaaactcaagctgggcaaacttggcaatgacatccacatgctccttgctaggcaggcactccagggctcgctgcagcacgcggtgactggctgcagcctggctcctccgcagaaggaaggcgccgtatttgatccacacagctttctcctgccggaaacgcttcagcatccggttgtagagttcaccagcttcctggaatttctctgacttggcgtagatgtcagccaggtggagaaagactttgagaggctcgttgtactgcacggctcgctcaaagaccttggtcagggactcctgagagccgtacatgttctcgaggttcagcagagccacccacacgttcagcttctcctgctcctctctgaaggagatggtcttaagggccctctcagccacggcacgggccttctcgatctccgtggcctgcaggtggaaagccatgtactgcagccacagaatggagctgttgggggagctcagcaccagtcggtcaaaatcatccgcggactctggctgccgcccaggatccatcagcgcctcctcaatgcgggacagttccttctctgccttctgcttctccaactccctttctttcttgcttttctttatcgtggcttggtgtggcttctcatcctcctcgctgtctgagctctctgctagaggtggcaaggccggggtcagagagtctagtcccacattccaagcgaagcctgaagacagctgcagccggggcgcttctgctggcttggtttgcttctccttgggcagcacattcgtctcttctgcctcctcttttc

SEQ ID NO: 24770 - DNA, 1026 bp, Homo Sapiens
cggcggccggagggcccaggacagccccgggagggcggcgaggcggagcaggagcgccccggctccggccacattctcagagtcaggaaaaggggcgagaggccacatgtctccctctcgcccaactgaaaacgaaacggcgctccagcagattgggtggaaagagctgggtctcttttctctgtttttcacgctagaaagggcttgtaaacattgttccttttaaaatgacctaccccaggcatttgtttgggcacacttctgtcctggggtcatcgttcctaggtggcttcggacctgggacttttcctgtatctgcacattgtcgttttatacacaattgccaaggtgggactgctttcaactttactgtgcttgaagctgcaaaggttctgccctgatgtttcctggaataatgctgaggactgcctttcgggtagccgccctattcagttcacttcatctcggaaatacctgacccctgccttggatccagcggccctcctgagagctgaggaaggaggaaatcctatgtgtctgctcccggagctgccacaacccatcttcccacaacttggaacttggaaaaaggaacccaggacacgactttgcttttcttttggacctagttggtgattatactctgtctcccatggagaccacgtcttgcatccttccttctatatgggatttaggatagaaattaaaaagaaaacatattattttgagtcttgatttggagaaaggtagtattcaggaggaagtaggctatgatacacatagaaaatttgaggacagtgttacttaacaaggacatttctgtctctgcagaagtcacagcttggaggaaaccagtttgcactatttgatgaggaatttggccaccaaaccactgatactttcccaaaggtttggcagaaattgttttttgagtggctcaccagagtacccagaagaatcagtatggaattagaggacagtggcctaccctaaataaagacatgagtgatgtaaaaaaaaaaaaaa

SEQ ID NO: 24771 - DNA, 1895 bp, Homo Sapiens
gcgcacgtccggcgggctcctggagcctggaggaggccgaggggaccatgtccgggaggcgcttccacctctccaccaccgaccgcgtcatcaaagctgtcccctttcctccaacccaacggcttactttcaaggaagtatttgagaatgggaaacctaaagttgatgttttaaaaaaccatttggtaaaggaaggacgactggaagaggaagtagccttaaagataatcaatgatggggctgccatcctgaggcaagagaagactatgatagaagtagatgctccaatcacagtatgtggtgatattcatggacaattctttgacctaatgaagttatttgaagttggaggatcacctagtaacacacgctacctctttctgggtgactatgtggacagaggctatttcagtatagagtgtgtgctgtatttatggagtttaaagattaatcatcccaaaacattgtttctgcttcggggaaatcatgaatgcaggcatcttacagactatttcaccttcaaacaggaatgtcgaatcaaatattcggaacaggtgtatgatgcctgtatggagacatttgactgtcttcctcttgctgccctcttaaaccagcagtttctctgtgtacatggaggaatgtcacctgaaattacttctttagatgacattaggaaattagacaggtttacggaacctcccgcctttggacctgtgtgtgacctgctttggtctgatccctcagaggattatggcaatgagaagaccttggagcactatacccacaacactgtccgagggtgctcttatttctacagttaccctgcagtttgtgaatttttgcagaacaataatttactatcaattatcagagcccatgaagcccaagatgctgggtatcgaatgtacaggaagagccaagccacaggctttccatcacttattacaattttctctgcccccaattacctagatgtctataacaataaagctgctgtgttgaaatatgaaaacaatgtcatgaatatcaggcagtttaactgttctccacacccctactggcttccaaactttatggatgttttcacatggtctttgccttttgttggggaaaaagtcacagagatgctggtaaatgtgctcaacatatgctctgatgacgaactgatttctgatgatgaagcagaaggaagcactacagttcgtaaggagatcatcaggaataagatcagagccattgggaagatggcacgggtcttttcaattcttcggcaagaaagtgagagtgtgctgactctcaagggcctgactcccacaggcacactccctctgggcgtcctctcaggaggcaagcagactatcgagacagccatcagagggttctcgcttcagcacaagatccggagttttgaagaagcgcgaggtctggaccgaattaatgagcgaatgccaccccgaaaggatagcatacacgctggtgggccaatgaaatctgtaacctcagcacactcacatgctgcgcacaggagcgaccaagggaagaaagcccattcatgacttagagtcctgccgtgctcaggtggatctaaaactcaagaacaaattctatttatttattattggaaaatgaaaagcaactcaaaacaacttcaacgtggaggtgcatttataattcagtctgcatttattctgtaaaaaggtggctgttttataaattcttttaatttatgttcaatatatataaaaagtgcatctgttttgtttttcccttttttctccataattttaagaaatgaatctgattgttgtcaacacatttgtgaagtcttgtgctataaaggggaacttcccctaataaaagggccttggaaacctcaaacctgggtttctgacccc

SEQ ID NO: 24772 - DNA, 2411 bp, Homo Sapiens
ggccgcgcgtcccagagagccagccccggccgccgtcgcggggaagtgccgcctggtggggtcacggcgcctgaagcccacgtgcgccgccgagcccgaggtggcctcgagcgcggcggctgacagcacagcccgcctgagctgcctcccgcgctcctccccgaggaaaggattttgatttcaaagaaaggaaggaaggaaggacaactcccagcttccccgtcccgccctccccgctccgagggccgcgccaggccatgcccaagaaggcggcggcggcggcgaaccagcagaagggactttcctggcagcccggcgacgaggagcgcggacagtgagtttgctctgccccggttcatggttcctgcaagccctctaggaggccgaaagctgcagcccctccccttgccccgaagagccttccgcgttctctcgccctcgggcccaccccgcgccgcccgggctcccgccgccgcagcccagtgccctctgcccgcggcggtggatggcatgatggtgcggggaaggcaccgcggccttggccagctgagtcgcgacggccgccggggcggcggcagtggccgcggcagcggcggtggtagcgggctccccagcggcatgccagtgccccccgggcgcgatggctagcggcagcgccgggaagcccactggcgaggcggcttctccggctcctgcgagcgccatcggcggggccagctcgcagccgcggaagaggctggtatccgtctgcgaccactgcaagggcaagatgcagctggtggctgacctgctgctgctgtcgagcgaggcgcggcccgtgctcttcgagggccccgcctcctctggtgccggcgccgagtccttcgagcagtgccgggacaccatcatcgcgcgcaccaaggggctctccatcctcacccacgacgtgcagagccagctcaacatgggccgcttcggggaggcgggggacagcctggtggagctgggcgacctggtggtgtcgctgaccgagtgctcggcccacgcggcctatctggccgctgtggccacgccgggcgcccagcccgcgcagccgggcctggtggaccgctaccgcgtgacgcgatgccgccacgaggtggagcagggttgcgccgtgctgcgcgccacgccgctggccgacatgacgccgcagctgctgctggaggtgtcgcagggcctgtcgcgcaacctcaagttcctgacggacgcgtgcgccctggccagtgacaagtcacgggaccgcttttcgcgggagcagttcaagctgggcgtcaagtgcatgagcaccagcgcgtcggcgctgctggcctgcgtgcgcgaggtgaaggtggcgcccagtgagctggcgcgcagccgctgtgcgctcttcagcgggcccctggtgcaggcagtgagcgccctggtaggcttcgccaccgagccgcagttcctgggtcgcgcggcagctgtgagcgccgagggcaaggcggtgcagaccgccatcctgggcggcgccatgagcgtggtgtcggcctgcgtgctcctgacccagtgcctcagggatctggcgcagcaccccgacgggggcgccaagatgtcggaccacagggagaggctgaggaactcggcctgcgccgtgtctgaaggctgcaccctgctatctcaggctttaagggagaggtcttcgcccaggactttaccgccagtgaattccaattctgtgaattagcaccccacccccataccccttcttccacccccagactaaaggaagatacttactctctgcccctctccatttataccaaagaaatcataggtgaaaccccctaccctccccaacgttaaatgctcgagaggaatcttccacaaggcagggccatgcacgcaacctgcacacgcacttggagggcccaggtgtctctccaccagcccccatgcagtagggactggaagatatgtcatctgctggttgtgttatcactcccaccccctaccccagcccgtcttccggaatttctcaactaaatttcattattgggcaggaaggaggtcatgggttcatttcatttttgttttttgtgtttttaattaaaagaaaggttacctcagttttcactccttagacatggatgtagctacctttttttgtatgtctttttttttttaagcaatcgtgttgaattaggagtatacttggtgaggaaagagtatgaatttgccatgtgatttgcaaatggggggaagctactgtgagcgtgtgtttttttaatttacactatagagtgattttttttcccccaacgtcaagtttttaccttgcatgtactggagtatttatttcatctattaaaatgttatgtttctcagaaaaaaacctcgtggcgaattcttggcctcgagggccaaat

SEQ ID NO: 24773 - DNA, 4935 bp, Homo Sapiens
aattcgggaacgtgcctgcgcgtgcttggatagttcatttaaagcccccatccctgcaaggtggtgctttctaccaatatgaatcttttcaacctggaccgttttcgctttgagaaaaggaataagattgaggaagcgcccgaagcaacccctcaaccttcccagcctggcccttcttcaccaatttctcttagtgctgaagaggagaatgctgaaggggaagttagcagggcaaacactcctgattcagatataactgaaaaaacagaagattctagtgttccagaaactccagataatgaaagaaaagcaagtatatcatatttcaaaaatcaaagaggaatacagtatattgatttgtcttctgatagtgaagatgtcgtttccccaaattgctccaatacagttcaagagaaaacattcaacaaagatacagtgattatagtttctgagccatctgaagatgaagagtcccaaggccttcctaccatggcacgtagaaatgatgatatttcagaactggaagacctttcggaattggaagaccttaaagatgctaaacttcagactttgaaggaactttttccacaaagaagtgacaatgatttacttaagttgattgaatcaacaagcactatggatggagcaattgctgctgccttgctgatgtttggtgatgcaggtggtgggcccaggaaaagaaaattatcttcttcttcagagccatatgaggaagatgaatttaatgatgatcaatctataaaaaagacaagactggatcatggagaggaatcaaatgagtctgcagaatctagcagtaattgggaaaagcaggaaagtattgtactgaaattgcaaaaggaatttcccaattttgataaacaggaacttagagaagtactcaaggaacatgaatggatgtacacagaagctttagaatctctaaaagtgtttgcagaagaccaagatatgcaatatgcatcacaaagtgaggttccaaatggaaaagaagtttcttcaagaagtcaaaattaccctaaaaatgcaactaaaacaaaactaaaacagaaattttcaatgaaagcacaaaatggctttaacaagaaacgtaaaaaaaatgtttttaatccaaagagagttgttgaagactctgaatatgattcaggttctgatgtcggtagttcactagatgaggactatagtagtggtgaagaagtgatggaggatggctataaaggtaaaattcttcacttccttcaagatgcttcaattggtgaacttactttgattcctcagtgttctcagaaaaaggctcagaagataacagaactccggccctttaatagttgggaggctctgttcacaaagatgtccaaaactaatggcttatcagaagatttgatatggcactgtaaaacactgatccaagaaagagatgtagttataaggcttatgaacaaatgtgaagacatttcaaataaattgaccaaacaagttaccatgcttactggaaatggaggtggatggaacatagaacaaccttccattctaaaccaaagtttgtcactcaagccctatcagaaggttggtttgaattggctggcattggtacataaacatggacttaatggcattttggcagatgaaatgggcctaggaaaaactattcaagccattgcatttctggcatacctctatcaggagggtaataatggtcctcatttgatcgttgttccagcttcaactatagataactggttaagggaagttaatttatggtgccctactttgaaggtcctctgttactatggttctcaagaagaacgtaaacaaattagatttaacattcatagtagatatgaagattacaatgtaattgtgaccacatataactgtgcgatcagcagttctgatgatcgtagtctgtttcgacggctgaaacttaattacgcaatttttgatgagggccatatgctgaagaatatgggctccattcgctaccagcaccttatgacaattaatgcaaataaccgtttgctgctcacaggcacacctgtacagaacaatctgttagaactcatgtcgctgttgaattttgttatgccacacatgtttagtagtagcaccagtgaaatacgaagaatgttttcctctaagacaaaatcagcagatgagcaaagcatatatgaaaaggagagaatagcacatgcaaaacaaattataaagccatttattctcagaagagtaaaagaagaggttctcaagcagttaccccccaagaaagatcgaattgagttgtgtgcaatgtcggagaagcaggagcaactctatttgggtcttttcaacagattgaaaaaatctatcaataacttggaaaaaaacacagaaatgtgcaatgtcatgatgcagttgaggaaaatggccaatcatcctttattacatcgccaatattacacagctgaaaaactcaaggaaatgtctcagcttatgctaaaggaacctacacattgtgaggctaaccctgacctgatctttgaagatatggaagttatgacagacttcgaactacatgtactttgtaaacagtaccgacacattaataactttcagttagacatggacttgattttagattctggaaaatttcgagttttaggatgcatcttgtctgaattgaaacagaagggtgatagagttgtgttatttagccaatttaccatgatgctggatatcttagaggttctattaaaacatcatcagcataggtacctcagattagatggaaagactcagatttctgaaaggattcatctaattgatgagtttaataccgatatggatatctttgtgtttctgctatcaacaaaagctggtggattaggaataaatctgacttcagcaaatgttgttatacttcacgatattgactgtaatccttataatgacaaacaagcagaagatagatgccatagagtaggccagactaaagaagtactagttataaaactaataagccaagggacgattgaagaatccatgctaaaaattaaccaacagaaattgaaactagaacaggatatgactacagtagatgaaggtgatgaagggagtatgccagcagatatagccacattactaaaaacatcaatgggcctgtgaaataagaactgtgaactctcaattgatgaggaaatatcaactttggtgcactcaaggacatttacatttatgatgaccatgggggtttatgaacatttataactttttataatttccatattacatttctcatagtatggacaactttttgccactaactgaattcttcaaatactcacacgtgaaatttcaaaaaagaagccacaaatatgtagttctgaagatgttgaataatcattttacaaagcagttttctgaatggggattagttggtgattgtttgtaacaaatatgctaatgctttagaaatgtcagtatttttgtaattatttctacctccaaatatatatatattgtctttcactggataatgtgtgtagatttttacatgtgccttatttgacaatgcttatgtcttgtttttgcttgtctcatttgaagttcttttttattatgttaaagaatgcagctgtatagattatatagctttcattttattgctatttgaagcagatgttcaccaatgtcagcaagaactcaacctgaatttaaaggtggcattccatatactaacatcccccaggtcctctcaagtacttctgctgaaacaaatttatttggctaggcactaagttgttttccagtgaatagtaactaaagaagcccctaccttgctccatggattaattccttctgttcattttccaactgcactaattgtgcatattactctgcctaatcttgtgcatgttttcattgatttccctctcccggcttttgcttctcttgaaactgttgcccagtcacttctgctccaattctcttcctctctaaatagtagtttaattactgccacatctccatgcatcagcaaaatgttggtgacatttttctagcctggcagaacagattacttaaagctatttcacttcaaagcagactgaatgtgacttcatctaaaggcagcattaggtactgcatggaaataggtcattaacttgaaactcttatcaaaatatattttaccagtttccagaatttccagtacaggaccgcctgaagagagagccattgttcaattccaattcagtgtgagtgacaaagtgaaatttagaagtgaagttgtctatttgatatttaacccttattaaatctttctttaaatttctgcctgtcagtctatattgctgtttttattatacatcagtttctttgaataacttgtgagttcccatgtgttttgtttttattatgtaaatatcattataaataaacttatttataaatcaaagatttgttaatttttggaaatcatgcttttcaaagcatcctaacttgctaagatgctaggtagtacgaccctctggatttggaaggcaaataaaactcttacagtgattatttagatattaaagactgagaactcacggcttaaccccagtcttgatggtatattgaacagactgaatatattttaccattacagggctaaaaggagtcttcgtgtgttaatactacctccttgtacatcactatacccaaatcagttattcaaattgttaggaattttaccttttaaaatctcataatggatatctcatgttttctgtattaatgtattttcaatgataggctgtttctttttttgttgttattgttgttgttgttatatccatacttttatctctaatgaaatgtagttgggttcttcctgtaatgcgctattatgtcttgggcttaataaaaatatttgtgatcataaaaaaaaaaaaaaaa

SEQ ID NO: 24774 - DNA, 3571 bp, Homo Sapiens
  misc_feature (2506)..(2506): n is a, c, g, or t
  misc_feature (3393)..(3393): n is a, c, g, or t
ctcagcaggtcaggacatttggtaggggaaggttgaaagacaaaagcagcaggccttgggttctcagccttttaaaaactattattaaatatatatttttaaaatttagtggttagagcttttagtaatgtgcctgtattacatgtagagagtattcgtcaaccaagaggagttttaaaatgtcaaaaccgggaaaacctactctaaaccatggcttggttcctgttgatcttaaaagtgcaaaagagcctctaccacatcaaaccgtgatgaagatatttagcattagcatcattgcccaaggcctccctttttgtcgaagacggatgaaaagaaagttggaccatggttctgaggtccgctctttttctttgggaaagaaaccatgcaaagtctcagaatatacaagtaccactgggcttgtaccatgttcagcaacaccaacaacttttggggacctcagagcagccaatggccaagggcaacaacgacgccgaattacatctgtccagccacctacaggcctccaggaatggctaaaaatgtttcagagctggagtggaccagagaaattgcttgctttagatgaactcattgatagttgtgaaccaacacaagtaaaacatatgatgcaagtgatagaaccccagtttcaacgagacttcatttcattgctccctaaagagttggcactctatgtgctttcattcctggaacccaaagacctgctacaagcagctcagacatgtcgctactggagaattttggctgaagacaaccttctctggagagagaaatgcaaagaagaggggattgatgaaccattgcacatcaagagaagaaaagtaataaaaccaggtttcatacacagtccatggaaaagtgcatacatcagacagcacagaattgatactaactggaggcgaggagaactcaaatctcctaaggtgctgaaaggacatgatgatcatgtgatcacatgcttacagttttgtggtaaccgaatagttagtggttctgatgacaacactttaaaagtttggtcagcagtcacaggcaaatgtctgagaacattagtgggacatacaggtggagtatggtcatcacaaatgagagacaacatcatcattagtggatctacagatcggacactcaaagtgtggaatgcagagactggagaatgtatacacaccttatatgggcatacttccactgtgcgttgtatgcatcttcatgaaaaaagagttgttagcggttctcgagatgccactcttagggtttgggatattgagacaggccagtgtttacatgttttgatgggtcatgttgcagcagtccgctgtgttcaatatgatggcaggagggttgttagtggagcatatgattttatggtaaaggtgtgggatccagagactgaaacctgtctacacacgttgcaggggcatactaatagagtctattcattacagtttgatggtatccatgtggtgagtggatctcttgatacatcaatccgtgtttgggatgtggagacagggaattgcattcacacgttaacagggcaccagtcgttaacaagtggaatggaactcaaagacaatattcttgtctctgggaatgcagattctacagttaaaatctgggatatcaaaacaggacagtgtttacaaacattgcaaggtcccaacaagcatcagagtgctgtgacctgtttacagttcaacaagaactttgtaattaccagctcagatgatggaactgtaaaactatgggacttgaaaacgggtgaatttattcgaaacctagtcacattggagagtggggggagtgggggagttgtgtggcggatcagagcctcaaacacaaagctggtgtgtgcagttgggagtcggaatgggactgaagaaaccaagctgctggtgctggactttgatgtggacatgaagtgaagagcagaaaagatgaatttgtccaattgtgtagacgatatactccctgcccttccccctgcaaaaagaaaaaaagaaaagaaaaagaaaaaaatcccttgttctcagtggtgcaggatgttggcttggggcaacagattgaaaagacctacagactaagaaggaaaagaagaagagatgacaaaccataactgacaagagaggcgtctgctgtctcatcacataaaaggcttcacttttgactgagggcagctttgcaaaatgagactttctaaatcaaaccaggtgcaattatttctttattttcttctccagtggtcattggggcagtgttaatgctgaaacatcattacagattctgctagcctgttcttttaccactgacagctagacacctagaaaggaactgcaataatatcaaaacaagtactggttgactttctaattagagagcatctgcaacaaaaagtcatttttctggagtggaaaagcttaaaaaaattactgtgaattgtttttgtacagttatcatgaaaagcttttttttttattttttngccaaccattgccaatgtcaatcaatcacagtattagcctctgttaatctatttactgttgcttccatatacattcttcaatgcatatgttgctcaaaggtggcaagttgtcctgggttctgtgagtcctgagatggatttaattcttgatgctggtgctagaagtaggtcttcaaatatgggattgttgtcccaaccctgtactgtactcccagtggccaaacttatttatgctgctaaatgaaagaaagaaaaaagcaaattattttttttattttttttctgctgtgacgttttagtcccagactgaattccaaatttgctctagtttggttatggaaaaaagactttttgccactgaaacttgagccatctgtgcctctaagaggctgagaatggaagagtttcagataataaagagtgaagtttgcctgcaagtaaagaattgagagtgtgtgcaaagcttattttcttttatctgggcaaaaattaaaacacattccttggaacagagctattacttgcctgttctgtggagaaacttttctttttgagggctgtggtgaatggatgaacgtacatcgtaaaactgacaaaatattttaaaaatatataaaacacaaaattaaaataaagttgctggtcagtcttagtgttttacagtatttgggaaaacaactgttacagttttattgctctgagtaactgacaaagcagaaactattcagtttttgtagtaaaggcgtcacatgcaaacaaacaaaatgaatgaaacagtcaaatggtttgcctcattctccaagagccacaactcaagctgaactgtgaaagtggtttaacactgtatcctaggcgatcttttttcctccttctgtttatttttttgnttgttttatttatagtctgatttaaaacaatcagattcaagttggttaattttagttatgtaacaacctgacatgatggaggaaaacaacctttaaagggattgtgtctatggtttgattcacttagaaattttattttcttataacttaagtgcaataaaatgtgttttttcatgtt

SEQ ID NO: 24775 - DNA, 6631 bp, Homo Sapiens
atccccgcccccgactcctgcggccggtgcgggagctgtcagctgcacgttgcgggggtaccggagaagccggggttgccttctcccggttctgtgcgctaaccccggagcccggccccggggaactagggagcgtctccggctgcacagcgctcaggttttagggtttcctttgggccacccaaaatgttttttaaatactttggataagagctaaaccacctgccactggggacttccatactctcggctcccttgtcatctgatggcattttgattgtctcgaggccaagtgacttgctgtccatgatgagtgatgagaagaaccttggtgtgtcccaaaaattggtatcaccttcaaggagcacaagtagctgctcttccaagcaaggaagtcgacaggacagctgggaagtggtggaaggactgaggggggagatgaattacacccaggagccaccagttcagaaaggatttttgctgaaaaagaggaagtggcccttaaaaggctggcataagagattcttctatctggacaaaggaatcttgaaatatgccaagagccaaaccgatatagagagagagaagctgcatggctgcattgatgtcgggctctcagtgatgtctgtaaagaagtcatcaaaatgcatagaccttgacaccgaggagcacatctaccatctgaaggtcaagtcagaagaagtctttgatgagtgggtatcgaaacttcgccaccacagaatgtatcgtcagaatgaaattgccatgtttccacatgaagttaaccactttttctcagggtccaccatcacagactcttcatctggggtgtttgactccatttcaagtaggaagcgtagcagtatatcaaagcagaatttatttcaaactggaagcaatgtatcattttcttgtggtggtgagacacgagttccattatggttacagtcttcagaggacatggaaaaatgctccaaagacctggcgcactgtcatgcctacctggtagaaatgagccagctcctgcaaagcatggacgtcctgcatcggacatactcggcaccagctatcaacgccatccagggtggatcttttgaaagtcccaaaaaggaaaaaagatcgcacaggaggtggcggtccagagctattggcaaagatgctaaaggaacactgcaggtcccgaaacctttttctggcccagtaagactacactcctccaatcctaatttgtcaacactagattttggagaagagaaaaattattctgatggctctgaaacctcatcagagttttctaaaatgcaagaagatctgtgtcatattgcccataaagtttacttcactttaaggtcagcttttaatatcatgtcagcggagagagagaaactgaagcagctgatggagcaggatgcctcctcctccccgtctgctcaggtcattggtctgaagaacgccctgtcatccgccctagcacaaaacacagatcttaaagaacgcttacgcagaatccatgccgagtctctgctcctcgactcccccgctgtcgccaagtcgggtgacaatctggcagaggaaaactccagagatgaaaaccgagctctagttcatcagctttctaatgaaagtagactctccatcactgactccctttctgagttttttgatgctcaggaagttctgttatctccaagctcttcagaaaacgagatttctgatgatgactcatatgtcagtgacataagtgataatctttccttagataatctcagtaatgatttagataatgagagacagaccttggggcctgtccttgatagtggtcgggaagcgaagtcccggagaagaacgtgcctgccggcgccctgcccgagcagcagtaacatcagcctgtggaacatcctgaggaacaacatcgggaaggacctgtccaaggtggccatgccggtggagctgaacgagcccctgaacacgctgcagaggctctgcgaggagctggagtacagcgagctcctggacaaggccgcgcagattcccagccccctggaaaggatggtatatgtggcagcctttgccatatcagcgtatgcatctagctactaccgagctggaagcaagccatttaatccggttcttggagaaacatatgaatgtattcgggaggacaagggcttccagtttttttcagaacaggtcagccaccatccgcctatctctgcgtgtcatgctgagtctagaaattttgttttctggcaagatgtgagatggaaaaacaaattctggggcaaatccatggaaattgttccaattggcacaacccatgtgactctgccagtttttggggatcattttgagtggaacaaagtgacctcttgcatccataacatcttaagcgggcagaggtggattgagcactatggagagattgtcatcaagaacctgcatgatgattcctgctactgcaaagtgaattttataaaggcaaaatactggagcactaatgcccatgagattgaaggcacagtgtttgacaggagtggaaaagcggttcatcggctgtttgggaaatggcatgaaagcatctactgtggcggcggctcctcttctgcctgtgtatggagagcaaatcctatgccgaaaggctacgagcaatactatagcttcacacagtttgcgctggaattaaatgaaatggatccatcatcaaagtctttattgccacctactgacactcgatttaggccagaccagaggtttctagaggaagggaacttagaagaagctgaaatacaaaagcagaggattgaacaactgcagagagaaaggcggcgggtcttagaagaaaatcatgtggagcaccagcctcggtttttcaggaaatccgacgatgactcttgggtgagcaacggcacctatttggaacttagaaaagatcttggtttttccaaactggaccatcctgtcttatggtgaaaaagtaaagaagaaagataacattagtgtatttctcctgtgcttgccttctgaagtggcacaaacctgtgtttatatatttaaaagatactctaggatgatcacttgtgcttagcttagcattgtaactctttaagtctatattttcctcagtgcgtttctttacaatttcaaatgttaccctgattgtttatatgaatgtagaacaccttgacatttctttttatatataaactatttaataaaaatgaaagattgaatgttcatgtgtgggttaaaaaaagaagctttaacactaattttccaaaggttagggaagattccaattaaatttatgccttataaaattatgttgtagaaaaaaaatcaacctctcccaggtgcattaagaaataagaattcccagggttactcacccatgcgtaagctacccaagtttaatttggtagctgaaatatctttttgcctcagacagctcttgaattgctcatacagaacaattctgctggtgctggagtctgaagaatattttcatttgcattttagtggttagggagaggatataagattaatggaatgtatatttttatataagacgtatacggcaccttcttgaaaaggaagcatttgaacttgttcctccctatagttctattgccttatatgcaaaattgtaccctgttgctcagagaaattattcataagagaaaagaattccaattaattaaatatcacaatagcatcccagagagacagtaggaaatttctccttagtgagagctgagtccttgagaagttaagagactgtttcctgcttcccaccccaccccgttttttgtccctccgtttgatcacctccctgttgagtatggaatgtcccagtttaatataaaacatacagtttattccacacagcagtttgactttgtaaaagtttagcaaaataactgattgttttggataactcaacatgtttttcttaaatgctgttttagtattttctacctcttaataagcaccatattttagatcttgtataaaaagttgccatctgccttatagacaaatgtagagaattgatgttcttgctttgtgttgtgttctggtaaagctttaagtgagtgtcttacccctttcctatactttcttgttatccatatcattcttttgtgagttttgcagcagtcttgaataatacagattataactactgaaaggggaaccttcgtctttttaaatgtgtcatttcacattacaataatatgtgtagtagttgaattgtgttatcaaagcatgtccaacttctgtccagatgacattaaaaccaaagcctaattgttaagcctcttattctaaagtccatagcaatgctatggaatatcaagtataatgatgtagtaaaaagatttctccagaaaacactttgagatacttaaagaaattcagagcatatcgaatgttatgaatgaagagtaaaataattacaggaaaagaatgcatgatttttcattgtcacaccaaataaccagttggacaatattgcattttcaaaatggagagttatttaaagtggatgtgtagccttctggaatctgcacgtgactggcattttaaaacaactcattaaatattggattcattttatcgagatgccaagatgaacacaatgtgaatatcatttccatttctaagcagttgaatgacacagtcagattctttggtgtatgctttgttctttccatctcaagcatttatccaaattctgctcacagacatgaggaagcaggctgtagatttaagggcactcaaggggaaaacaaatgtagtttccacagtgtgaggataaatgtagaatcgtggtaatattggctgttaaattggcctgctccagagactggctcaaaaaagaaagaagcaacgaaaacaaaatgcacagcctgaatggacgtagcactgtcatgtggcatttggaaaatctttaattatcctaatgttatttcacttgcccttatgctttattttagagtcccagggacaactggatgaaacattacgtctgtagtcatcttatttgagatgggggtgggaacgaattaaaatatgatagagaactatatgcagattttaaaatctagtcagtactagcatctataaagggcttttctgaaatttaaacagcttggtgatgcatcctgatattataagcttaaaactatcttgagggggaaatgacttcttttctccttctgtcccttttctcaaaagcatctttcccccaaatgtatgtctctaggacattttatagttttaagaggaagaaaacagaaacgtggcatcatttgggaagaaccaaggtagaatttaattttctggactttaaatctcctggttaaataatgctaatcactgtaccatttgagttacatgttttaacctcttttttttttctaattattccatccaaaatttctggtgaattacacagaaatttttggaaatgggactttgtgcaggtaaccaccctgcacttcaggtaatgttcctgtcacagctgtcgactaccccacgctgcaggaaatccattcagaaatgagctaacagtctccagtgtagcaggagagccagtcacttccctccccaggccccaaagcaccccaaggctggtattccttgagtcataggtattaataataaaagcctcaatgcagcttctccatgtagttcctctcctacaagccaggtggattctggtcctaactaaagagatgggagttcacctgagggcaagaagtacccaggatgcccaaacagccgcacaggtgtcctgtgcttcctgtgagacttcctgggggaaatatacaaactaatatattttttaatgtttacgtcatttacactgctgcttttctcatattctgcttttaattacttgtagtaaatcatttgtttgggcttcaagcactgtcttccatctgcatcttccagatttatcatgagtgatcttgttctactgttaaagatgtcaagcctaaaaagtaataaagtttttatttggctgttgaaccttgatgtagcccctactacatacactacaagttatgccttctggctactacagaatctccgcagaccttttagttatgagtagaagcaataagaaggtgtccttatggtcttaggaataatagttccaatgtattggcataatttgtttgaatgtctttattttgatattaacaccggcataaatctatttttgctaccagatgatagctattttcatttgctctattttcctctgcattgtactaatctgttactcagtgttagtcttcatttttctgtgttggaaacctgcgtcatgtaaatatctgcaaatcatgacagtctaaagtgcaaaccattttcagagactttggggaatgcagtgatcagaagtggctaatttattttatttctgattattttatccagagggtacttttttaatggatatttgtaaatcttccacttaaccactgaaaattattttgttttaatcccacccttccatccatacctctgcctccccaaaaagctcctattaatttgcttatccccctcatgtagctagttgaatgtgaataaataacatggaaaaaaaaaaaaaaaaaaaaaaaaa

SEQ ID NO: 24776 - DNA, 3874 bp, Homo Sapiens
ttacagattgtcctgggtcacataatgccagctgagcgtaaaaagccagcaagtatggaagaaaaagactctttaccaaacaacaaggaaaaagactgcagtgaaaggcggacagtgagcagcaaggagaggccaaaagacgatatcaagctcactgccaagaaggaggtcagcaaggcccctgaagacaagaagaagagactggaagatgataagagaaaaaaggaagacaaggaacgcaagaaaaaagacgaagaaaaggtgaaggcagaggaagaatcaaagaaaaaagaagaggaagaaaaaaagaaacatcaagaggaagagagaaagaagcaagaagagcaggccaaacgtcagcaagaagaagaagcagctgctcagatgaaagaaaaagaagaatccattcagcttcatcaggaagcttgggaacgacatcatttaagaaaggaacttcgtagcaaaaaccaaaatgctccggacagccgaccagaggaaaacttcttcagccgcctcgactcaagtttgaagaaaaatactgcttttgtcaagaaactaaaaactattacagaacaacagagagactccttgtcccatgattttaatggcctaaatttaagcaaatacattgcagaagctgtagcttccatcgtggaagcaaaactaaaaatctctgatgtgaactgtgctgtgcacctctgctctctctttcaccagcgttatgctgactttgccccatcacttcttcaggtctggaaaaaacattttgaagcaaggaaagaggagaaaacacctaacatcaccaagttaagaactgatttgcgttttattgcagaattgacaatagttgggattttcactgacaaggaaggtctttccttaatctatgaacagctaaaaaatattattaatgctgatcgggagtcccacactcatgtctctgtagtgattagtttctgtcgacattgtggagatgatattgctggacttgtaccaaggaaagtaaagagtgctgcagagaagtttaatttgagttttcctcctagtgagataattagtccagagaaacaacagcccttccagaatcttttaaaagagtactttacgtctttgaccaaacacctgaaaagggaccacagggagctccagaatactgagagacaaaacaggcgcattctacattctaaaggggagctcagtgaagatagacataaacagtatgaggaatttgctatgtcttaccagaagctgctggcaaattctcaatccttagcagaccttttggatgaaaatatgccagatcttcctcaagacaaaccaacaccagaagaacatgggcctggaattgatatattcacacctggtaaacctggagaatatgacttggaaggtggtatatgggaagatgaagatgctcggaatttttatgagaacctcattgatttgaaggcttttgtcccagccatcttgtttaaagacaatgaaaaaagttgtcagaataaagagtccaacaaagatgataccaaagaggcaaaagaatctaaggagaataaggaggtatcaagtcccgatgatttggaacttgagttggagaatctagaaattaatgatgacaccttagaattagagggtggagatgaagctgaagatcttacaaagaaacttcttgatgaacaagaacaagaagatgaggaagccagcactggatctcatctcaagctcatagtagatgctttcctacagcagttacccaactgtgtcaaccgagatctgatagacaaggcagcaatggatttttgcatgaacatgaacacaaaagcaaacaggaagaagttggtacgggcactcttcatagttcctagacaaaggttggatttgctaccattttatgcaagattggttgctacattgcatccctgcatgtctgatgtagcagaggatctttgttccatgctgaggggggatttcagatttcatgtacggaaaaaggaccagatcaatattgaaacaaagaataaaactgttcgttttataggagaactaactaagtttaagatgttcaccaaaaatgacacactgcattgtttaaagatgcttctgtcagacttctctcatcaccatattgaaatggcatgcaccctgctggagacatgtggacggtttcttttcagatctccagaatctcacctgaggaccagtgtacttttggagcaaatgatgagaaagaagcaagcaatgcatcttgatgcgagatacgtcacaatggtagagaatgcatattactactgcaacccacctccagctgaaaaaaccgtgaaaaagaaacgtcctcctctccaggaatatgtccggaaacttttgtacaaggatctctctaaggttaccaccgagaaggttttgagacagatgcgaaagctgccctggcaggaccaagaagtgaaagactatgttatttgttgtatgataaacatctggaatgtgaaatataatagtattcattgtgtagccaacctcttagcaggactagtgctctaccaagaggatgttgggatccaagttgtggatggagtgttagaagatattcgattaggaatggaggttaatcaacctaaatttaatcagaggcgcatcagcagtgccaagttcttaggagaactttacaattaccgaatggtggaatcagctgttattttcagaactctgtattcttttacctcatttggtgttaatcctgatggctctccaagttccctggacccacctgagcatcttttcagaattagactcgtatgcactattctggacacatgtggccagtactttgacagaggttccagtaaacgaaaacttgattgtttccttgtatattttcagcgttatgtttggtggaagaaaagtttggaggtttggacaaaagaccatccatttcctattgatatagattacatgatcagtgatacactagaactgctaagaccaaagatcaaactctgtaattctctggaagaatccatcaggcaggtacaagacttggaacgagaattcttaataaaactaggcctagtaaatgacaaagactcaaaagattctatgacagaaggagaaaatcttgaagaggatgaagaagaagaagaaggtggggctgaaacagaagaacaatctggaaatgaaagtgaagtaaatgagccagaagaagaggagggttctgataatgatgatgatgagggagaagaagaggaggaagagaatacagattaccttacagattccaataaggaaaatgaaaccgatgaagagaatactgaggtaatgattaaaggcggtggacttaagcatgtaccttgtgtagaagatgaggacttcattcaagctctggataaaatgatgctagaaaatctacagcaacgaagtggtgaatctgttaaagtgcaccaactagatgttgccattcctttgcatctcaaaagccagctgaggaaagggcccccactgggaggtggggaaggagaggctgagtctgcagacacaatgccgtttgtcatgttaacaagaaaaggcaataaacagcagtttaagatccttaatgtacccatgtcctctcaacttgctgcaaatcactggaaccagcaacaggcagaacaagaagagaggatgagaatgaaaaagctcacactagatatcaatgaacggcaagaacaagaagattatcaagaaatgttgcagtctcttgcacagcgcccagctccagcaaacaccaatcgtgagaggcggcctcgctaccaacatccgaagggagcacctaatgcagatctaatctttaagactggtgggaggagacgttgatccagcagcacgtgtcatttattaggtcctg

SEQ ID NO: 24777 - DNA, 6450 bp, Homo Sapiens
cttgaacttattgagaaactcctccagaacagaattacaattgtggatagatttcttaattcttcaaatgatcataggtttcaggctcttcaagacaattgtaaaaaaattttaggagaaaatgctaaacccaattatggttgtcaagtcactattcagtctgaacaagaaaagcagttaatgaaacaatatcgacgtgaagaaaaaagaattgccagacgagaaaaaaaggctggagaagatttagaagtttcagaaggacttatgtgctttgatcctaaggaattgcggatacaaagagaacaggcacttctgaatgctagaagtgttccaattctgagcaggcagagagatgcagacgttgaaaaaatacattatccccatgtgtatgattcccaggctgaagccatgaaaacatcagcatttattgctggtgcaaagatgattttgccagaaggaatccaaagagagaataacaagctttatgaagaagtaaggattccctacagcgaaccaatgccactcagctttgaggaaaagccagtttatatccaagacttagatgagatcggacagctggcttttaaaggaatgaagagactcaatagaatccagtcaatagtgtttgagactgcctacaacaccaatgagaacatgctgatttgtgcccctacaggagctggaaaaaccaacattgcaatgctgacagtcttgcatgaaattcgccaacattttcaacaaggtgttatcaaaaagaatgaatttaagattgtatatgttgctccaatgaaagccttggcagctgaaatgacagattacttcagcagacgtctagagccactaggcatcattgtgaaagaattgactggtgacatgcagttgtccaaaagtgaaattttacgaactcagatgcttgtgaccacaccagaaaaatgggatgtagtgacaagaaagagtgttggggatgtagctctttcccagattgtaaggctccttattcttgatgaagttcatttgctgcatgaagatagaggaccagtattagaaagcatagttgcccgtactttacggcaggtggaatccacacagagtatgataaggattctcggactgtctgcaactttacctaactacctcgatgttgccacatttttacatgttaatccatacattggacttttcttctttgatggccgttttcgaccagtacctcttggacagacatttttggggattaaatgtgcaaataagatgcagcagttgaataacatggatgaagtatgttatgaaaatgttttgaagcaagtaaaggctggacaccaggtgatggtgtttgtacatgctcgaaatgccactgtaagaacagctatgtctctaatagaaagagcaaaaaattgtggccatattcccttcttttttcctacccaaggacatgactatgtacttgcagaaaaacaggtacaaaggtcgagaaataagcaagtacgagaattattcccagatggttttagtattcatcatgcaggaatgcttcggcaggacagaaatttagttgaaaacttgttttctaatgggcatatcaaagtcctagtgtgtacagctacgttagcctggggtgtcaatcttcccgcccatgctgttattattaagggaacacaaatatatgctgcaaaaagaggctcctttgttgaccttggaattttagatgtcatgcagatatttggtcgagctggacgaccacaatttgacaaatttggggaaggaataattataacaacgcatgataaactcagccattacctcactttgctcactcaacgaaacccaattgagagtcagtttctggaaagccttgcagataacctaaatgcagagattgctctgggaacagttactaatgtggaagaagcagtgaagtggataagttacacttatctttatgtacggatgagagcaaatccattagcatatggcatcagtcacaaggcttatcagattgacccaacattaagaaagcatcgagaacagttggtcattgaagttggacgaaaactagacaaagctcagatgattcgttttgaggagcgaactggatatttttcctcaactgatttgggtagaactgccagccattactatattaaatacaacaccattgagacctttaatgaactctttgatgctcacaaaacagaaggtgatatctttgccatagtctccaaagctgaagaatttgatcaaattaaggtcagagaagaggaaatagaggagttagataccttattaagcaatttttgtgaactctccactcctggaggtgtagagaatagttatgggaaaataaacatcttacttcaaacttatatcagccgaggagaaatggacagtttctcccttatatcagattctgcatatgttgcacagaatgcagctagaattgtccgtgctctttttgaaattgctctgaggaaacgttggcctaccatgacctacaggctcctgaatcttagtaaagtcattgacaagaggctttggggttgggctagccctttgagacaattttcaatcctaccaccacacatcctaacaagattagaagaaaaaaagcttactgtggataagctgaaagacatgaggaaagatgaaataggtcacattttacatcatgtgaatattggactgaaggtcaaacaatgtgttcatcagattccttctgttatgatggaagcatccattcagcccatcacaaggactgtcctccgagtgacactcagcatctatgctgatttcacttggaatgatcaggtacatgggacagtaggagaaccttggtggatttgggtagaagatcctacaaatgatcatatttatcattcagagtattttctagctctaaaaaaacaagtcattagtaaagaagcccaactactggtatttacaatccctatttttgagcctttgccttcccaatactacatccgagcagtgtctgatagatggttgggtgctgaggcagtatgtattatcaactttcaacatctaattctaccagagagacatcctcctcatacagaattactggatcttcagcctttaccaatcacagctttgggatgtaaagcatatgaagccctgtacaacttcagccactttaaccctgtacagacacaaatatttcatacattgtatcacacggattgtaatgtcctacttggagcacctactggatcgggaaagactgttgcagctgaattagccattttcagagtcttcaacaaataccctacttcaaaggcggtatatattgcacccctaaaagccctagtacgtgaaagaatggatgattggaaagttagaatagaagaaaaacttggtaaaaaagttattgaactaacaggggatgtgactcctgatatgaaatccattgccaaggctgaccttatcgtcactacgccagagaagtgggatggagtcagcagaagctggcaaaataggaactatgttcagcaagtcactattctcatcatagatgagatccatctgcttggggaggaaagaggccctgttctagaggtcattgtatctcgaacaaattttatctcatcacacacagaaaagcctgttagaatagttggactatctactgcattagctaatgccagagaccttgctgattggctcaatattaagcagatgggcttgtttaacttccgaccatcagtacgcccagttccactggaagttcacattcaaggctttccaggtcaacattactgtcctcgtatggctagtatgaacaagcctgcatttcaggcaattagaagccattctccagccaaacctgttttgatatttgtctcatcaagacgtcaaactcgtcttactgctttggaattgatcgccttcctggctactgaagaagatccaaagcagtggttaaacatggatgaaagagagatggagaacatcattgcaacagtaagagattccaacctcaagctgacccttgctttcgggataggaatgcatcatgctggactacatgagagggaccgaaaaacagtagaggaactatttgtaaactgtaaagttcaggttcttattgctacaagcacattagcctggggtgtaaactttccagctcatttagtaattattaagggaacagaatactatgatggaaaaacaagacgttatgtggattttcccattacagatgtcctccagatgatggggcgtgctgggaggccgcagttcgatgaccaaggcaaagctgtaattctagttcatgacataaagaaagacttttataaaaaatttctttatgaacctttcccagtagaatcaagtttattaggagtgctctctgaccacttaaatgcagagattgctggtggtacaattacatctaagcaagatgcattggattatatcacctggacttactttttccgacgtcttatcatgaatcccagctattacaatttgggtgatgtgagccatgattctgtgaacaagtttctgtcccatctgattgagaagtccctgattgaattggaactttcctactgtattgaaattggagaggataatcgcagcattgaacctctaacttatggccgaattgcctcctattactatttgaagcatcaaacagttaaaatgttcaaggaccgcttgaagcctgaatgcagtactgaagaactgctttcaattctaagtgatgcagaagaatatacagatttgccagtgagacacaatgaagatcatatgaatagtgaactggcaaaatgtcttcccattgaatcaaatcctcattcatttgacagccctcacaccaaagcacatctcctgctacaggcacatctcagccgagccatgctaccctgcccagattatgacactgataccaaaacagtcttggaccaagctctcagagtatgtcaggcaatgctggacgtggctgcaaaccagggctggctggtgactgtcctgaatatcaccaacctgattcagatggtgatccagggtcggtggttaaaggactcttctcttcttacactaccaaacatagaaaaccatcatcttcaccttttcaagaaatggaagccgattatgaagggcccacatgctaggggtcggacctccatcgagtgccttcctgaactgatccatgcctgtggagggaaagaccatgtatttagctccatggtagaaagtgagctacatgctgcaaaaacgaaacaggcatggaatttcttatctcacttgccagtgataaatgttggcataagtgttaaaggctcgtgggatgacttagttgaaggacataatgaactctctgtctcaactctgactgcagacaaacgagatgacaacaaatggatcaaattgcatgctgaccaagagtatgtgcttcaagtgagcttgcagagagtccactttgggttccacaagggaaagccagagagctgtgcagttactcctcgatttcccaaatcaaaagacgaaggatggtttttgatattaggagaagtggataagagagaacttattgctttgaaaagagtaggatatattcgaaatcatcatgttgcttccctttctttttatacccctgaaatacctggaaggtatatctacacattatatttcatgagcgactgctaccttggcctggaccagcagtatgacaatctatctcaacgttacacaagcgagtctttctgcacaggtcaacaccaaggtctctgattccctgactgacctggcattaaagtaacttgacctgaacaatccatttgaaaggagtggctaagaattctctctgttcagtcatctagacaaatcgaattacttgatgtttgccttgaaagaatcaacttctaacctcaaccatccaggaaattgacagtggctgcagtattgactccagtgacataaagttaaccacagtggccttttaacaaatgttgccttttataatgttatctttatgagtttcttgatatgtaagatgaaaaagcatttagaataatcttttaatttgtgtatatttgggatgatatttaggagctatcaatcaaattttacatctcacaatgtactgtttacatggatattggctgctttttttaaggaaaaccacattgagatgtgacaagtgttaggacttgtcacagatttctaactctgccgcataaactataaatctgtaaggtggtacacagcgtgtcttgttagcaaaatttatactttgatatgatcacatgtagaagtagcttcaagaatttcttgtagtcataaatgtttaataatatatgatgtaaaattatattatggagcctaatgatgataacaaagaaaacaatatactgatcttagaaaatgtagacatggttaactgggaaataaaatatagagtggcacttcaagacaaaaaaaaaaaaa

SEQ ID NO: 24778 - DNA, 2916 bp, Homo Sapiens
  misc_feature (2534)..(2534): n is a, c, g, or t
  misc_feature (2536)..(2536): n is a, c, g, or t
ggggagctcggcgtcccgctccctccgcggctcatggcgacgactctcggcacatccgggaccctccggccgtggcggccgaggcgccggctgctcgggccccagccccggccgctgtggtgactccgccgcgcctcgccgtcgcccccgtgccgcccgccgcccccgccgcccccgccgccggggacatgtctaaccccggaggccggaggaacgggcccgtcaagctgcgcctgacagtactctgtgcaaaaaacctggtgaaaaaggattttttccgacttcctgatccatttgctaaggtggtggttgatggatctgggcaatgccattctacagatactgtgaagaatacgcttgatccaaagtggaatcagcattatgacctgtatattggaaagtctgattcagttacgatcagtgtatggaatcacaagaagatccataagaaacaaggtgctggatttctcggttgtgttcgtcttctttccaatgccatcaaccgcctcaaagacactggttatcagaggttggatttatgcaaactcgggccaaatgacaatgatacagttagaggacagatagtagtaagtcttcagtccagagaccgaataggcacaggaggacaagttgtggactgcagtcgtttatttgataacgatttaccagacggctgggaagaaaggagaaccgcctctggaagaatccagtatctaaaccatataacaagaactacgcaatgggagcgcccaacacgaccggcatccgaatattctagccctggcagacctcttagctgctttgttgatgagaacactccaattagtggaacaaatggtgcaacatgtggacagtcttcagatcccaggctggcagagaggagagtcaggtcacaacgacatagaaattacatgagcagaacacatttacatactcctccagacctaccagaaggctatgaacagaggacaacgcaacaaggccaggtgtatttcttacatacacagactggtgtgagcacatggcatgatccaagagtgcccagggatcttagcaacatcaattgtgaagagcttggtccattgcctcctggatgggagatccgtaatacggcaacaggcagagtttatttcgttgaccataacaacagaacaacacaatttacagatcctcggctgtctgctaacttgcatttagttttaaatcggcagaaccaattgaaagaccaacagcaacagcaagtggtatcgttatgtcctgatgacacagaatgcctgacagtcccaaggtacaagcgagacctggttcagaaactaaaaattttgcggcaagaactttcccaacaacagcctcaggcaggtcattgccgcattgaggtttccagggaagagatttttgaggaatcatatcgacaggtcatgaaaatgagaccaaaagatctctggaagcgattaatgataaaatttcgtggagaagaaggccttgactatggaggcgttgccagggaatggttgtatctcttgtcacatgaaatgttgaatccatactatggcctcttccagtattcaagagatgatatttatacattgcagatcaatcctgattctgcagttaatccggaacatttatcctatttccactttgttggacgaataatgggaatggctgtgtttcatggacattatattgatggtggtttcacattgcctttttataagcaattgcttgggaagtcaattaccttggatgacatggagttagtagatccggatcttcacaacagtttagtgtggatacttgagaatgatattacaggtgttttggaccataccttctgtgttgaacataatgcatatggtgaaattattcagcatgaacttaaaccaaatggcaaaagtatccctgttaatgaagaaaataaaaaagaatatgtcaggctctatgtgaactggagatttttacgaggcattgaggctcaattcttggctctgcagaaaggatttaatgaagtaattccacaacatctgctgaagacatttgatgagaaggagttagagctcattatttgtggacttggaaagatagatgttaatgactggaaggtaaacacccggttaaaacactgtacaccagacagcaacattgtcaaatggttctggaaagctgtggagttttttgatgaagagcgacgagcaagattgcttcagtttgtgacaggatcctctcgagtgcctctgcagggcttcaaagcattgcaaggtgctgcaggcccgagactctttaccatacaccagattgatgcctgcactaacaacctgccgaaagcccacacttgcttcaatcgaatagacattccaccctatgaaagctatgaaaagctatatgaaaagctgctaacagccattgaagaaacatgtggatttgctgtggaatgacaagcttcaaggatttacccaggactctatttatacaaccctgactgacagcctcctttcagcagagtttcaaagaatatgctgaaatacaggaaaacncncccccccccccccttttttttttttttttacattttaggacactgtgaggggaaaggacaattttgaaattccttttcaaggaaaaaaaggtctttatgctttgccatgaggccacattcagctgctatttaaacttaatatcttgaacctaaagaatgctgacttttcctacatttccagagttaggcagtattctacacttaaagactactactatttttataaaaggtaatctattcaaatttcttcacagatttcaagtctctcaaacatcaagacaacttcagcagtcggtacaagtcacatttcattttgattgaatacatgatcttgaacagctcctgtacttgctctttgtaaaaaaaaataaaattatttt

SEQ ID NO: 24779 - DNA, 2327 bp, Homo Sapiens
agcaggagggtgggaccaagggtgctgctggaccaaggatgggactgggccaagggtggggctgggaagcatcctgttttgcatgtttgatcaggagctgctgccaagttgtgactttcactttcccttttgggttccagggtatatctcagagactggagaacgtgtctggttattatgcagatgcacggctggaggtgggatccacacagctcagaacagctggatcttgctcacactctttcaagagaagcttccttggacaaaaggaccctgccttggtgtgagagtgagggcagagggagctggagcaagtagaatttctctaaataccagctggctggggcccaggagattaaaaaacaccgggctagggttaagaaaaaaaacgaacccttccagtcaggtcagtgactggagagctccatggaaagtctctcagtgacctggctgctggcaccatggactcagaaaagaaacgctttactgaagaggccaccaaatacttccgggagagagtcagcccagtgcatctgcaaatcctgctgactaacaatgaagcctggaagagattcgtgactgcggctgaattgcccagggatgaggcagatgctctctacgaagctctgaagaagcttagaacatatgcagctattgaggacgaatatgtgcagcagaaagatgagcagtttagggaatggtttttgaaagagtttccccaagtcaagaggaagatccaggagtccatagaaaagcttcgtgcccttgcaaatggtattgaagaggtccacagaggctgcaccatctccaatgtggtgtccagctccactggcgctgcctctggcatcatgtcccttgctggtcttgttttggcaccatttacagcagggacgagtctggcccttactgcagctggggtagggctgggagcagcgtctgctgtgactgggatcaccaccagcatcgtggagcactcatacacatcatcagcagaagctgaagccagcaggctgactgcaaccagcattgaccgattgaaggtatttaaggaagttatgcgtgacatcacacccaacttactttcccttcttaataattattacgaagccacacaaaccattgggagtgaaatccgtgccatcaggcaagccagagccagggcccgactccctgtgaccacctggcgaatctcagctggaagtggtggtcaagcagagagaacgattgcaggcaccacccgggcagtgagcagaggagcccggatcctgagtgcgaccacttcaggcatcttccttgcactggatgtggtcaaccttgtatacgagtcaaagcacttgcatgagggggcaaagtctgcatctgctgaggagctgaggcggcaggctcaggagctggaggagaatctaatggagctcactcagatctatcagcgtctgaatccatgccatacccactgaccccagaccagtgcagccagcaggggaggtgagccatacacaggccacgacaaaatgcaggcattttattagggggataaagagggcaaggtaaagtttatggagctgagtgttagtgactttggcatttctgtagctgagcacagcaggggaggggttaatgcagatggcaagtgcaccaaggagaaggcaggaatgctggagcctggaataagggaggagaggggactggagagtgtggggaataggaagaagaaatttcctttagactaacgaatatattggggggaggaatagaggggaggtgtgcaggaaccagcaatgagaaggccaggaaaagaaagagctgaaaatgcagaaagccgaagagttagaacttttggatacagcagaagaaacagcggctccactaccgacctgcccccggttcgatgtccttccaagaatgaagtctttccctggtgatggtcccctgccctgtctttccagcatccactctgtcttgtcctcctggaagtgtatctcagtcagccagtggcttcttgatgatggcggtggaggtggtggttgtagtgtgatggatcccctttaggttatttaggggtatatgtcccctgcttgaaccctgaaggccaggtaatgagccatggccattgtccccagctgaggaccaggtgtctctaaaaacccaaacatcctggagagtatgcgagaacctaccaagaaaaacagtctcattactcatatacagcaggcaaagagacagaaaattaactgaaaagcagtttagagactgggggaggccggatctctagagccatcctgctgagtgccctgtgtgtaagtcctaataaactcacctactcacca

SEQ ID NO: 24780 - DNA, 1920 bp, Homo Sapiens
aggaagaaaatataaagtacacttttaaaacatgaagtcttcatagcagcttatagtcgttcagagaaacatgttccactgagaatgacttgagagagaggattacatcattatgccagaaggaagaagccactgtgcatgctctatcaccagcctcaccctcctggtcagccttacaagagtgacactggatatactccagaagttggacccaccacagcctgcacactggacttcttggcttttatgagctattcaagagatatttagtcatcacgttgtgtcacaatgggagtgactcacagagcaaggagagaacctgaggattcctcacacatgtagtactcagagctctacggaaacccaggcacctcgacctcaagaggatcagcctggccagggtggcacaactcttccttccccgtgcacagcaggaaagctgccatcagctgagcaagtccaccaacagtttctgtgtcccacttcatctttaataaggacaccatcttcttgtattatacaagaaaggagtgtacctatcacacacagggggaaaaatgctcttttgggtgctaggcctcctaatcctctgtggttttctgtggactcgtaaaggaaaactaaagattgaagacatcactgataagtacatttttatcactggatgtgactcgggctttggaaacttggcagccagaacttttgataaaaagggatttcatgtaatcgctgcctgtctgactgaatcaggatcaacagctttaaaggcagaaacctcagagagacttcgtactgtgcttctggatgtgaccgacccagagaatgtcaagaggactgcccagtgggtgaagaaccaagttggggagaaaggtctctggggtctgatcaataatgctggtgttcccggcgtgctggctcccactgactggctgacactagaggactacagagaacctattgaagtgaacctgtttggactcatcagtgtgacactaaatatgcttcctttggtcaagaaagctcaagggagagttattaatgtctccagtgttggaggtcgccttgcaatcgttggagggggctatactccatccaaatatgcagtggaaggtttcaatgacagcttaagacgggacatgaaagcttttggtgtgcacgtctcatgcattgaaccaggattgttcaaaacaaacttggcagatccagtaaaggtaattgaaaaaaaactcgccatttgggagcagctgtctccagacatcaaacaacaatatggagaaggttacattgaaaaaagtctagacaaactgaaaggcaataaatcctatgtgaacatggacctctctccggtggtagagtgcatggaccacgctctaacaagtctcttccctaagactcattatgccgctggaaaagatgccaaaattttctggatacctctgtctcacatgccagcagctttgcaagactttttactgttgaaacagaaagcagagctggctaatcccaaggcagtgtgactcagctaaccacaaatgtctcctccaggctatgaaattggccgatttcaagaacacatctccttttcaaccccattccttatctgctccaacctggactcatttagatcgtgcttatttggattgcaaaagggagtcccaccatcgctggtggtatcccagggtccctgctcaagttttctttgaaaaggagggctggaatggtacatcacataggcaagtcctgccctgtatttaggctttgcctgcttgstgtgatgtaagggaaattgaaagacttgcccattcaaaatgatctttaccgtggcctgccccatgcttatggtccccagcatttacagtaacttgtgaatgttaagtatcatctcttatctaaatattaaaagataagtcaaacattaaa

SEQ ID NO: 24781 - DNA, 3137 bp, Homo Sapiens
cggggagaataaaggcagccccgttgatgactgaaaatgacaaagcatccacctaacagacgaggaatcagctttgaagtgggagcccagttggaagcccgggaccgtttaaaaaactggtatccagctcacatagaagacattgactacgaggaaggaaaagtactcatccatttcaagcgttggaaccatcgttatgatgagtggttctgctgggacagtccttatttacgccctttagagaaaatacagctgaggaaagagggcttgcatgaagaggatggatcttctgaatttcaaataaatgagcaggtccttgcttgctggtctgattgtcgtttttacccggccaaagtcactgctgttaacaaggatggtacttacactgtgaaattttatgatggagtagttcagactgtcaaacatattcatgtcaaagctttttccaaagatcagaatattgtgggtaatgctaggcctaaagaaacagatcacaaaagtctttcatcatctcctgataaacgagagaagtttaaagaacagagaaaagcaacagtgaatgtgaagaaagacaaagaagataaacccttaaagacagaaaagcgacccaagcagcctgataaagaaggaaagttaatctgttctgaaaaggggaaagtgtcagagaaaagtcttcccaagaacgagaaggaagacaaggaaaacatttccgaaaatgacagagagtattctggagatgcccaagtggataagaaacctgaaaatgacattgtgaagagtccacaagaaaacttgagggaacccaaaagaaaacgaggcagacccccttccatagctcctactgctgtggattcaaactctcaaactttgcaaccaataacattggaactgagaagaaggaaaatatcaaaaggatgtgaagtcccattaaaacgtcctcggcttgacaaaaattcatcccaggaaaagtcaaaaaactactcggaaaacactgacaaagacttatcgaggagacgttcctccaggctgtccactaatgggacccatgagatcctagatcctgacttggttgtatcagatttggttgatacggatcctttgcaagacacgttgtctagtaccaaggaatctgaagaaggtcagttgaagtctgctttggaagctggccaggtctcatctgcactgacttgccactcctttggggatggatccggggctgcaggcttggagttgaactgcccatcaatgggagaaaacacgatgaaaacagaaccgacttctccccttgtggaattacaagagatttcgactgtggaagtaacaaatacttttaagaaaacagatgattttgggtcatctaatgcaccagctgtcgacctagaccataagtttagatgcaaagttgtggactgtttaaaatttttccgcaaagccaaactgttgcactatcacatgaagtatttccatggaatggagaagtcactggagccagaagagagcccgggaaagaggcatgtccaaaccaggggcccttcagcttcagacaagcccagccaggagaccctgaccaggaagcgggtctctgccagttccccaactacaaaagacaaggaaaagaataaagagaagaaattcaaggagtttgtgagagtgaagccaaagaagaaaaagaaaaagaaaaagaaaaccaaacctgaatgcccctgcagtgaggagatcagtgacacctcccaggaaccttctccacccaaggcatttgctgttaccaggtgtgggtcctcacacaagccaggggtccatatgagcccgcagcttcatggcccagaatctggacaccacaaagggaaagtgaaagcattggaggaggataatttgagtgagtcctcttctgagagctttctctggagtgatgatgagtatggccaagatgtggatgtgaccaccaacccagatgaggaacttgatggggatgaccgctatgacttcgaggtggtccgctgcatctgtgaggtccaggaggaaaatgacttcatgattcagtgtgaagagtgccagtgctggcagcatggggtctgcatgggattactggaagaaaatgtgcccgagaaatacacctgttatgtttgccaagaccctccaggtcagaggcctggcttcaagtactggtatgacaaggagtggctgagcaggggacatatgcatggcctggcatttctagaagagaactactcccatcagaatgccaagaagatcgtggccacccaccagcttcttggtgatgtgcagagagtgattgaggttctgcatggcctgcagctcaagatgagcatcttgcaaagccgggagcatcctgatctgccgctgtggtgccagccttggaaacagcactcaggggaggggagatctcatttcagaaacatccctgtcactgacaccaggagcaaggaggaagctccaagctatagaactttgaacggggcagtggagaagcccaggcccctggccctgcccctgccgcgttctgtggaggaatcctatatcaccagtgagcattgctaccagaagccccgcgcctattaccctgccgtggagcagaagctggtggtggagacgaggggctctgccctcgacgatgcggtcaaccccctccatgagaacggcgatgattccctttccccgcgcctgggctggcctctagaccaagacaggagcaagggggacagtgaccccaaacccggctccccaaaggtgaaggaatatgtctccaaaaaggccctaccagaagaagcccctgctcggaagctgctggacagaggtggagaggggctgctgagctcccagcaccagtggcagtttaacctgctgacccatgtggaatctcttcaggatgaagttacgcacaggatggactccattgagaaggagttggatgtgttggagagctggctggactacactggggaactggagccccctgagccgctggccaggcttccgcagctcaagcattgtatcaagcagctgctgatggacctgggcaaggtgcagcagatcgccctctgctgctcaacatgaaactgggcacccaaaactcatgggggcacaatcctggggcacctgcaggaggagcttcgcat

SEQ ID NO: 24782 - DNA, 3534 bp, Homo Sapiens
tcgaggtcgacatttataccgtctgagggtagcagctcgaaagtagaagaaagtgttgccagggacggcagtatctctttgtgtgaccctggcggcttatgggacgttggcttcagacctttgtgatacaccatgctgcgtgggacgatgacggcgtggagaggaatgaggcctgaggtcacactggcttgcctcctcctagccacagcaggctgctttgctgacttgaacgaggtccctcaggtcaccgtccagcctgcgtccaccgtccagaagcccggaggcactgtgatcttgggctgcgtggtggaacctccaaggatgaatgtaacctggcgcctgaatggaaaggagctgaatggctcggatgatgctctgggtgtcctcatcacccacgggaccctcgtcatcactgcccttaacaaccacactgtgggacggtaccagtgtgtggcccggatgcctgcgggggctgtggccagcgtgccagccactgtgacactagccaatctccaggacttcaagttagatgtgcagcacgtgattgaagtggatgagggaaacacagcagtcattgcctgccacctgcctgagagccaccccaaagcccaggtccggtacagcgtcaaacaagagtggctggaggcctccagaggtaactacctgatcatgccctcagggaacctccagattgtgaatgccagccaggaggacgagggcatgtacaagtgtgcagcctacaacccagtgacccaggaagtgaaaacctccggctccagcgacaggctacgtgtgcgccgctccaccgctgaggctgcccgcatcatctaccccccagaggcccaaaccatcatcgtcaccaaaggccagagtctcattctggagtgtgtggccagtggaatcccacccccacgggtcacctgggccaaggatgggtccagtgtcaccggctacaacaagacgcgcttcctgctgagcaacctcctcatcgacaccaccagcgaggaggactcaggcacctaccgctgcatggccgacaatggggttgggcagcccggggcagcggtcatcctctacaatgtccaggtgtttgaaccccctgaggtcaccatggagctatcccagctggtcatcccctggggccagagtgccaagcttacctgtgaggtgcgtgggaaccccccgccctccgtgctgtggctgaggaatgctgtgcccctcatctccagccagcgcctccggctctcccgcagggccctgcgcgtgctcagcatggggcctgaggacgaaggcgtctaccagtgcatggccgagaacgaggttgggagcgcccatgccgtagtccagctgcggacctccaggccaagcataaccccaaggctatggcaggatgctgagctggctactggcacacctcctgtatcaccctccaaactcggcaaccctgagcagatgctgagggggcaaccggcgctccccagacccccaacgtcagtggggcctgcttccccgcagtgtccaggagagaaggggcagggggctcccgccgaggctcccatcatcctcagctcgccccgcacctccaagacagactcatatgaactggtgtggcggcctcggcatgagggcagtggccgggcgccaatcctctactatgtggtgaaacaccgcaaggtcacaaattcctctgacgattggaccatctctggcattccagccaaccagcaccgcctgaccctcaccagacttgaccccgggagcttgtatgaagtggagatggcagcttacaactgtgcgggagagggccagacagccatggtcaccttccgaactggacggcggcccaaacccgagatcatggccagcaaagagcagcagatccagagagacgaccctggagccagtccccagagcagcagccagccagaccacggccgcctctcccccccagaagctcccgacaggcccaccatctccacggcctccgagacctcagtgtacgtgacctggattccccgtgggaatggtgggttcccaatccagtccttccgtgtggagtacaagaagctaaagaaagtgggagactggattctggccaccagcgccatccccccatcgcggctgtccgtggagatcacgggcctagagaaaggcacctcctacaagtttcgagtccgggctctgaacatgctgggggagagcgagcccagcgccccctctcggccctacgtggtgtcgggctacagcggtcgcgtgtacgagaggcccgtggcaggtccttatatcaccttcacggatgcggtcaatgagaccaccatcatgctcaagtggatgtacatcccagcaagtaacaacaacaccccaatccatggcttttatatctattatcgacccacagacagtgacaatgatagtgactacaagaaggatatggtggaaggggacaagtactggcactccatcagccacctgcagccagagacctcctacgacattaagatgcagtgcttcaatgaaggaggggagagcgagttcagcaacgtgatgatctgtgagaccaaagctcggaagtcttctggccagcctggtcgactgccacccccaactctggccccaccacagccgccccttcctgaaaccatagagcggccggtgggcactggggccatggtggctcgctccagcgacctgccctatctgattgtcggggtcgtcctgggctccatcgttctcatcatcgtcaccttcatccccttctgcttgtggagggcctggtctaagcaaaaacatacaacagacctgggttttcctcgaagtgcccttccaccctcctgcccgtatactatggtgccattgggaggactcccaggccaccaggccagtggacagccctacctcagtggcatcagtggacgggcctgtgctaatgggatccacatgaataggggctgcccctcggctgcagtgggctacccgggcatgaagccccagcagcactgcccaggcgagcttcagcagcagagtgacaccagcagcctgctgaggcagacccatcttggcaatggatatgacccccaaagtcaccagatcacgaggggtcccaagtctagcccggacgagggctctttcttatacacactgcccgacgactccactcaccagctgctgcagccccatcacgactgctgccaacgccaggagcagcctgctgctgtgggccagtcaggggtgaggagagcccccgacagtcctgtcctggaagcagtgtgggaccctccatttcactcagggcccccatgctgcttgggccttgtgccagttgaagaggtggacagtcctgactcctgccaagtgagtggaggagactggtgcccccagcaccccgtaggggcctacgtaggacaggaacctggaatgcagctctccccggggccactggtgcgtgtgtcttttgaaacaccacctctcacaatttaggcagaagctgatatcccagaaagactatatattgttttttttttaaaaaaaaagtcg

SEQ ID NO: 24783 - DNA, 29000 bp, Homo Sapiens
ttcagcaacttctcgtgtagttgtaagagaatcagctttgattattgttcttgagtagtcgctgtcaacttccaatggtcagccactatgctcctcatcttcaagtccctcgtctcctttgcaaagcttcgtgaaccaccaccgcactgtacgttcattagcagttcctgggccaaatgcattgttgatattgcaagttgtctccactgctttacgacccattttgaactcgaataagaaagtcactcaaattcgctttttgtctgacatcatttccatagtctaaaataaacataaacagcaagtaataagtcattagcaaaaacgcataaagcgagaaatgcgcattaaaatgatatataacataaccacatttatttaagaatgtattccaatatcaaatggcaaattccaacagtgcaaaaaccgcaattacttttgcattcacctataataaaggttttcaaagtagttgtttgttatctcaaagctggtttaagatattgtaatgaagtcaaatgttctgtactgcacttttatacagttgatacagagaaaatcaacattatatttgaaactacagatttaaaatgtttctctgaaaatattcaagacgtctagcatgaaactgattcattcaagcaaacagattataagtgtatctttcagtttcattagatttgattaccttgcattcttaatgtgccttacctttaaatttaattttcttgcgtactgtgttgagcactcatgatagttttttttactatggttagttttatttgctttcattttattttctttataacctatttttcctctcctgtccacctgatttttgaattgtctgtatatagctatagacatagatgctactggcttagatgcagaagaaaatgatattccagcaaaccaccgctcccctaaacccagtgcaaacagtgtaacgtcaccccactccaaagagaaaagaatgcccttctttaagaaggtaacattaacttccaagctcccattgtccacctgctcaactgcactgcgtcacatttctagtcctgttgactgtctgcgtcctttgataagccaataacgtgcatgctctgttatttgtttcttttccatgctgctgtagctaagcagaagcagaaatcggtaagtttacattgacataagctgtgtttatcctgccactggcatcattagcattaattcccacagttgtattaaatacaatcatttctgtcccaagcaaagaacctatcaacagctaattgagttcatgcatttcaaaccaactaaattcagggagtgacctgttaaaacaccattacagtacttatcctttttgatggaataatatctaccaccaagggaatttgtttcaacattcagggatgtcaaacactgacagctccacataatgcacctaaattgtgcatgcttattctatctctttcttttatccagaaatttaacttatgatcaaacatattaaagcagttattaaattctgacttatgatatccagatacatagcttgtactaaaaaaaaaagtattcaagttttaatttagtcagtatttaaacttctaatccactaggtgcaaaatctgcagatgaacaagaccagtggaaaactgcaggcttgttttggcggtttactgtgagtttttcctattgtcatatataaatattctcccgatgttcttgccttctccatcagtcagattttaccatctcaccctttggacagtgcagccagtggtcatgcgtagagcctttgccattggccatccaagatgctacacagcgaggctccttgtcccctaaatggaaactatagggtattcctgagctctccttacttcagacaaagccttttcctcacccattttgtagctttaaagcattattttttaaggaccactaacctccccccaaatttccctttttttcccctcttttacccatcagtttccacagctaccatgctgtcttttagaatcatactaatgtcgccaagtctggcaaaaccatggatatattctcacacgcagatgtgatgtcaaatctgtctatcctctgcccccaaactctccacataatgaacacttttcctctgcaaacatgtattttggtttgtggaggaactcaagtcattaatgaggtgtcagatacagaactgtaaagttggctttttttgaatcaattatgattattttaataagggaaaacttcagcactctgggcaaaaattgcaacacttggatttttgtgttaacatagcctcagcttgatgttcacccacaacagtgggcccatttctggggtccgatcttcttgttacagctaaagcttgcagccaagtgactaacagtgtctatcattcagaagcttagaaaatcggcatcgctaagacatttgggccttgacggagcaggaatgtgagctaaaaccctgtttgtcaagataggtttgtgaagtttgcttacctttaaattctaaaactttaaaaacttttatcacaattttttcactaaataatttgagcaggcagggcgcaatggctcacacctgtaatcccagccctttaggaggctgaggcaggtgcatcacctgtggtcaggagttttgagaccagcctggccaacatggtgaaacctcatctctgctaaaaatacaaaaaattagcctggcatggtggcaggcacctgtaatcccagctacttgggaggctgtggcagaagaattgcttaaacccggaaggcggagattgcagtgagccgagaccatgccactgcactccggcctgggcaacagagctagataactctgtctcaaaaaaaagaaaaaaaaaatcaagctaaatggggttaacagggaagagtagataaaaatgatggcgtcattcttcatagggcacaaagcaccaatattccatcaaataaggtaatttctgtagctaccctattgattaagaagctgattgattaccagcaacgggtgaccctttgctagttggcagttacagatcgaaggaaccaaagacctatcaaacactgggccacttcagaattaaagtcttgagataaaatttcttggtagctgttactaaaatgcaggaaatttacattcataatttcaacggtggaaaaggtgttcttacaccgcatagttatcaggacttggcttctaaacgttttcagtatgatcccaggtggtataaatgaaatagtttaagaaatatgcttatgatgccttcggcactggtattcattcttcttatgttattgataatgtggttaacatcaatgtagaattcaaaaacaaaacaacagcctgagattcaatgagaagatcgttttctatgttttaggttgcttttagagtggtgcttgtgtggtacgtgtgctgtcactgtattatgtttgtcttgttttttttttttctgttcaaaactgtattctaccttcattgtgtcaattaaaattaattctgaatgctaggtgaaattttaggcagtgaaatttgacagcacagtcatggtaatatttttcttccctctgattatatcgtctgtgactacgggtaaaatctcagatggaagcttttgaatttgaaatgctttttaattctcccctgaggcaatgtgaattcaaatgaagccagaaaagtttgtaatgggcaattttaagcaacaataaaatgttcttgagtgacgggcagatgcaaaaatgacattcatatctgcacatcagtgtactgaattcttaaaatcatttacagaacatttttctgttggtgtgtgtgattctcaagttatattttttgacactccttagccagaaagattcatatagcaatgatttgcttatcgcagtgtctaaggccatatcactcttatgcatttttttaaaaagtcatttttgggtcaatttagcattttatgctatcaaaagagccaattttaatataaaccaatttgctgttacctaatttttggaaagatgttattttaccattttatttgaagcaattaacctgaaaagtgttgacagttttagaaattgctacaaaatttagctcctcccctcttattaaaaagaaataatttactgcagaaagatgtcattagttatctgacagaaaactacttttgagaatcatattagatatgcacattgataatgaaccttttgagaccacaatagcatggttgaatatattattatacattaatcaccttccctcgaagacacataaaccttacctttgaagtaccaaggtatagaaaccaaaaaattcaatagcattaatcactaagctgtgagcagggatcatgattactgtttactaaaataagcatgcatgttcatttaaactctcacaataatatagaattttgacagtagtgagagttacaatattttgagattaggtaaaaagtattggtagtgagagttataatattttgaaatgaggttttacacaggtaagacaaaaacctaagatgcaaaggtaatgcaatctttctttcctctgtaattaaccatgttaggtctaatcactacaactctttagaaaattcaaatgcagccgaaaagcaatattaacttctagtcaagcctaaagcacctatcttgcatgaggcatgtttctctttgttctgtcaactagtttttgttcaaaagcagcatctcttgctttaggaacgaataggtctgtagcatttcttgagatgagcaagaagactgtagacaacagtaacttgaaacttcaggaaaatgaacccaccaatctttgactgggtttatgtagaaaagaggcaagtggggaaaataaaatgtctggaaagccagtgcctcatattatggagttcagaaagagtaccttatacacaaaatatttatgttctacctgcctgtgaaacgtctaaaagcctctcctctctctgcagacagagcacactcctccgtatgatgtggtaccttccatgcgaccagtggtcctagtgggcccttctctgaagggctacgaggtgggtagcagccttccacaggaagcttaacttgcatgctgaacttctttgtgatgctgcctcctactcccgaccctctctctgaattttacagcttaaggagccaactttagagcttagagagctcacagcagcaaagcctgttgttctgcaaactggtatacactgcttcgtcctttttctgttttgtttacctggctgttgctttgaagatttctgctagctgcagtgtactcagtccaggaaatagtgtcaaatggagaccgactgaaaccacttgcaatgttatttgtcactaaaacatcatgataagttcagtttaattgtcattgcatcagaactcagaagcagaaaaatgcggcaacctcatattgccactctttccagatgcaaagctcaggttttcaagcattcctaagagaagtaaaattgttttatcatcgttagtaattttttttggtcatatcttaatttattgcttgctcaattgcaggtcacagatatgatgcaaaaagcgctgtttgattttttaaaacacagatttgaagggcggtgagtatttcagcatactgggttttgtggattttgtcttaaagatggcaaaacgctggtgggacatgcgtgtgattccaagagaaaatggccctctgatgtctatatgatgacaggaaacaagtttcactcaatttaatctgattcaatcaatatttatcatatttgcttggtacatctttaacccctgatgtctagttcctgtacctacatccataagctgaccttgggcaggacaccactggccagtctcaccctcaattcatggtcaactggccctctattgctgcccaggcatcgcactaaatatccctcttccattcacttttccactcttctaaaagacttctgtgccatctccccctccttaatcctctgataaccccttctcatctcacgctcccccagtgaacttgcttccgtgtcattgagaaaatagaggcaaacagagaacatccaggcatttctacaaccccgcctgtggagttgcatgtttgcctgcatgctctgctttatctccaatgactatgttcccagcaagggccaacccaccatgtgggcactagatctcattccccatcccctctctgctagaagtatccatacagagccgtaatcatcctttgctctctcctcatgagtatttcctgttctaatggaaactccatcaccatgtaaaaatgttaattcctatcacattgacctcatattgctctaggtgtctcatttttttttcttttctttacaggaagattccttgaaagaattgagtgtactggctttccttccactttcttcagcctaccccagttatgttttcacccacaccactcagctaaactagtcatgtcaagatcacccatgaccttcacattgctaaatccagggataaattttcagccctaatcttacttgaccatgagcagtagttgacatggtggattattccatcctctttgaaatactttgcttggtttctggaaccacacttttctggttttccttctatcacactgactgctcctttgtctcctttgctgatacttcctcatcaactggaaatcttggacagcccagggctaagctctatgatgtcttttacctacatttctttagtgatttcattcagcatcagatttttaaattccattcctttgccagtctttcctctaaattctagacccatgtatacaattgcctattcattatcactactaagatgtctaatggacttttcaaatgtaacctcccccaaaacttactcctcccatggtcttccctatctcaattaatagcttcttcgtctttcagtcccgagacccttcagcccagatcattttccttgactgttctttctctcttatatttcacatgcaaatgctgttgtctttatcttcaaaatatattcagaatcgaagcccttctcacacatcctctgccaccattttggtctgagacatcttcatctcttccctggattggtgcaacagcctcccaccttgtctccttgcttctgtggttgttcccttaaagcctgtgctcaggttagctgctgcatgaccctgttaagatgtgagctagtgcccaccactcctttactcaaaaccatccagtgacttctttttttcctctgaatggaaaccaaagtcctacagtggcctacatgacctcctatggtctattcttccacacgtccttacctagattttctcttgctgctcttccctcgctcattctcaccctgccgtacttactcccttgctgttctttgagtgttccagacagattacacaatcacctcagggctttggcactttgcagttccttctgctaggaacacttttccctcagatattctccttggtatacgtgtgtacatgtatgcacacatacacatgcacacatttgttctgtgtctctcctttccctctgttttctagtgctcttttatgtatttccagtactatttttgtttattgtcattctcccataattagacgataaactccatgagggcagggtttgagaatgttttgtgaactgttgtattctcagtgcctggagcagtactcaacatgagcagtggccagatgaattttgaatgaacgtctgctgcatactctctgctagagaaatgcggagatggtgaagccagtctctgcctatgaacagctctcatggaaaccataaattgaaacctgtagcagtaacactgcatataagtaaaagggcaacttggttatatgcatgcacaaggtgcaggtagcataaagggaggcgtaattaacaccaacttcaggacatccacacctggaagaatttttaaatggtgcctaacgtttgaccaaatggattacagggaagagaagggtatgttcagcagatggtatatagtgtgtgaaggctttgaggtatgacacagcattatgtgtaaggcaactcacacccacatcttaaaggacatgggcaaggagtgactggtaacaaatccaagggtcatatctagtgtgtcacgccaatgggcttggacttaatcctttctttctcctcctcttcccccggtcactattcaacttgcctcagtaagtatttattgagtatattctatgtgccaggcattgtgaggagcaaaaatagacaagggccttggctttgtggggcttaaagtctattgaaaggcagtcttgaatcaaataattaatgggtgccatcattgaatgttaagccagctcctgaagcatcaaagacatgactagagtccaaaatggaaacctcagagtttaagagtaggttattacaggggacctggaagatacagggctagtgtatatttctgtatttttaaccagataaatgcagtgcttctcttctccacattcctttcctcctcccatcctaacaatgcaactacaatagatcaggagtcccaaatccccgggtcacagatcagtactggtccatggcctgctaggggccacacagcagacggtgagtggcaggggagtgtgcaaagcttcatctgtatttacagtcactcctcatcactcacacattattgcctgagctcagcctcttgtcagatcagcagcggcattagattctcataggagcacaaactctactgtgaactctgcatgcgagggatctaggttacatgctccttaggacagtctaatgcctggtgttctttcactgtctcccatcaaccccataaaggaccatctagttgcaggaaaacaagctcagggatcccactgattctacattatggtgagttgtataatcacttcattatatattccagtgtaataataatagaaagaaagtacacaataaatgtaatgtgcctgaatcatctcaaaaccatctccccactcctaccaaaccggtccacggaaaagttgtctttaatgaaactggtccctggtgccaaaaaggttggggactgctgcaatagatagtatttgttggtttcaggattcttttagatttcttactatagtactttctttctagaccacacctactactacaaccatttctaatttatattgacttttggcaggggaggcaagggtaggaaggaaagttttataggaggacaagtctttttagtaagtgatcaagcaggctgggcttggtggctcctgcctgtaatcccagcactttgggaggccgaggcgggtggataatgaggtcaagtgttcgagaccggcttcgccaacatggtgaaacctcgtctctactaaagataagaaaattagctgggcatgttggcgggtgcctgcagtcccagctactcgaaaagctgaggcaggagaattgcttgaacccgggaggcagacgttgcagtgagccgagatcgtgccactgccctccagcctgggaaacagagtgagactctgtctccaaaaaaaaaaaaaaaaaaaaaaaaaaaaaaaaaaagtgatcaggcaaagaactgaaaggagagagaatgaggaaaacaaaaactattataagtttcaaggtatgaaaagactttataatcaaggtcttctaaccaaatattcctaattagatttttttaattttccatatctttaagaaatatttttcagtttgtgacaggaaatagaccctttagcttggaccaaggctactaggcactggccaagtataaaaggcatagctctactctgctccatttagcttgtttctttatccttggctctgtcatttatcacaatttggaattgtcaacatgagcctgaacactaaaaaaaattctgctaacaaaggcactgtgttttccatgcctgagtcaacccactgccctttcctaaatgccaaagatggggaaatgggatggaatttcctggattactacttgtacttaaacctgagtaagttttgaatttggaagacacattccagccagagagggtggattttggacccatgttcgagtgtatcagccacccagattggttttatttaagaaacagataaacaaaatatcttaaagtatctgttatttctagccagaagtaactttcatatggtttaattaatagacctgccttggctcatcttgacttacagagctggggttctatattctagccctgttctccccagttaacagtcctcagaggaagaaacgagtccataaggcagaatttaaaagctgtgtacaaatttaacatttttacccatggcaagacatctagagtaactgaattattgactgtctttgcttttggcaaggcaagacagcaatagaggatggaaattcaacaaaagtatcaggtgtgtatatacatatgacattctaaaagggaaaaatgaattattccttaatcatctattaaataagctaagtttattttttaaaaacgtttaagcccaagaggagaaaatatgaaaggaaatgttagttatgcgaaaggttctaggtagtcaagaattcctttttcttttctgaaacccacttaaattcatttgcagcagccctagggggttgtcagaatcacattctggttaagtagtgtcagtgtgtcagatcaaagaagaaataaatcatcctcctcctcctcctgttgtgtgcaataaagtagcccattcaaaactggattcacagtaaccaactgtgtcatgtaaacaaagcaatcttcagattcaccttgtaggatggtgacaggtaaattaacaaggaagttgagaacaagaaggaaagctacctgggataaattcacggttttttttttttgtttttttgttttgttttgtttccttcagtgactttcaaaacgtcagcaatcagccctgaagtgtttggaatgcatactgaattgctacagggataaatataccattgccagaatcttctgtaggacagtcttactagaaatcagtaatcctgaggctgagcacagtggctgtcacctgtaatcccagcactttgggaggctgaggcaggcagatcacttgaggccaggagtttgagaccagcctggccaacatggtgatacctgtttctactaaaagtacaaaaattagctgggcacaatggtgggcacctgtaatcccagctactcaggaggctgaggcaggagaagcgcctgaacccaggaggcggagattgcagtaagccaagatcacaccattgcattctagcctgggtgacagagcaagactctatcttaaaaaaaaaaaaaaaaaaaaattgagcaaataaaaagttgtttatctcatggaaaccacgaggaaaatacacaagaaaaagtatagtaggctgggtgcagcagttcacacctgtaatcccagcactttaggaggctaagggaggaggactgcttgagctcagaagtttcagaccagcctgggcaacataatgaggccctgtttctactaaaaaaaaaaaaaaaaaattagctaggtgtggtggcatgcacctgtagtcccagctacttgggaggctgagccagggggatcacttgagcctgggaggttgaggctgcagtgagctatgattactacacccttgcactccagcctgggtgacagtgagatgctgtctaaaaaaaaaaaaaaaaaaaacacattatatgacatagttcattgactattatttacatagtttcaataaatattaaatatggagccagccaaaattaatttgtctatttgaatccctctgggacattctagcctgttgcagtgtagatctttctttctgtgctgggtgtcattctggaacattccgtgttatatgcttggggattcctttcacctttgttttgggttgaagctcctgtttcccagatcccttgatttctttcaagctttactgtcattttagtcaaaaaccttctcatttccctaggaagggtatatacatgtttttttcaatagcctgaatgtttacaaacctttctgtttaattgctagtttaaatgcttatggaattctgattgaaatagttttccctccaaattttgaaggctttttgcttcattaccttgtggcttccattgttgctttgagaagtacaaagcattctagtgctttgattctagaccctttgggacctgtctttttcctctgaaagcttatgggtttctctttgtccccagtgttatgaaattcataaaaatatgtcttggtgtgggtatttcaacccgtgtgccggaccctttcaattcagaaaatcagatccttaattctggaattaattctttattttctttcctctgtcttctttattatctttttctgaactcctgtaatttggaatttgaacctcttgggttatgtctacttttcttacttttcttctcctatcttccaactcttttttgttttaccctttggaaatgttacatttcttttaacctttcttttgctttttttctatttctattatcatgttacttccaaaagctcttattctaagtctttaaatagaaatttgttctagtctcatagataaaaccatcttttagcttttaactgtgaataattgtcataattgatttttctgtttgttttgctctctcatgaggttttctgaagatgcctgacaaactgtcctgtgctcaaattttaaaataaggcataaaataattaatcagaggttctgtgctcataggcggagcttgtcaactttgtgtttctgtgtatggcaatcttgctagataatttacacaggaaacctccaatatcattatctttgggtccttacaatttggcagtcagattccccagagaagaatcttccattctgacccctggggatataaatataagcctggctaccaaaactgtacaatgagaagaaaggctgaagactcaacattcagaatcctttcttttccatccagtattccctgctcctgttctgtctagggtcccctggtcagaggccctcttgtattgcctgcaagataacaaatgtagggtcttgtaccacacaggaaaagaactgtcacctggctatttgatattgtgagggggcagtggagggctgtaactgaaacagacttttgaaccaaacttttccttttcgccctaacttcattctctaccttctttagaaatattgtgagccttcaattttgcttcacagctttttcctactgctgacttgaatattcagctttctgcagtctaagtcatttgctatttccagttcccaaattttgttgctctcatttctaccttatctaaaatgatactcccaattcaatattgtctctcataataccctgtatgttctttccacaacaatcatcatctttaattattttcctttattatttatctctgccactagaccattagctatctgagggaagactggttcttatttatttttcatgcctatcacagcaatgaactatggcacagagactaggaatatagggtcaggagtctgggttcaaatcccagctctcccacttagttacatacatacccttggataaaaaatctctctgtgagtctcatttttcatcagcaacagtgggataatagtaaacgtttctcctagagctttttggatcatttagtaattcaaataaagtgctcagtacttatctgacacttgtaagcaacaagtaagtgcaacgtaaggcaggtgcaggatagggccgggcgcggtggctcacacctataatcccagcactttggaaggccgagggaggcggatcacttgaggccaggaattcaagaccagcttccatagtgaaaccccctctgtactgaaaatacaaaaattagccgggtgtggtggcacacacctgtagtcccagctactccagaggctgaggcaggagaatcacttgaacctgaaaggtggagattgcagtgagccgagaacgcaccactgcattgcagcctgggcagcctgggcgagactctgtctcaaaacaaacaaaaaacaaagtaaggcaggtgcaagataaaaatgaataagtaaaaagaaaaaaaatgaataagtaagtatcctaacacatatggtttgaaaatatggttgctatatatatttcatacttagatgaatttggggcatacacttctatcccctttgattagaccaataaccttaaggtcttctgtgactttttcctccaacaggatatccatcacaagggtcaccgctgacatctcgcttgccaaacgctcggtattaaacaatcccagtaagcacgcaataatagaaagatccaacacaaggtcaagcttaggtaagtctgtgcaatgagcttaagctttttaaactctcctctcccgatgttgatgatgagaagacctaacaagatgataattccatgtgtcacagagtatagaaaaaacaggtgtgtgctgccagtcgctgttgctatggtcttactgatttcatggtgtggaaggatttgttatgatagtttcaagttaagaattccacaggctgtcagcattaatgttttggttgtggtttgttttcactaacatgagctttggtgtctgcagactctaagatctcctggctttgcatcagtgttaccatgagcaagtttattaaccttttgaagcctccatttcctcatcctaaaaaagaaataaaataactacctcatagaatcattgcaaggattaaacatgatatgtgctcaataaatgatatccattattatcctaaatattccttaattccagttatatatcaataatgaaatcattctcaggagagtgtaatttgtgggtgtggaaattagtaaaagatgaagtcaattcctggctatatttattgatagatatcaatatgtttgttttatttgtaaaaacagtgtagggagttattgtgtttacagagatggtatgtggatactgcttattaacgtatactgaattgatcacactgagacccttcagctgctatttaatctttttggtatgtgcttggagttttaggttaatcactgttacacatgttgcttactggatggttaggtttctgtttttataaagtaaactttctgagagttgtgtcagatctttgagcttaatttttctctgtttataggttagatatacaaatcctctgagaggctggtttctaacatagaagttcttcgtttactctgaagtatgattatataaataacagaaaaactattataaataataagctttatatgttagcaatgagcatgatacattatagaactcagttttgtttctcacctaacaacccttcgttggcaaaacttcagtaacaggtttagaaatatatttgaggaaaaaatgtaatcatgtgttttgcttatagcaattcctttttatgtccttatcatctgtcacagttaaaactctttccacacatcatttgatgctcacaagaattactttttattttgacttttttgagagagggtcgcactctgttacccaggctggagtacagtggtgtggatcatggctcactgcaccttgacctcatgggctcaatcaaacctcccacctcagcctcctgagtatctgggactacaggcacatgccactacattgggctaattttttgtagagagggagtctcactatgttgcccacgctggtctccaattcccaggcttgggcaatcctgccttggcctcctgaagtgccaggactataggtatgagccactgtgcctggccaagaattattataaaatgcttatttcataaattaaactgaattaacaaagtcaagtaattttttagactcatcagtggaatcaattacataacagatttccttagattgccaagattttttttacaactactgattatacattgtttttaaatgaattttccagtctatgtatttcattgagcatacactagataccaaatatcatgtggaagcccatgaataaaaaaagaaactgatgaagccccttccctcaaggagctgggtgtagccataaggcgaatcagtgaagagccctttgagatagagggtgatgagcaaagtggtcgagccatgaactggctgccaaagagctgttgctgcaggaggcacagggaaaggcttttccagggagctgatcctgagctgagacttgaagatgacaggatttagccaagaaaaaagggaaaggagtggagagggtgacagtgattcgagacagtgaaagccacaacaggcttctgaaaaacataggtgcttcatttaagctaaaatatattgttttaaaaagaaggacatgggagatgacatgacagagagaggcaggcataagacatgaaaaggttggagcttatttctattagtctgttctcaggaaaaaatgtgatcatgtgtttcgcttatagcaatttcttttttatgtccttatctatcacacttaaaactctttccacacatcatttgacgctcacaagaattactgctaataaagacatacccaagactgggtaaagtaaagaggtttaatggaatcacagttccacatggctagtgaggcctcacaatcatggtagacagtgaaggaggagcaaagtcacatcttacatggcagcaggcaagagagagcatgtgcaggggaactcccctttatgaaaccattagatctcatgagactcattcactatcaggagaactacatgggaaagaccaagtcccatgattcaattaccccccaccaggtccctcctgtgacacatgggaattatgggagctacaattcaagatgagatttcggtgggcacagccaaaccatgtcattattcttaaggtggtaggagaccatgtacagactggaggcattcattcatttagcaaatacttgaataccaaccatgtgccagccattattttggtgcccagggacacaaaagtgaaggacacaaagtcctctttctcatagtgtttgttttacaggaagacatggacaaaatcttgtatatatagacagacagagatggctggtcagtggttgagaattctaaaagcagcagcagaccaaggaataaagagtgagccaaggaggaggctgtaatattattataataaaatgcaagaagtacaaaaatgcaaaaaaaaaaaaaaaatgcagttgggcaaaccaactgcatctaacaccaaacccattttataataaagtgtagagtatatcatgtaatgtattgaatactaaaagtgaaaaacagaatggttgtatggggactcaaagttcggttcccactgtacatatattgctttcacactcttataaagttgaaaaatctttaagtcaaaccatcgtaagtcatggactgtctgcacttagtgtaggccaagtactgcagtaactataacggaagctttgcatgtggattaatttagtcctcatttccgtaatacagattagaatacttaggttctaagaggttcaatatgttacccactggccataaagctctatgaagcgatgacgcttcacttctgccccccaagccactttgatatgtggcagtgggaacagagaggcagaatttactgagcctggggagaaaggtagttagagaaggcttatacagattctttttgcaagataaggcaggcactggtcaaaattaagagttttgtgtgtagtaattatgaaaatggcattggaattacacatatggcattaaataactcatactagagctacctccaggtcttattaattcctaactgaccacttaggtgtccctcaacactagccgcaatgaaagtaaccatctctactctgttattacagtattttttgtttgattacagaaacctccttctaaataagttaacttctgttttttgttttttaacttttaagttcctatcacccaggtattaagactagtactcaccagttattttttcctgattctcttcttcctcccaccctgataggccccagtgtgtgtgtcattaaccctctatgtaccttgttttctttatccactccatcactgatgggcctttaggttgattccacatctttgctattgtgaatagtgctgcagtgaacatatacatgcgtgtatctttataatagaatgatttatatttctttgggtatatagccagtagtgggattgctgggtcaaatggtattcctatctttatgtctttgaggaattaccatactgtcttccacaatggtttaactaatttacactcccatcaacagtgtataagcgttcctttttctccataacctcaacagcatctgttattttttgactttttaataacagccattctaactggtgggagatggtatcccattgtggtttgatttgcatttctctaatgatcagtgttgtagcttctcttctttatctaagaggaaacattgttcctgttgttgtttatagatattagagatataaagcatagaaaggtgttcatttttcagtttaattcagtgggtataagaaactgtgggatgtggggagatgaggaaggcttgccccgtcttcaagatgctgagctgcattctttcattagctaggacaactggaaagaatcaaattgactttcagtttcagaaacgaacattggggaagtttctgacatttctttattagagtaaattctgagcatgatatactctgtcaaaggaaaattcctagcatggatacatccatttttaaaagcatcatttttactttgaagtcaaaagtattatcagaatttgtcatcgattcttaaggttgtatctactaatacagtgttgcaccaggattctgaaagtccactttaaaatattttaaaactctttccctttaattaacggagtgtaaagtatgtatgtaaggctaccacaaatatctttatatatgtgtatatattaaaacatgttaatatattgacataatataaataatatccatatatgtaatatattttaaggctatccaggttttatacaatcagcacatattagggctgggcgcagtggctcacgcctgtaatgccagcactttgggaggctaaggcgggagatcacttgaggtcaggagtttgagaccagccttgccaacatggtgaaacgccatctctactaaaagtacaaaacattagctgggcctggtggcacatgccggtaattccagctatgtgggaggctgaggcgagagaatcacttgaactgaggaggtggaggagattgtggtgagccgagactgcaccactgcactccagcctgggagacagagagagactctgtctcaaaaaaaaaaaaaaaaaaaacaaaacatgaaaacaaacaaacaaaaaaaacaaaaaaacmsmsmkrtymwwcywgymckrstsaagacctttaaaagcaaggagttacacgggatgctgtgactgtctgaacacttaacagatgaaacaaagatgaaaatctttgtgatcagatttcttaatgcttacagtaaatattaatttaggttgtaacttgactgggattcagtggcccaatgttattttaaagctagtatctcatgtagtttgggccctgattttttaaagatatctaggtaaaaaaaaaaggactcaagtcataacatattgtgaggcagatggattagtgaccagagagttaccttttcttcaataaggtactagttaaaattatctccaggaagcttctggcaagaatccaacggcctaagaggaattaaaaggtaattgtaaatccacatttgctagcataaaagtctcatggaattcaacctccacgactgcagtgggaagtgaaagctatgtactatgctttatagacctatgctgcctagtaatagtagcttctgcctatttattaaattttaaaaatttacacgcctgttcaagtgctcagtagcccattagctgctgccacgctggaccacatacagagaatatttccctcattgcagaaaattcggtcagacagtccggtttttgagtctttggagatcacagaacagatgaactgaatgccattttctcggagttcaactagatattctaatgttttgtgataagtttctataaattttatactttagatttctgtagtgctgcctctgaaaactgcccttttaaaacatgactactttggttggaaaatatgaggtgtgtttttggataagtttctttctggtgccattcacgtctttgctgttttattttgtatttcatcttgttaataaacatctagacggcatacaggtgacatgtaaacatagatcagcccgtgcactgaaaggaaaacctgtcatggttgctaatgcaaagtggtctgcaatgaacacacggaagatatgtcaaggttcttattttacagcagttttatgaaatgatttcatagactgcaagcacaaagaatgtcagcagagagctaaaaatttccacaatccaagtattatactaaaagtaaattctgtagccggttgacagaaaaattccttaaatcctaatgatgtgtggagaaacagccctttccaaaaggataaattactgttgtaaatttttatcaattctattgcctgtaagcattaacataatggctgacctactcacctttctgttgaagaaacagtataccattttactttatcttaaaaatactgcactttaactgaattgtttcgccctttacagcggaagttcagagtgaaatcgaaaggatttttgaacttgcaagaacattgcagttggtggtccttgacgcggatacaattaatcatccagctcaactcagtaaaacctccttggcccctattatagtatatgtaaagatttcttctcctaaggtaagtaggactgctactgtttgctctataatcaaactttcctaaaatgtattttatgttctgctttctataattaggctattgtaatagcctttatgatgtatagagaatttgaggagacatgatagtcaagaatttttaaattgatatagtttcatggcttagaacagctgttctcaaagtgtggtccatggatccctggagagtgttgagacacttttagagggtccatttagtcaaaactacttccatgataatactaagacattatttgccattttcactgttttgatatttgcatggctgatgcaaaagcaatggtgggtaaaactgctggcgtctaaacataaatcaagactgtggtatcaaagtaccagcagttactgtattcaccgccaccatgctttcgcagtttgaggggaaaaaaagccaatttcacttaatgtccttataaagtagtaaagtttattacttttattaaatcttgacttttaatattcagtgtactaaaacaaagtacacacaaagctcctgctgtataccaaaaagtaaggacaagcactggtttgattgagttgtgaactaaactagccatgtttttcatagaataccatttttatctcaaacaacaactgacaggctatgcttattccgacttggtgtagcagatattttcttggacaaaataagcctgtcacttaaaggagaacagcatgtgttgccaatgataaaactcaagctttcagacaacaatcagaattttagaaaacttgtatgcatctctgagaacttgcaagcttcccaataaagttttctctgagatcaatggtaatattaatgaatatgatgttttaataatgtataatgaaatatgtcaacatttggaagatctgaagtcagtgaaccattattgtttgtatgatcaatgaataacwttaattttcaagacagaccaatggaatgtcatggagtaagaaaattgcactgcaggttcagattccacataacaaatagtctttaaggaaccaccatttgttgagttttagtgtagtatcaaagaagactatactaaattgtttctccttttctcaattacaaatctgtaggaggttggattttcttcacgtatttcaaccaaaacatgacattgcagcaggttgactgtagaagcaaacaggagactgcaattgtcttctatgaagccagccagccagccattagagagatgtgtaaaaatgtagctatttttattaaaaaaaattcggccgggcgcagtggctcatacctgtaatcccagcactctactaggctgaggtgggaggatcatgaggtcaggagatcgagaccatcctggctaacacagtgaaaccccgtctctactaaaaatacaaaaaaattagccgggcgtggtggcgggtgcctgtagtcctagctacttgggaggctgaggcaggagaatggtgtgaacctgggaggtggagcttgcagtgagccgagatcgcaccactgcactccagcctgggcaacagagcgagactacatctcaaaaatatatatatatatattttaacatgtatcagatttattgtgaatttttaaataaatgttttaatagttttccattttagcttctttaaagaggttgtgagataaaatgtttgagagctgctagcatagaaaaaatgtgagtgcttaaagcttgcaactgtgatttatgttaacatgttaattttgcagataatcttatagctccatctattataagccccttgtgctgtatataaaaaggccccagagaaaggagtcaataatgtaccttgtactttacctggatgtagttattactctgttaaaaactcattatcttttacaggttttacaaaggttaataaaatctcgagggaaatctcaagctaaacacctcaacgtccagatggtagcagctgataaactggctcagtgtcctccagtaagttatctctatatacagcataatccagttacagagatcagaccttttttttttttttttttttttttttttttgggggacaaggtcttgctctgttgcccatgttgggagtgcagtggtatggtcttagctcactgcagccctgaactcccgggctcaagtgatcctattgcttcagccttccaagcagctgagactataggtgcatgccaccatgatcggctaacttttttttttccccctgtagagacggggtcttgctatgttgcccaggctggtctagaactcctggcctgaagtgatcctcctgccttggtcttccaaagtgctaggattacaagcatgagctgccatgcctggccagaactggcattatattttgaaaaaaacagtcaaacacctgtcagggaagagaatcctcatcacttacagtggtattcattccaaagtaaactgtcctccctccttccatgatcatgtgttttgagcacaagtaatccaaacgatgatcatagcttaccaaaagcttccgtacatcctgcagtaacttcactttgttaatatccaacacaagatcctggttccgaaaatttggcttgtatgatgagtctatttggagttggtatattattcatttctgatcatagggatcaagttgtctgctcttaataactgtctgagacatttattttcacatggtctcaaatcaatttctaagtaataagttacctagattctcacttgtcgtctatgctttacatgcaatgccttgaggtattagagctttcctaggtttagttttggaggcagggtcttgctttgttgcccaggcaggagtgcagtggtggtgtctcagctcactattgcaacctctgcctcccgggctcaagtaatcctcccacctcggccctccaagtagctaggactacaggcaaacgccaccatgccctgctaatttttgtattcttagtagagacggggctttgccatgttgcccaggctggtctcaaactcccgacctcaagtgatccatccaccttggcctcccaaagtgctgggattacaggcatgagccactgcaccaggcttttttttctttttaagcatagccatttcagggtctataaatatttgaaagatataaaatatgttaaaatttataataaacactaaaaaatcttttgaaaagtggcattattttcttctctactgaactactgtgaagtttggacaatgtcaaaatttcacatcctaatcttaccttattaatttctaaattcagatttcataatcttgggccgggcatggtggctcatacctgtaatcccagcactttgggaggccgaggcgggtgaatcacttgaggccaggagttcaacaccagcctggccaacatggcaaaaccccatctttactaaaaatacaaaaattagcagggcttggtggtaggcacctgtaaccccagctacttgagaagctgaggcaggaaaatcacttgaacctgggaggccaaggttgcactgaaccaagatcaggccactgcactccagcctgggtaacagagtaagactctgtctcaaaaaaagaaaaagaaaaaagatatcacaatctttatgtcaagaacaggcttcttcctattctattctattctgttcaaatatatatacatctcttttctaccatagtatctatgcctttttcattgctgattgatagacaacttttctgggttgccatgtccttaacaactgttacctttctggccattatttattagttaagcattcagtgccctcaacaatgatttgaggtagtcagacacttcctaactaaataaaaagggagatagtagcagcacttatagaagcaggagcaagtacaaaggggtgcagctcatgagccccttcctcctcttatggaggtgggaagggggtgaaaactgggctggcatcaatgtggtctggaatgtctgcctctgcaggagctgttcgatgtgatcttggatgagaaccagcttgaggatgcctgtgagcaccttgccgactatctggaggcctactggaaggccacccatcctcccagcagtagcctccccaaccctctccttagccgtacattagccacttcaagtctgcctcttagccccaccctagcctctaattcacaggtaaggggagtttttatatatatctatatatacaatcttcatagaaaaaaggttgcctatggtgacacctctaggatccaagcccagtagcctgcttggggcttgttctagtatattaactcaaagcaagtccagcatgagctgtgtatgtacctgtaagaaaagcaccatcaacagaatatattgggaacatacacagactaccgaaactttctaaacagtagcatagactgtggaagtggatcacctagattcaaatcctggctgcacctcttaccacttgtggggtggataacctggggcaaatttcttaactgttcttacctcaggaataataatggcaacctgtccaagaggctgctggaattaataatctcaagagatgatcttatagggctgttgtattaatgagttattatatacaaagggtctacagaacagtgcctgtcccatactgtatcactgtatcaggtaagcatttgctatttttaatattctcacatacagtcaagcagaggtagttaagtttacaccgctgtatagaaaaatctcagggacctgcatctgtatttgagccacaggagaataaataaaagaacattttccctgctgctgcttttttttttttaaaggaaaaagttaccatgggcactgttctaggcacttacaaaagtccaatttaatatagtatagtataaagccttataaatgccactggatgttaccaaagggatgaagctaggttagacttcatttcagcttttcggatgcttaaaaaggactctgcttgaatgcacttgctctgggacatgttctttacacactgaccttggttaacgcctggtgtgctcctttcgctgccagggttctcaaggtgatcagaggactgatcgctccgctcctatccgttctgcttcccaagctgaagaagaacctagtgtggaaccagtcaagaaatcccagcaccgctcttcctcctcagccccacaccacaaccatcgcagtgggacaagtcgcggcctctccaggcaagagacatttgactcggaaacccaggagagtcgagactctgcctacgtagagccaaaggaagattattcccatgaccacgtggaccactatgcctcacaccgtgaccacaaccacagagacgagacccacgggagcagtgaccacagacacagggagtcccggcaccgttcccgggacgtggatcgagagcaggaccacaacgagtgcaacaagcagcgcagccgtcataaatccaaggatcgctactgtgaaaaggatggagaagtgatatcaaaaaaacggaatgaggctggggagtggaacagggatgtttacatccsccaatgagttttgcccktttgtgtttttttttttttttttttgaagtcttgtataactaacagcatccccaaaacaaaaagtctttggggtctacactgcaatcatatgtgatctgtcttgtaatattttgtattattgctgttgcttgaatagcaatagcatggatagagtattgagatactttttcttttgtaagtgctacataaattggcctggtatggctgcagtcctccggttgcatactggactcttcaaaaactgttttgggtagctgccacttgaacaaaatctgttgccacccaggtgatgttagtgttttaagaaatgtagttgatgtatccaacaagccagaatcagcacagataaaaagtggaatttcttgtttctccagatttttaatacgttaatacgcaggcatctgatttgcatattcattcatggaccactgtttcttgcttgtacctctggctgactaaatttggggacagattcagtcttgccttacacaaaggggatcataaagttagaatctattttctatgtactagtactgtgtactgtatagacagtttgtaaatgttatttctgcaaacaaacacctycttattatatatawwatatatatatatatcagtttgatcacactattttagagtcttaatgccaagtcagcagatttgctttatgaattacagggactagaaatgcccacattcaggaaatttgtaataacattgtctagacacctatcctcattctagtagaaagtgtgtacatactgtaaatatgtgtgattgcttgacttgaaaaggtttgaattctgaatgttataccatccttgtaagtaagtttgtaatttccaccataaattatggtaaatataaaactccagaggttgttctactccatacagttcacactgattgtgacacattcttagtagctagtgtctgttctagtcactgcactggagtctacgagccggaactcgctatatgcacgtgtgtgtgtccgtatgtaagaaagtgtgcaccgagtgactgaatggttgagatgaattggaatgctgaagactaacgaagaaactagagactgatatcgagcattctgcccacctcgctctgtatttaattaattgtgctatatgttgctttaacaacccattgagcagtcagggaatgtgagtaagcttgctgccaaaggtaactaggaaagcattcatctgctgcctccttgtttttgctcctagagagtgaaaatacaggcaattttactgtgagtgtttcactggaaatgtacaatctttgtgtgttagagtatttgttttagtaagaaatgtttacacagcttgtggaattatttcgtgggaaaataaatttttataacttctcccacttcaatttctaaccttgcctattgttcctgttgtttgtttacctcccagttacctaccattcctccccaccaccgactccagcaggttcactgtctgtcagaacccagaagtgcttcttataaccaaagtttctgttcttcagaagaaatcagggcaaaatggggtgacttgaagtgaataaaatgttaagaatattatcctacataagacatgtacacagaaggggaaccttgaagacattatctccatgcctcaattacactgctgtaagaagcttacaatgtcatcatgtttaaggctaagaccttttccgtgtctcaagtgtatattttgtccagttataactggatggtaagacagtattaagagtgcaagtacctggcacttgaagtttgtcccaggaaaatgcctgtgtataattacctaacttcagatctgcacattaacttatttaacaaaataaatcagccgggcgcagtggctcatgcctgtaatcccagcaatttgggaggctgaggagggtggatcacctgaggtcaggagttcaagaccagcctggccaacgtggcgaaaccccgtctctactaaaaagataaaaaattagccaggtgtggtggtgcacacctgtaatcccagctacttgggaggctgaggcaggagaattgcttgaacccaggaggtggagcctgcagtaagccaagatcacaccactgtactccagcctgggtgacagagtgagactccatctccaaaaaagaaaaaaaaacaaaaaacaaaaaaaactatccagcaaaattataaaatctactttgttttgcttccttgattattccaagttcttaccaaatattcttagccttttataagtaaaactgttttacatttaactccttatttcccttacccccaagaaaacgcaatattaaaaatgattaagctggggtggtagagtatacctgtagacccagctacttgggaggctgagataggaggatcccttgagcccaggaggtggaggctgcagtgaaccgtgactgtaccaatgcactccagcctggtgacaacctggtgtttaaaaaaagaaaataaaaattagttacatatataatgttttatcagcttatatatgaaaaaatttccctcagttcgttaattagccctacactgtttacataaatttatttactgagtataaaatcagtagtcataataaacttgacaattcttacattggtaggaaaccatattctaattaaaattga

SEQ ID NO: 24784 - DNA, 3407 bp, Homo Sapiens
ggagccacatactgctgacggcccagaactggcagagagaaggttgccgtggctgctgttgacagtttctacctcttgtacagggaaatcgccaggtcttgcaattgctatatggaagctctagctttggttggagcctggtatacggccagaaaaagcatcactgtcatctgtgacttttacagcctgatcaggctgcattttatcccccgcctggggagcagagcagacttgatcaagcagtatggaagatgggccgttgtcagcggtgcaacagatgggattggaaaagcctacgctgaagagttagcaagccgaggtctcaatataatcctgattagtcggaacgaggagaagttgcaggttgttgctaaagacatagccgacacgtacaaagtggaaactgatattatagttgcggacttcagcagcggtcgtgagatctaccttccaattcgagaagccctgaaggacaaagacgttggcatcttggtaaataacgtgggtgtgttttatccctacccgcagtatttcactcagctgtccgaggacaagctctgggacatcataaatgtgaacattgccgccgctagtttgatggtccatgttgtgttaccgggaatggtggagagaaagaaaggtgccatcgtcacgatctcttctggctcctgctgcaaacccactcctcagctggctgcattttctgcttctaaggcttatttagaccacttcagcagagccttgcaatatgaatatgcctctaaaggaatctttgtacagagtctaatccctttctatgtagccaccagcatgacagcacccagcaactttctgcacaggtgctcgtggttggtgccttcgccaaaagtctatgcacatcatgctgtttctactcttgggatttccaaaaggaccacaggatattggtcccattctattcagtttctttttgcacagtatatgcctgaatggctctgggtgtggggagcaaatattctcaaccgttcactacgtaaggaagccttatcctgcacagcctgagtctggatggccacttgagaagttttgccaactcctgggaacctcgatattctgacatttggaaaaacacatttaatttatctcctgtgtttcattgctgattattcagcatactgttgattcgtcatttgcaaaacacacataataccgtcagagtgctgtgaaaaaccttaagggtgtgtggatggcacaggatcaataatgcctgaggctgattgacgacatctacatttcagtgctttttccctaagctgtttgaaagttacgcttttctgttgttctagagccacagcagtctaatattgaaatataatatgatttgtcaggtcttataatttcagatgttgttttttaagggaaattgaccatttcactagaggagttgtgctggtttttaaatgtgcaccaagaaagactactgaaaagtattattttgtaactaagattgctggtactattaggaaaaatctgtgtgtattgtatagctctagctgtttgactatctgtaatgaaaatgctgcacttcaactggtatttcattagagaaccgtgtgtgtgcgtgtgtgtggtgcctttgagcaactttatttatggttaccatatttttaaaaagattttttgtcagggtgacttaacatggactcttatagggtattaaaacaatctagattattccttttcatcctaaataagcctaccaaatttcatgctgttggtttgccatgaatgatattacttcctacattatatttgtgttttttcaaatctgctatggaatgaacttattcctagatttggatatgtaagagaaacctgcagtcatcttttgatttataaggcaattcttgtggataaatagtgatttctcagcctctgacccattttataactgaaatttagccctttagagcttgttatatctggttttcctacgtttttctatgtaatattattccattccagtagcattattgatagaaatagtaagtatttatggaatagtaaaatatggacaaattacgtgtgtgacatatctgtcaatataagttagaagcttattcttggtttgtgtaatgaatttatgtattgtagtgaatacctttactggtgtgaagataattatgcacaaaccctcacaatacgcgttaacattgaaacctgtgaaatgtccttagtttgggtcatataaagccaaccatttttgaggaccatgtacctagtgctttgaaaactctaagtcactatatgaatatgacaatatgtgcacatttaaaattcagagctcggcattgtgatactgatgcagaagctagtagattggttaaaagtctggacttctgtggcatttttttcgtgacgtgataatctatcataagcagacctaagcacagttttatgaacacaattttgcccatgacattgcctacaggatttccagatgtgacttgcactcagaagatcagtggtcaacttcagaagctcttccacgcttagatcatgtcttcagaacttagatgtgaaaatctacacactgggagatgctgtgagccccaaggttttgatggagtttgcttggaatcctcttgacttcatgccacattgacgtgaactttgatgtataatgagcagcagcaacttcatgtgaaaatatggtcaggtagttatatgtaaggttacgtggtccagtaatgtcttagattgataaattaggtatggaatccatcagtgttacgtgatgagaataggtgaacacaccttgtcagtgatgatgtaaacttctctccttggcaggacatgggcaaacatgctgattggtgcaaatgtggtgccgagctgtccatagctgcagtgaaagatgaagagcaagaccttctctaggttttctagctttcattaaatgtatttttttccccagagctaatttgaaagttgattggaccactgtggatggggtgtcattaagaatgtgggaaataggggccgagtgcggtggctcacacctgtaatcccagcagtttggaaggccagggcaggtggatcgcttgatcccaggaggtcgagaccagcctggggaacacatcctgtctctacaaaaaatacaaaaattagccaggcagggtggtgcatgcctgtagtcccagctacttgggaggctgaggcaggagaattttttgagcccaggatgcagaggttgaagtgagccaagatcgtgccactgcactccagccttgagacagagcgagaccctgtctcaaaaaaaaaaaaagaacgtgggaaatatgaacctttgaaagttaatctgtgaattgaaagtttaacaataaaagtagttgtttgtttcctttggaaaaaaaaaaaaaaaaaaa

SEQ ID NO: 24785 - DNA, 2750 bp, Homo Sapiens
gaattccggcagcgtccgggctagttcctggcgcgagcggccgcgggccagtttctatctcctcatccagggcttgcgggcgaggcctgttttaagtctccagtaaccgagcggaggcccggcaggcgcgacccgggctgcgtacgtcagagctgcctccgaagtggtaaaatgtgctgcgagaagtggagccgcgtggcggaaatgtttctcttcactgaggagcgggaggattgtaagatactgtgcctttgctccagggcatttgtggaggatcgaaaattgtacaatttgggattaaaaggctattacatcagagacagtggcaacaattcaggagaccaggcgacagaagaagaggaaggtggttattcctgtggtactgcagaatcacatgacagcaaaggcataggcctggatgaaagtgaacttgattctgaggctgaactcatgagaagtatgggattgccacttcaatttggtaggataactgcacataaggattttgaggtatctatgaatactagaaataaagttaaaataaaaaagaaaaaacatcaaaagaaatacttagatgaaattgtgcaagaatcttggagaaaagaatatgaagaagacgacattttggcttcagatgatccatcttcaattgaacagtatgagaacaccagaacatatgaacttcaaagcaaaaaagatactgagacagaaaatcctccagttgaaaacacattatctccaaagctagaaattacagagaaatgggaaaagtattggaatgaatatggaggaggactattgtggcaaagttggcaagaaaaacatccgggtcaagcactatcttctgaaccttggaactttcctgatacaaaggaagaatgggagcaacattatagtcaactttattggtattatttggaacaatttcagtattgggaagctcagggttggacttttgatgcctcgcaaagctgtgatacagatacttacacatctaaaacagaagctgatgacaagaacgatgaaaaatgcatgaaagttgacttagtatcttttccatcttcacctattatggttgataatgatagctctggtacaagtgataaggatcatagtgaaatacttgatggaattagtaacataaaactgaattcagaggaagtaacacagagccaattagattcctgtacaagtcatgatggtcatcaacagctaagtgaagttagtagcaaaagagagtgccctgcttccggccaaagtgaaccacgtaatggaggaaccaatgaggaaagcaactcatcggggaatacaaacacagacccaccagctgaggattcacagaagtcttcaggagcaaacacaagcaaagacagaccacatgccagtggtactgatggagatgaaagtgaggaagacccacctgagcataagccaagcaaactgaagaggagccatgaactggacattgatgaaaacccagcttcagactttgatgacagtggttcccttctaggattcaagtatggctcaggacaaaaatatggtggaatcccaaatttcagtcatcggcaggtcaggtatttagagaagaatgtgaagcttaagtctaagtacctagacatgcgcagacaaataaagatgaaaaacaaacacatcttctttaccaaagagtcagaaaaaccatttttcaagaaaagcaaaattctgagtaaggtagaaaaattcctcacatgggttaataaaccaatggatgaagaagcatcacaggaatcatcttctcatgacaatgtgcacgacgcttccacaagtagtgattcagaggaacaagacatgtctgttaaaaaaggtgatgacctactggagactaatccagaacctgaaaagtgtcagagcgtatcttcagctggtgaacttgaaacagaaaactatgaaagagacagcttgctagcaactgttccagatgagcaggattgtgttactcaagaagtgccagactcccgccaggcagaaactgaagctgaagtgaaaaagaagaagaacaagaagaagaacaaaaaggtgaatggtctgcctcctgaaatagctgctgttcctgagctggcaaaatactgggcccagaggtacaggctcttctcccgttttgatgatgggattaagttggacagagagggctggttttcagttacacccgagaagattgctgaacactttgctggccgtgttagtcagtccttcaagtgtgacgttgtagtagacgcattctgtggagttggaggaaataccattcagtttgccttaacaggaatgagagtgattgccattgatatcgatcctgttaagattgcccttgctcgcaataatgcagaagtttatgggatagcagataagatagagttcatctgtggagatttcttgctgctggcttcttttttaaaggctgatgttgtgttcctcagcccaccttggggagggccagactatgccactgcagagacctttgacattagaacaatgatgtctcctgatggctttgaaattttcagactttctaagaagatcactaataatattgtttattttcttccaagaaatgctgatattgaccaggtggcatccttagctgggcctggagggcaagtggaaatagaacagaacttccttaacaacaaattgaagacaatcactgcatattttggtgacctaattcgaagaccagcctctgaaacctaactatgcagcagtgcgaggac

SEQ ID NO: 24786 - DNA, 2949 bp, Homo Sapiens
ggaggtaccacactattcactgctgcgtcgcagagcgggctgggcggctgtctggacctcgagtggcctgaggcaaggatcgcgtcagaccccgaaagctggtttgttgattagtgatctaagaccgccggaagcgcttcttctcaatcaagctatgcaacaggaagtcattacgatcccgttgtaacctctaaatatgtccccgttctgcacagcatcccgataaccgttttgtttttctcatattatgaccttctcatgttagcaccacttcgcaacgctccaggtcgtgaaggagcaacttcaccatcgccgcctacagacgccactgggagcttgggagagtgggacgtggacaggaacgtaaagaccgaagggtgggtttcgaaggagcggatttcgaagttgcaccggttgaggatggctgacattctctctcagtcagagaccctggcgtcgcaagacctcagtggggacttcaagaagccagctctgccggtgtccccagcggcgcggagtaaggccccggccagcagttcttcaaaccctgaggaggtacagaaggaagggcccactgcgttgcaggactccaattctggggagcccgacatccctcctcctcagccggactgcggtgattttaggagtctacaggaggagcagtcgcgccccccgacagcggtttcttcccctggcggtccagcccgggctcccccctaccaagagcctccatggggtggccctgccacagccccctacagcttagagaccctgaagggcggcactatccttggcacccgtagcttgaaagggacgagttactgccttttcgggaggctgtctggctgcgacgtgtgcctggagcacccttcggtgtctcggtaccacgcagtgctgcagcacagggcgtccggccctgacggagaatgcgacagcaacgggccgggcttctacctctacgatctgggaagcacccatggcacttttctcaacaaaactcgcatcccacctcgcacctactgtcgagtccacgttgggcatgttgttcgctttggaggcagcacccggctctttatcctgcagggaccagaggaagaccgagaggcagaatccgagttaacagtaacacagttgaaggaattgcgcaagcagcagcaaatattgttggagaagaagatgctaggagaagactcagatgaagaagaggaaatggatacctctgaaaggaagataaatgctggtagccaagatgatgagatgggttgcacctggggaatgggagaagatgcagtagaggatgatgctgaagagaaccctattgtcttagagtttcagcaggaaagggaggccttttatataaaggatcccaaaaaggctctccaaggcttttttgaccgagaaggagaagaattagaatatgaatttgatgaacagggacatagcacttggctctgcagggtgagattacctgtggacgattcaactggaaaacaactggtggctgaggccattcactcaggaaagaaaaaagaagcaatgatccagtgctcattggaagcttgtcggattcttgacactttgggattgcttcggcaggaagcagtatctcggaaaaggaaagccaagaactgggaagatgaagacttttatgatagtgatgatgacacatttcttgataggactggcctgattgagaagaagcgtctgaacagaatgaagaaggctggcaagattgatgagaagccagagacctttgaatcattggttgcaaaattaaatgatgctgaaagggaactttctgaaatttctgagagattgaaagcctcaagccaagttctatcagagtctccatctcaggattctttagatgcgttcatgtcagaaatgaaatcaggcagtacattagatggtgtgtcccggaagaaacttcacctgagaacttttgaactgaggaaagaacaacagagacttaaagggttaataaaaattgtaaagccagcagagattccagaactaaaaaagactgaaactcagactacaggtgcagaaaacaaagctaaaaagcttacattgcctctatttggtgccatgaaaggaggaagcaaattcaaattaaaaactggaacagtagggaagttaccccccaagcgtccagaactccctccaactctaatgagaatgaaagatgagcctgaagtagaagaggaggaggaagaggaagaggaagaagagaaagaaaaggaggagcatgaaaagaaaaaactggaggatggaagcctcagtaggccacagccagagatagagccagaagcagcagtgcaggaaatgaggcctcccacagatctcacacattttaaagaaacccaaacccatgaaaacatgtctcaacttagcgaggaagaacagaataaagattatcaagactgtagcaaaaccacttcattgtgcgcaggaccctcagcatcaaagaatgaatatgagaaaagcagaggtgaattgaagaaaaagaaaacacctggtccaggcaaacttccaccaacactttcttccaaatatcctgaagatgacccagactactgtgtgtgggtcccacctgaaggtcaaagtggagatggcagaacccatcttaatgacaagtatggctattgattgcttcagaatcccaaaagaaaaccttgtggaccatgtgacatggaatatttgggataatgtatcaaattgaatggccagagaagtttagatgattatttgtaagatctggtgactggcttttcgttctgtgttcttggcttcctaaatttatctgcccatatgattctcatgcatttgatatttatgtttaaaagtgtttatatatgtatgtaaaaagggaaccatatgttttgagaatttgtaaagtgagagacatgatcctattaaaataagaaggcaaaaaaaaaaaaaaaaaaa

SEQ ID NO: 24787 - DNA, 1584 bp, Homo Sapiens
atggctgacagccgggatcccgccagcgaccagatgcagcactggaaggagcagcgggccgcgcagaaagctgatgtcctgaccactggagctggtaacccagtaggagacaaacttaatgttattacagtagggccccgtgggccccttcttgttcagaatgtggttttcactgatgaaatggctcattttgaccgagagagaattcctgagagagttgtgcatgctaaaggagcaggggcctttggctactttgaggtcacacatgacattaccaaatactccaaggcaaaggtatttgagcatattggaaagaagactcccatcgcagttcggttctccactgttgctggagaatcgggttcagctgacacagttcgggaccctcgtgggtttgcagtgaaattttacacagaagatggtaactgggatctcgttggaaataacacccccattttcttcatcagggatcccatattgtttccatcttttatccacagccaaaagagaaatcctcagacacatctgaaggatccggacatggtctgggacttctggagcctacgtcctgagtctctgcatcaggtttctttcttgttcagtgatcgggggattccagatggacatcgccacatgaatggatatggatcacatactttcaagctggttaatgcaaatggggaggcagtttattgcaaattccattataagactggccagggcatcaaaaacctttctgttgaagatgcggcgagactttcccaggaagatcctgactatggcatccgggatctttttaacgccattgccacaggaaaggacccctcctggactttttacatccaggtcatgacatttaatcaggcagaaacttttccatttaatccattcgatctcaccagggtttggcctcacaaggactaccctctcatcccagttggtaaactggtcttaaaccggaatccagttaattactttgctgaggttgaacagatagccttcgacccaagcaacatgccacctggcattgaggccagtcctgacaaaatgcttcagggccgcctttttgcctatcctgacactcaccgccatcgcctgggacccaattatcttcatatacctgtgaactgtccctaccgtgctcgagtggccaactaccagcgtgacggcccgatgtgcatgcaggacaatcagggtggtgctccaaattactaccccaacagctttggtgctccggaacaacagccttctgccctggagcacagcatccaatattctggagaagtgcggagattcaacactgccaatgatgataacgttactcaggtgcgggcattctatgtgaacgtgctgaatgaggaacagaggaaacgtctgtgtgagaacattgccggccacctgaaggatgcacaaattttcatccagaagaaagcggtcaagaacttcactgaggtccaccctgactacgggagccacatccaggctcttctggacaagtacaatgctgagaagcctaagaatgcgattcacacctttgtgcggtccggatctcacttggtggcaagggagaaggcaaatctgtga

SEQ ID NO: 24788 - DNA, 3949 bp, Homo Sapiens
ccccgtgcgcctcttgcccgcagaccctgaggacacggccatgccgggccgggcggaggcgggggaggccgaggaggaggccggggccggctcggggtctgaggcggaggaggacgcgctgtgggagcgaatcgagggcgtccggcatcggctggctcgcgccctgaacccggccaagctcacgccgtatctgcgccagtgccgggtcatcgacgagcaggacgaggaggaggtgctgagcacctaccgcttcccgtgccgcgtcaaccgcaccgggcgcctgatggacatcttgcgctgccgtggcaagaggggctatgaggccttcctggaagccctggagttctactaccccgaacacttcacgctgctcacgggccaggaacccgcccagcgctgctccatgatcctcgatgaggaggggcctgagggcctgacccaattcttgatgacagaggtgcgacggctgcgggaagctcgcaagagccagctgcagcgggagcagcaactgcaggcccggggccgggtgctcgaggaggagcgggcagggctggagcagcggctgcgggaccagcagcaggctcaggagcgctgtcaacggctgcgggaggactgggaggcgggcagcctggagctgctgcggctcaaggatgagaactacatgatcgccatgcgcctggcacagctcagtgaggagaagaactcggctgtacttcgcagccgtgacctgcagctggcggtggatcagctcaagctcaaagtgagtcggctggaggaagagtgtgcactgcttcgaagggccaggggcccgccccctggggcagaggagaaggagaaggagaaggagaaggagaaggagccagacaatgtggaccttgtctctgagctgcgtgctgagaaccagcagctgacggcgtcactgcgggagttgcaggagggcctgcagcaggaggcgagccggccgggggccccgggctccgagcgcatcctgctggacatcctagagcatgactggcgggaggcgcaggacagcaggcaggagctgtgccagaagctgcatgccgtgcagggggagctgcagtgggccgaggagctgcgcgaccagtacctgcaggagatggaagacctgcggctcaagcaccgcacgctgcagaaggactgtgacctgtacaagcaccgcatggccactgtcctggcccaactggaggagattgagaaggagcgagaccaggccatccagagccgtgaccggatccagttgcagtactcacagagcctcatcgagaaggaccagtaccgcaagcaggtgcggggcctggaggcggagcgggatgagctgctgacaacgctcaccagcctggagggcaccaaggctctgctggaggttcagctgcagcgggcccagggtggcacctgcctcaaggcctgtgcctcctcccattccctgtgctccaacctcagcagcacttggagcctgagcgagttcccctcccctctgggaggcccagaagcaactggggaggcagctgtcatggggggacctgagcctcacaactcggaggaagccacagacagtgaaaaggagatcaatcggctctccatcctgcccttcccccccagtgccggctccatcctccgccggcagcgtgaggaagaccccgcaccccctaagagatccttcagcagcatgtcagacatcacagggagtgtgacacttaagccctggtcccctggcctctcttcgtcctcatcctctgacagcgtgtggcctttgggaaagccggaaggcctcctggctcggggctgtggcctggacttcctcaacaggtctctggctattcgggtgtctggccggagccccccagggggcccagagccgcaggacaagggaccagatggactgtcgttttatggggacagatggtctggggctgtggtgcgcagggtgctgtctgggcctgggtccgccaggatggaaccaagagagcaaagggtggaagctgctggtctggagggggcgtgcctggaagccgaggcccagcagagaaccttgctctggaatcaggggtccacactcccctccctgatggactcgaaggcctgccagtccttccacgaggccctagaagcctgggcaaagggaccaggtgccgagcccttctacattcgtgccaacctcaccttgcctgagagggcagatccccatgccctttgcgtgaaagcccaagagatccttcgactggtggactcggcatacaagcggaggcaggaatggttctgcacccgggttgaccccctcactctgcgggacctggaccggggcaccgtgcccaattatcagagagcccagcagctcctagaagttcaggagaaatgcctgccctccagccggcaccgaggcccccgcagtaatctgaagaagagagccctggaccagctgcggctggtgaggcccaagcccgtgggggcgcctgcaggggactccccggatcagctgctgctggagccctgtgcagagccggagcggagcctcagaccctacagtttggtgcggccgctactggtgtctgccctgcggcccgtggtgctgttgcctgagtgcctggcgccccggctcatccgtaacctgctagacctgcccagctcccggctggacttccaagtgtgcccagcggaaagcctctctggggaggaactgtgcccatcctcagcgcctggagcccccaaggctcagcctgccacccctgggctaggcagcaggatccgggccatccaggagtctgttgggaagaagcactgcctgctggagctgggtgctcggggtgtgcgggagcgggtgcagaacgagatctaccccatcgtcatccacgtggaggtgactgagaagaatgtccgggaagtcaggggtctgctgggccggccgggctggcgggactcagagctgctgcggcagtgccgtggctcagagcaggtgctctgggggctgccctgctcctgggtgcaggtgcccgcccatgagtggggacacgcagaggagctggccaaggtggtgcgcggccgcatcctgcaggagcaggcccgcctcgtgtgggtggagtgcggcagcagcagaggctgccccagcagcagtgaggcctgaggctcatctgatacctgcaccttctccccaagccagcgtggaccctggtgtctatggtgaagctgggccctcccaccctgagccttcctagacccttggactctcagatgcagggcccttggctctggcctctcacccccaaggctgtctctggccctgccgagcctatgggagtcccgggacagagtgcccactcccctctacttgctgctctgggcctccccacctttcctggggtctccacattcccactagtgggtcttatgtgtgtctgtgtcttctccttaaacactcgccctggagtctgttctcacacctgtgcgcaggtttgcacactcaagttctcatgggcaggctcaggtctgtcccgctgccctgggcacgaggtctcctgaggacctgggcctgttctgctcctaggagacctgagcccgttaccgcgtgactcccaccatccagctcgcgctcctcgtggattcagccatgcatggactggggtgttccctggcccatggtcacctgtgcccctcgtgtctcctcacatgggtgtctgtggttctctcctgtgtaaatgtcacgccccacccctgtttcatgtgggcactaacacgtgtgcgttcctggcgggcacacacaggaccgtgcctcacagggcccactccctgcctatgcctccctcttggggggccgaggagggcggctgctctgtcatgagaatgtacggcccgtggatgattaacgggcctttttcacttagaagctgcacattatggagcattaaacacttttgtcataaaaaaaaaaaaaaaa

SEQ ID NO: 24789 - DNA, 6525 bp, Homo Sapiens
  misc_feature (4449)..(4449): n is a, c, g, or t
aaaatgttgatattttctcttagcaggctgtcaaccaggttaggttcaggtcataagtttctacccacattctttgaactgtagttgtcattttagtttatttttcaaaaacttttgcagtacctttttggtctgtcttgtgtgtgccttgcagtgaacagtctggatttggacagtggtctgtctgttagttcagtttctcaagcctttgtcacactaataggattggatttatgtatgtccagcttgggaattattacaggaattaaaaacaactttttagagtgctttcctgagctctctttctatttgttcccccttctactttttgcttccctgtggctgctgtttctatcctccagccagagagctagtgtttattttctccattgtgttacacacttgtgcagctgcaaccaccatatccagggcccaatggtaggaggtagagaagaaaagcaaaagggattggcctcatcctcttacaacgatagttccattgaatagagagaaaggttttcctgcctcagagtgttggctgcactaggcttttgttactgtagtctggccctgttaccatgggattgcttgcatgtggggatacaggagaattcagaaaagaaaaaaagatttgctatttctacattctccctgagcattaagacctcccttgcccattcctcaattcaaagctaaggcttcttctggagctgcctctgtgggcggttcgggagataccaaaggagaaaaagtaccactgttgatatggtggtatttcaaattctggtctaccctatttcacatgccttgtttacttttcagagctgacagattgctgctccatgcattctgtccagtttcctaagagagacagcttggagtatgcttaatccatcttacctgggactgaaacagctgcttattttgccgttaaaaattacatgcagtttactgcgtggctccgggtttgtttgtttgtttttcctctttaataggtttattcagaaaacatgtccactgcaattagggaggtaggagtttggagacagaccagaacacttctactgaagaattacttaattaaatgcagaaccaaaaagagtagtgttcaggaaattctttttccactattttttttattttggttaatattaattagcatgatgcatccaaataagaaatatgaagaagtgcctaatatagaactcaatcctatggacaagtttactctttctaatctaattcttggatatactccagtgactaatattacaagcagcatcatgcagaaagtgtctactgatcatctacctgatgtcataattactgaagaatatacaaatgaaaaagaaatgttaacatccagtctctctaagccgagcaactttgtaggtgtggttttcaaagactccatgtcctatgaacttcgtttttttcctgatatgattccagtatcttctatttatatggattcaagagctggctgttcaaaatcatgtgaggctgctcagtactggtcctcaggtttcacagttttacaagcatccatagatgctgccattatacagttgaagaccaatgtttctctttggaaggagctggagtcaactaaagctgttattatgggagaaactgctgttgtagaaatagatacctttccccgaggagtaattttaatatacctagttatagcattttcaccttttggatactttttggcaattcatatcgtagcagaaaaagaaaaaaaaataaaagaatttttaaagataatgggacttcatgatactgccttttggctttcctgggttcttctatatacaagtttaatttttcttatgtcccttcttatggcagtcattgcgacagcttctttgttatttcctcaaagtagcagcattgtgatatttctgctttttttcctttatggattatcatctgtattttttgctttaatgctgacacctctttttaaaaaatcaaaacatgtgggaatagttgaattttttgttactgtggcttttggatttattggccttatgataatcctcatagaaagttttcccaaatcgttagtgtggcttttcagtcctttctgtcactgtacttttgtgattggtattgcacaggtcatgcatttagaagattttaatgaaggtgcttcattttcaaatttgactgcaggcccatatcctctaattattacaattatcatgctcacacttaatagtatattctatgtcctcttggctgtctatcttgatcaagtcattccaggggaatttggcttacggagatcatctttatattttctgaagccttcatattggtcaaagagtaaaagaaattatgaggagttatcagagggcaatgttaatggaaatattagttttagtgaaattattgagccagtttcttcagaatttgtaggaaaagaagccataagaattagtggtattcagaagacatacagaaagaagggtgaaaatgtggaggctttgagaaatttgtcatttgacatatatgagggtcagattactgccttacttggccacagtggaacaggaaagagtacattgatgaatattctttgtggactctgcccaccttctgatgggtttgcatctatatatggacacagagtctcagaaatagatgaaatgtttgaagcaagaaaaatgattggcatttgtccacagttagatatacactttgatgttttgacagtagaagaaaatttatcaattttggcttcaatcaaagggataccagccaacaatataatacaagaagtgcagaaggttttactagatttagacatgcagactatcaaagataaccaagctaaaaaattaagtggtggtcaaaaaagaaagctgtcattaggaattgctgttcttgggaacccaaagatactgctgctagatgaaccaacagctggaatggacccctgttctcgacatattgtatggaatcttttaaaatacagaaaagccaatcgggtgacagtgttcagtactcatttcatggatgaagctgacattcttgcagataggaaagctgtgatatcacaaggaatgctgaaatgtgttggttcttcaatgttcctcaaaagtaaatgggggatcggctaccgcctgagcatgtacatagacaaatattgtgccacagaatctctttcttcactggttaaacaacatatacctggagctactttattacaacagaatgaccaacaacttgtgtatagcttgcctttcaaggacatggacaaattttcaggtttgttttctgccctagacagtcattcaaatttgggtgtcatttcttatggtgtttccatgacgactttggaagacgtatttttaaagctagaagttgaagcagaaattgaccaagcagattatagtgtatttactcagcagccactggaggaagaaatggattcaaaatcttttgatgaaatggaacagagcttacttattctttctgaaaccaaggcttctctagtgagcaccatgagcctttggaaacaacagatgtatacaatagcaaagtttcatttctttaccttgaaacgtgaaagtaaatcagtgagatcagtgttgcttctgcttttaatttttttcacagttcagatttttatgtttttggttcatcactcttttaaaaatgctgtggttcccatcaaacttgttccagacttatattttctaaaacctggagacaaaccacataaatacaaaacaagtctgcttcttcaaaattctgctgactcagatatcagtgatcttattagctttttcacaagccagaacataatggtgacgatgattaatgacagtgactatgtatccgtggctccccatagtgcggctttaaatgtgatgcattcagaaaaggactatgtttttgcagctgttttcaacagtactatggtttattctttacctatattagtgaatatcattagtaactactatctttatcatttaaatgtgactgaaaccatccagatctggagtaccccattctttcaagaaattactgatatagtttttaaaattgagctgtattttcaagcagctttgcttggaatcattgttactgcaatgccaccttactttgccatggaaaatgcagagaatcataagatcaaagcttatactcaacttaaactttcaggtcttttgccatctgcatattggattggacaagctgttgttgatatccccttattttttatcattcttattttgatgctaggaagcttactggcatttcattatggattatatttttatactgtaaagttccttgctgtggttttttgccttattggttatgttccatcagttattctgttcacttatattgcttctttcacctttaagaaaattttaaataccaaagaattttggtcatttatctattctgtggcagcgttgncttgtattgcaatcactgaaataactttctttatgggatacacaattgcaactattcttcattatgccttttgtatcatcattccaatctatccacttctaggttgcctgatttctttcataaagatttcttggaagaatgtacgaaaaaatgtggacacctataatccatgggataggctttcagtagctgttatatcgccttacctgcagtgtgtactgtggattttcctcttacaatactatgagaaaaaatatggaggcagatcaataagaaaagatccctttttcagaaacctttcaacgaagtctaaaaataggaagcttccagaaccaccagacaatgaggatgaagatgaagatgtcaaagctgaaagactaaaggtcaaagagctgatgggttgccagtgttgtgaggagaaaccatccattatggtcagcaatttgcataaagaatatgatgacaagaaagattttcttctttcaagaaaagtaaagaaagtggcaactaaatacatctctttctgtgtgaaaaaaggagagatcttaggactattgggtccaaatggtgctggcaaaagcacaattattaatattctggttggtgatattgaaccaacttcaggccaggtatttttaggagattattcttcagagacaagtgaagatgatgattcactgaagtgtatgggttactgtcctcagataaaccctttgtggccagatactacattgcaggaacattttgaaatttatggagctgtcaaaggaatgagtgcaagtgacatgaaagaagtcataagtcgaataacacatgcacttgatttaaaagaacatcttcagaagactgtaaagaaactacctgcaggaatcaaacgaaagttgtgttttgctctaagtatgctagggaatcctcagattactttgctagatgaaccatctacaggtatggatcccaaagccaaacagcacatgtggcgagcaattcgaactgcatttaaaaacagaaagcgggctgctattctgaccactcactatatggaggaggcagaggctgtctgtgatcgagtagctatcatggtgtctgggcagttaagatgtatcggaacagtacaacatctaaagagtaaatttggaaaaggctactttttggaaattaaattgaaggactggatagaaaacctagaagtagaccgccttcaaagagaaattcagtatattttcccaaatgcaagccgtcaggaaagtttttcttctattttggcttataaaattcctaaggaagatgttcagtccctttcacaatctttttttaagctggaagaagctaaacatgcttttgccattgaagaatatagcttttctcaagcaacattggaacaggtttttgtagaactcactaaagaacaagaggaggaagataatagttgtggaactttaaacagcacactttggtgggaacgaacacaagaagatagagtagtattttgaatttgtattgttcggtctgcttactgggacttctttctttttcacttaattttaactttggtttaaaaagttttttattggaatggtaactggagaaccaagaacgcacttgaaatttttctaagctccttaattgaaatgctgtggttgtgtgttttgcttttctttaaataaaacgtatgtataattaagtgaagctgcatgtttgtattgaagtatattgaactatatagtttgtatgtcatctttttcaccattcagaaacagtgcttctgaatttgtgatttaaaggaattgtaatagaatagttttatttttaagttatctttaagtttatgccatcttcttaaataagtacgtaatgttccaatctaaataaaaaactaatacataactaatgcatagaaaagatacataaagcaatgtgaaagtttcttgcttctcctttttaatttctaaaaaagccactttgaatggaagttgtcatccgtaaaagctgaagtgtaagcactaggaaatctcaatatagagatttgaggaaagttatatccactaggtggcagtcattgatcataataagtgaaat

SEQ ID NO: 24790 - DNA, 2939 bp, Homo Sapiens
agcaagaacgccagggacggggtctccgcgcctgcgcagtgaagctgggcgccttcggggcttgagcttctgagggtcgggtccagcgcgtgggctgctggatggcggaaccccaggcggagtcggagcccctgctgggcggggcccgcggcggtggcggcgactggccggcggggctgaccacttaccgcagcatccaagtcggccctggtgccgcggccaggtgggacctctgcattgatcaggctgtggtcttcatcgaagatgctattcagtaccgctccatcaaccaccgggtggatgccagctcgatgtggctttaccgacggtattactcgaacgtatgccaacggactttgagcttcaccatcttcttgatcctgtttttggcttttatcgagaccccatcctcactcaccagcacggcggacgtgcgctaccgcgctgccccctgggagccgccctgcggcctgaccgagagtgtcgaggtgctctgcctgctggtctttgcggccgacctctctgtgaagggttacctgttcgggtgggcccatttccagaaaaacctttggctgctgggctacctcgtggtgctggtggtgtctctggtggactggaccgtgtccctgagtctcgtgtgtcatgagcccctgcggatccgccggcttctccgtcccttcttcctgctgcagaactcctctatgatgaagaagaccttgaaatgcatccgctggtcgctgccggaaatggccagcgtcgggctgctgctggccatccacctgtgcctcttcaccatgttcggaatgctgctgttcgctggtgggaagcaggatgatgggcaggacagggagaggctgacctacttccagaacctgcctgagtctctgacttccctcctggtgctgctgaccacggccaacaaccccgatgtgatgattcctgcgtattccaagaaccgggcctatgccatcttcttcatagtcttcactgtgataggaagcctgtttctgatgaacctgctgacagccatcatctacagtcagttccggggctacctgatgaaatctctccagacctcgctgtttcggaggcggctgggaacccgggctgcctttgaagtcctatcctccatggtgggggagggaggagccttccctcaggcagttggggtgaagccccagaacttgctgcaggtgcttcagaaggtccagctggacagctcccacaaacaggccatgatggagaaggtgcgttcctacggcagtgttctgctgtcagctgaggagtttcagaagctcttcaacgagcttgacagaagtgtggttaaagagcacccgccgaggcccgagtaccagtctccgtttctgcagagcgcccagttcctcttcggccactactactttgactacctggggaacctcatcgccctggcaaacctggtgtccatttgcgtgttcctggtgctggatgcagatgtgctgcctgctgagcgtgatgacttcatcctggggattctcaactgcgtcttcattgtgtactacctgttggagatgctgctcaaggtctttgccctgggcctgcgagggtacctgtcctaccccagcaacgtgtttgacgggctcctcaccgttgtcctgctggttttggagatctcaactctggctgtgtaccgattgccacacccaggctggaggccggagatggtgggcctgctgtcgctgtgggacatgacccgcatgctgaacatgctcatcgtgttccgcttcctgcgtatcatccccagcatgaagccgatggccgtggtggccagtaccgtcctgggcctggtgcagaacatgcgtgcttttggcgggatcctggtggtggtctactacgtatttgccatcattgggatcaacttgtttagaggcgtcattgtggctcttcctggaaacagcagcctggcccctgccaatggctcggcgccctgtgggagcttcgagcagctggagtactgggccaacaacttcgatgactttgcggctgccctggtcactctgtggaacttgatggtggtgaacaactggcaggtgtttctggatgcatatcggcgctactcaggcccgtggtccaagatctattttgtattgtggtggctggtgtcgtctgtcatctgggtcaacctgtttctggccctgattctggagaacttccttcacaagtgggacccccgcagccacctgcagccccttgctgggaccccagaggccacctaccagatgactgtggagctcctgttcagggatattctggaggagcccgaggaggatgagctcacagagaggctgagccagcacccgcacctgtggctgtgcaggtgacgtccgggctgccgtcccagcaggggcggcaggagagagaggctggcctacacaggtgcccgtcatggaagaggcggccatgctgtggccagccaggcaggaagagacctttcctctgacggaccactaagctggggacaggaaccaagtcctttgcgtgtggcccaacaaccgtctacagaacagctgctggtgcttcagggaggcgccgtgccctccgctttcttttatagctgcttcagtgagaattccctcgtcgactccacagggacctttcagacaaaaatgcaagaagcagcggcctcccctgtcccctgcagcttccgtggtgcctttgctgccggcagcccttggggaccacaggcctgaccagggcctgcacaggttaaccgtcagacttccggggcattcaggtggggatgctggtggtttgacatggagagaaccttgactgtgttttattatttcatggcttgtatgagtgtgactgggtgtgtttctttagggttctgattgccagttattttcatcaataagtcttgcaaagaatgggattgtcattcttcacttcgaaaaaaa

SEQ ID NO: 24791 - DNA, 126080 bp, Homo Sapiens
  misc_feature (3517)..(3540): n is a, c, g, or t
  misc_feature (50741)..(50760): n is a, c, g, or t
gaggcgaaggcgaaagggagggagaggaggaagggagggaggtggaatttcatttcttccactaaagcgtttgcggagacttcaaggtataatctatcccagatcctttcccagagagaaacttggcgatcacgttttcacatgatgctcacgctcagggcgcttcaattatccctccccacaaagataggtggcgcgtgtttcagggtctctcgtctctctcctacagaaaagaaaaagaaaaaaatgtcattagaagaggcgtaacacgtcagtccgtccccaggtttgtgtttcctggagtggccgaaagagatcagttctaacctgctctgcaggaataacggtcctgcctcccgacactcttggcgaggtttttgtacagtttgctccgggagctgtttcttcgcttccacctttttctcccccacacttcgcggcttcttcatgctttttcttctcaccatttctggccaaaactacaaacaagacttcgcaggtaggttttttttcctccccttttctctctttttatccctttttggtgtgctcgtcctccatcctccttttctaattttctcattttgagtggggatgtgagtctgaagtgagaaggggtgtccgtgggtaggaatttcaggtgggtttagctcctttatggcaagcttttctcaagagtggcttcttcgctttctcttacactcacactctctctccttgcttttctctcctttttccctcccccaaataatttcccctgtacctgttcattcaggtaaccaaaggtgtcctttgctatccagcccaggaaaagttttattgagaattatatggctggaataaaaactcatcaaggggagaggtcctgctctattttcgcatctagttccaattcattatattcagcaattaggacttggcaaatacctgttaataattacaaaacttggtcagttacagacctacaaattcgggggcaagtctttctcttagacatggcagttcatcctctcccaccgagaaggctgttttctaagcagaaagttgtctgtttttgtctgcttagcgagtttcatttctttatttcattctttgtgtgtgtatgtgtgtgaagtaacacctcacttctgtgattataaataaagaagtgaaagtcctcatggaacttgagtcgtttaccaaagtggaggggggggcactacagctgggaagaaaactgctgtcaggatatcagggttttaaattaggataacttttaaaattgtatttttagtggcaaagtaatatagacatggatttaatagaagacacatacacacatatatcccattccatactttggcactgaaaagtcgagagagagatagcaggagttcccaggaacagtgatgagcccggctaacatgaatgtgtttatctcccacctactgatatattttacatgctccccctgtaatgatgaaggcaagattactaactccagacttaggagtaacaggcaaagataaagtttacagcacaaatgccctgtctctctctctcacacacacacatgcccataaaactagcaacttactttattaaacatgtatttatatgcagtcgtgtgtctcaggatgaatatagacaggccagctgtttcatcccagacacttgtgtgaccatttctttatttcaggatttcccctaacaatttcaaatcaataggacaaggaaagaaatgataaaatatgtcaaacttaaaagtctcctactatgtatgcctaggtaaatttaaggtgctttctaaaatatccacttccccttctctctgcccccctcccttcacccctctcagcaaatgtgtggaaactgatactcactttccaggttttctgcaaagcttctagcacaggagacaataggtgtggggcgtggggactgagtgtgcccggcagagaaagggttaatggcccttgtgttacagtttgcatctgttacatcttttatagccccctgtttaaactaatcctcgaggcacagcatcttcccaacctccaccgagttttcaggattctcctcctctcctgcctgcctccgaggtcccccttctccaagttttgacagtttcaactgaaaaaatgcagcgcctctctcgatttttaggtacaaaagtttcgaagccagaaaggatacgatcatttagtagagcttaaaagtattgccgtagtggttggactttctctttcctttcttaagggaaaaaaaaaattctactggaactatttaagggaaccagtgtgggggagcatgtgtgtgagtgaggtggggggaaatacttaagtaaatattgtcaaagtggcgagggggggtggggtaaaggacagtgtccaaagaggcttataattatatttatcattgcggcgtaaaacgggaaatcttaatttgggggcgagggtggggggaggaagagacagtgcctcgataaactccaaaaggggaggggagggggcgctgggcgagtgggcttcctataattactattatcaatttgcccgagtgtgcttcatccaggggctgtttcgcgttgtttgtttgtttgtttcctctgggaattggggggtggggggatgagaaaagatgagaacgaaaagaaaacctcgcctcaccccaagttcccgagccggggctgaggacttttcgaaggaaagggtccgcctagccctgagtcaagcggtcttactgtaccgccgtgtgcattccctcatacggtcaggagttatgactcattttgaagatgtaattcttgtctctctgatcccctcgcgggtgcaacacaccaaacagtaacaaacacaaagcgcctcggggccaaggctgggggtggggggcgggaagagcggcggccgaagtttcgctttggggttggggggcgcggagaggtgctcgccggggcggtggcgtgggccctgggcggcccgcgcgcgtttcaatgggcgcgcgatgcccacattgtcgctgtgtttggttgctagatcgagcctgcgtgctgccgaagcagggcgccgagtccatgcgaactgccatctgatccgctcttatcaatgaagcagccgatcatggcggatggcccccggtgcaagaggcgcaaacaagccaatcccaggaggaaaaacggtaagaagcagcccgaaccaaacttttccgggccactacgcggctcgagacccagggagaaggagggggaaagggaaaaggaaccgaggcggcggcggcggcggcgcccagggctctagggcgagcctccctccgcggccggcgccggagcccggcgcgcgcggcggctggaccggggggtgttggggaagtgccgggcaaagtgagcgtcaggcacccgggggtccgagcgcgggggttcggccggggccccgcgcccccagccccgctgcccccctcgagcccctgcctccgccctccctccgcctccgcctacctccctcgacgcggccgcgggtctccggccgggcttcgggagcgnnnnnnnnnnnnnnnnnnnnnnnntagcatggctcgacggaccgccagtgtgatggaattatataatatataatattaatatatattatataatatataatattaatatatattatataatatataatattaatatatattatataatatataatattaatatatattatataatatataatattaatatattatataatatataatattaatatattatataatatataatattaatatatattatataatatataatattaatatatattatataatatataatatatatgttgagaatgacatatatatatatgttgagaatgacatatatatatatatgttgagaatgacatatatatatatatgttgagaatgacagtgtctttttatacaagctccctccaccaagtatcatctctgtactcttacagggtcatcaagattgtcagaaaaggcctggactacatgcctgtcccagcactagattggtattttttaagtccttttttgtttcaaagtttgccatgtgagcttaactcagttcattctgctattattacaagcatcacctctttgaagctgttatcagattcatgaaagaaaaatgcgcattttctttttctactgagggcttctttcacctttattcctgagagtgatcagagctttgaattgtaaaaaaagaaaaattttctcattgtacaataattgaaaagtatgtcatcaggtcctttctaggtcttcctgtggtatgtcagcagaaaactacagtgtttgttcattttgcattaattacacacctactatgtgcaggctctggctgaggtctgtggatcaaaaaatggatgctagagcctgggcccctgaggagcttgctgtctagtgggaaatgggggtgcatttaagatatgatgaaaatgtggcaagtgccacaaagaactttctacccaatacagagagagtacagaggatggcacaactagatctgggagaaggtggtgaggggtcacttcatggcagaggtgacttttgaggagactgttgtcatataacatggatttcaccagcaagtgagggcacagcacgctgggctgagaggatggcatgtacaagccaggagaaagggtgaacagcgcaggcattgtcagccaactgagatgtctgaaacacagggcatgagcaaagaggatgggcttgatttgagtctgcaaaggtggtcagggagcagaagaatgtcctatcccatatttttggcttgtatccagtaaataggtgatggtgagcttgcgaaccatgttttatagaagagtgacataattatatttgcgtttcagtgacacgtctctggcaactgtacgaaagatattatcatctaacatttgttgagtacttaacaatgtgctgggacccgtgctaagaattttgcctatgtcatctgatctcgccccaacaataatgctgtgaaatgggtactattattttcatactatttttactgatgaggaaattaaggtttaaaaagggcatgagcctggagtcaggaagaaagtctacggttacatgttactgtaatcatggaatttctagaattacaagcaacacaggcaataatgatcattgactagaaggacatttggaaaagaaaacccagcgtttgaaaaagagtgaggcagtttgattctgtttctctgagtgaatagtgagactaagtggggtgtaaggatgtttcatcctcaaaatttattttttctttcattactatgtcagtttgaaaaagaaaataaaaaatggttgttgatcctgaagaaactaatcctagaatgtgctacatctttgagagtttggaaagagacagttaacatacaacccttcaaaacagtggaatttggtaaaccctggaacactgttcttgctgatctaattcatgacattaaggccttcctcggccttatgaggaagcagatgaaaataatccttttgcgatgactattttcccccttttctgatttaactcttccattgcctaagactcaccaattctcaaacttctaaattctccacactgccttatctctgccatcccatggcaagtcctaaagctgctaacattttgtaacaactatgtgacaaattgttgtgcttttattcaggtcggacatctttgccaggcttgcttgttgtgttttctgtttggctgtgtcatgggaccaaaggtgcctgcctttgtacagcatgtcaaatctggttaacatgcagccatttatctttaaaaccactcctgcacaatggcagaggtgggccaagccacagggctctaagcacaacccaatttttcagaccatcttttctgcatatagggagcacgttggacagcagacaagacattttgtgatttggggaatctcttagagacaaattgtagagtgcaagtgcagtgtaactggactgctgggtgcccagtgaagtgaggaaaatcagatacagcacaggctgaaagaatgaagcaagaattcatatctctgtgcagaacatgcacagtactttgctcacacagagagttcacacatagacaaaagcatgtttgcttgtgggttattttcaggggattctatagccacagtctaggcgtatatatttgcacgtaagctttctttctgcattttgtactggtaggtgtgtctacatgtgaacatgtaaacatgcttatatgagaagacaatttgctgttgctgatttaagacacgggaaaggcctcctagttcactgaggcgtttccctcctaatgtagtagaagcagaatctttttgttttctacaattgttttaataaaggactctgtgtgtgtttaaggaagactcagagccagagtgtcaagtgctgcagtgaaaaatactgaagatttttctttccataagacagctgcaaactttataacccagttcactctgggttttcatttctcaattgtttcaaggtgtcttgggaatgatttgcccttaaataactagttatcaacaaaggagaaaaaatagcaataaaaaatgtgataaacctgcatagactagtttaactaaaatgaagaatttccttgcttggagcagttcaaggaccgaacatagcaaaactgtgtgatttaaatgaaatattcagagtggtcaacataaatacacatgtagacaagagatagtatatgtgtgtgtgtatacactgaggttacttcttgaagaaataggcattttttcctttctttttgctttttctttcttttctttttctgagtaaaggaccccagagattgtctttcactttgaaaacaatctctaatatcaggaaaatgcgctgtttgtttatgcgtacataatgcaagtttgtccgcctgggaactgcagcaaatgggagaagtatgcatggatttcacaggtaacaggattacgtgggcacataattgatccatttggagaaaaaaaatgacagtgctctaaagatgcctaggctttggagatggagtttatgaaacaggcatttgtaaattcaaaggaatcaatatgtcaattttattacatctcagaaccagctgggcattaaaggaacagtagccttaaaaaaaattacagctgcatattcctacgttgtctacctttcttaaaggccctagaatttaaggaaatgaacttagagatgtgtaccttttcagaaatgaatttacattgtccaaagagaacaacaatttaacattatgtcagttatcaacctaaaaatttgattgaaatgtctgccttatcattacaattgaagtctattaatagatacagataataagcagaatagtgattttcacataggttgcactgtcaaggattcattggaattcatatttgcattgtgcttttcaacagtctagattttacctcttcactgatgataggacatagtttaagagctagcctttgggtgtcccacagaattgggtctgtgcatgtgtgaaatattcctgttttattagagtttttgacaatctatttttttttttttttttttttttttgagacggagtctcgctctgtcgcccaggctggagtggagtggcgcgatctcggctcactgcaagctccgcctcccgggttcaggccattctcctgcctcagcctcccgagtagctgggactacaggtgcctgcaaccacgcccggctaattttttgtatttttagtagagacagggtttcactgtgttagccaggacggtctcgatctcctgacctcgtgatccgcccgcctcggcctcccaaagtgctgggattacaggcgtgagccactgcgcctggccgtttttgacaatctaaaaagaccaagctattttaaattattaagttcctaaataataggatttggacagcagccataagagaggtgaatgggatgggaatttaagatactattttaatatcacaaagaggttacacaactaaggatgaaagttagaagctatgaattggtccacatactctgcatgtgctgtctgctagaggctgcaaggcgagctgcttcactgtttcatgttccaatctccaccacccagactcctgctccaataacatctctagatctattcacttgtaacaaatggagcccagttctcctccctccccaaggaggccagacactcgatataatgaaaagaacacaggattcagacccaaacaaatttgtgtccacattctgattctgccatttactctccatgccatgtgcccctgggtgcgtttcttaaccactctgaacttcggttcttaatgcttaaaaatggggagcagtatttgttttatagaatctttgggagtattacacaaaattctaaagacagtgtctggagcctagaaaacgctcactaaattctgattatgactgtttcaaggtgtgactaatcaggatgccaggaaccctacgatggaggcacttcagtttctgggccttgctgaaacattcttgaaaagaggaaacaataaccgtagcctgagatattcgttccttttttttttactctttggagagtacttaaaaaaagaagaaaaaagaaatagtcatagtgattggcatgctattctacctctacatttccaggaaatatacatggtactttttcttatagaaacagcatctcctccaaaaagaatacattctgagatgacttttgtcacagcacttaaaatatctgattcctatttgtctccccacaaatgtgtaaatggcttgagggcagtcttgcccatctcagctcaggccatgacatacaaaaattgtttcgttaaagcaaaggtataatgaatacagcgggtatattaaagattcagtatacattatcatatgtagaaaaaagctttgggtaactttatgtcagattccctaccaccatattaataactttttgaaattcactttgtgacagctatgttattttgaatacttgagtgggtttgctttttgtttttgtttttgtttttagtttgtatttaaatcaactggctctctgcctttctcaatgacacctttgagacttgggagtcagggaggcagagaggcagtgtgggtgctcggaagagtgtaggctttggacatctgggctcaaatttggtttctactttcatacaagccataagacctgtagcaagttgttcagtctaactgcatctctgcttctcataataatactcatgttatagggcagttgggaagaaatactggtaacaggtaaagtgccaagcacatagtaggtgattaatgttctgtccccttcctccactcttctttgtcacttgagcattcactttgggttggcatttagtgagctccttctgcccgtcaacaagtcaatcaacatttaatacataccatgggtagatatcttacccctgttccaaatttcattatgaaaattgggctattttctactcaaggaaatgagcatgcagaagtaccttctgtacttagaatcacaatcattttagctattttccgcttaatctgacggtttctttgttcccatcatcttttttagtgaagcactttggtgtttctgcaatcctttgctatcattctgtgcttgggtatctcagatctctcttctcccccgatcctttgaagacatcagaaaagaagaagcacaaggtctcttgactatacgtttgccacacaactgtgtggattggttagttaatagagttgattaaaacactttgtttgattctgcttaagcataccagaaatacattcaaaatctacagctacaaaatgtaaagaaggtagtccaaatatagtactacataatgaggctccctgttggtagtatataaagcagtttagagtatagcttcaaattctaatgaagatcattttaaatcttgcactgaattgtgaatttaaaattcccatgttctccataagtatctgaagaggggcatgtaaataccataagtgaattaattactgccttaagttggtaaagcatgtgtgaatccaaactttattcttgaacttgcacttctcttcccaaggttttttgaaccatttcctatatgctgagttctgagtacctatttaactactgaggacatatgaagaaggtagttttctttgcatggattaaatgtttcaatctctgaaaatcaccaccaccacaacaaaaagtctgcccggcaccatctacatgtacatgatgaaattcctaaagcagaaaagatatatttataatctgaaacttataaaaacatgacaaactgttaccttcacttttgtgcccccttttttcattaacagtattaggccggtttttttttttttttctcttgagaagaaacgaaagacgaagtggcaagaatatctttcacttttgctcacgttttggtggtgtaatattgggaccactgaagtaattggacaacttttccgagctgactcttctgaagtaaacccaaggcaaagggaaaatggagctgctgctaggctcaactgatggcgcccacatggcgcccaccccagctccttcagagactccatcatttccacagaagggccagaggccctgccaatatccgcacatcactggcatgatagaccataacagcttcttctgagctgttccggtctatcgtgtcaatgcgtactcggggagtcctcaacgcacggatcactgacacggcactacataacggctccttagcagccattattgggtatcaagtcaatgcctactcagggaggctttatcgcagaggcctgcacgagcagacacattccgaatactaaaattccttaggaaaattagtcattgcccatgtgtgatagctgttttccattttgaattttaaccattttgggaaaaggaagagaatgggaaataccagtatagtccgaaaagcccttaaaaaatgagtgcgaaaagtggaagggtggagtggacataggaagatgatgaacttgtcattttttcctttccatagcttcattttattgtgtcaaagttgcagaaagcacttcactttcatcgaggctctttttaggcagggtacagccaagaaaacttttttatggctcagatgtaaatcctagaaaacgtagtagaaatgatggcaggatctctaactgtaaaataacagtagtgttagtagtaagtgtcattataataacgttatagaactctgcacatcaaaaataccacattttatcatgatctctgcaagagatttctgttggtagtcattctagacttctaataaataatacgttgagtaggaaaggttctgtgaggatccaaataataatgaaaatgacagtggtgatattaataataatagtacagctcccatttattgtatcattattatgtggcaggcatttgtatacattatctcatttaattttctcagcagatgtgacaaatcaggaaactgtggcttagcaaagttaaataacttgactgatgtcatgcaaccactaagtgacagtggtgggatttgaactatatctggggagagtcatgctcttaccattgcattgcctctaatgatcatcactttcagggaactaggtgtttaattagaatatcccaacccattgtctgcttactgatcaggaaactgaggcagggtaattttagtaattcccccaaataataaagagagtcagaatgaataccagaaagcaacaagaggcaaaaacagcctttctctctgacaacatgttaaccacaaacaagacatgggaatttcagagcctccgtttgtgtttcagaaggaatgtccactgttgccatcagtcctgaaaagatttccttgcaccaaatcaaaatggttcgagtttgctgttgttgatattttttttccttttgtgttctgcttactgactgacatctgctatcatgctaagcaggtgttcctatgtaaacgaacgtgccctgtttgtgtttcgccatcctcgctgctgcgcacccaaatgagcagcgtgattaagaatcctgtaaatttttgaaaggaaacggatggctaccctactagaacataattacaccgttccaacatccgcagctcactgctgcagcagagttggagaacagcagaaattaataatatataatagcatcattctagtaatttataaatgaaataaagtagagaggagattctgctgatatgcattttctccttaattctaaaagacaaagtatagattagaattttagtggggtgaaacctggccagcagtctcccactagttgcctgattcatgataggagtgtttttgcttagggaaaagagctaatatgttttattaggccagaggaaaaaaagaaaaagaaacatgaataaacaaggccctctaaaggcaacactaaataaagggggtctgaaaaaatctctgtggattgtgtgcccactgtatttaaaaagatattattactttaagacttcaacatgtgctgcattttttctttcattgtaataacataccaccataggtcaccccttctgagaaaagagggactgatcagttaaagatgtggcccaacataaactttatgttaaatagcactcgtgtaaattctagagatctgctgaacaacaatacacccatagttagcaataatagagtagatttcatcttgtatgttttatcacaataaaaaagaacattcatgcctttttaaaaacattattttgagtacccagtatgtgcaaaggagcctcttattacaaatcatcgttagattaagggagttgatgcttttagtcaaccatgctggagaaagaacaacactttctaaagaggcaaataaactatatgttaaaagtaaccagtccatttctctgtctcatagggttgtggcaggcactttagaaactttaatgtttttctaacttcatttaccgtaggtaagatgcctaacaaatggatgagctcagttgtttcaagagtttgtctcccatgagccaatgcccatcacacacacacacacacacacacacacacacactcacacacgagcaattatccttaagaaaaataatatttatagcacttaaagtgttatttaagcaacttttcctgcttaattccaaagaatgacaatacatccaaaaaaaaaagtcatggattttcttcctttaattaaacttagagaacatgaaaatactgtttgcctttcaagagaagcatgtccatttaagatgcttattcatttaagcagtattcatttaaaggtccccttgagtattactctatgtgttttgatttggttcagagaaaataaattcatttaatagatttatttcattaacaggtatttatttaagtgggttccactgtatttaaatctccaaacagtttccattacttccttagctcacttgctccatgttgactaattttaataagcctaaggtgcctagggtcttattgagtgttcagtttgatcaatatggttaaattaaaattgtgcaaaatataagcaaatgtactctaacaacacagtgaaaaatgtgctgtgcactaagcattgattggtatgctgtggacacagatatatgaagctgggtgggcctctgaactacctggaaactgccactctcctccaaagctcccctggctttagatacatccatgtgatctcccacccgttcatggagacagcagctcagatacccccattgaattagaaggggaaggagattcatgtcaggtgttttgctttttgatttaatggaaaacagcatgtaaggctcacagtgaaatcctatataaagaaaaaaagctaagattttataaaagttcaactttgagtattgctgaaatgctttaggtaataaagaatgcaggccctagttctttttcacagaataactttttaccgtaattatccttaaattttaatcatttggtagcttgaattctttttcagagatcttacttgtcaagtttgttttagcaaattacaaaaaaacaaaaacaaaagccaacctgatttttaaagtataccaaaatcagctttgccattggtactgcatttgaaaacctagtaagctttctaacaaattcattgctttctatataattgtaaagttaaatagataactgaatatttttagtggattccttttagtatgaataagtttgtatcttctattcctaaatcaatttctttacctttccctttttctcttctttttttctccttttttgcctgttttatggcaagcatacttaatattcagtgtcaatctttttaagcttttcaaaaatctaccacaatcacttaccaatcataagtatatatcattcaaaattgttcctgatatgtgctggctgttggggcagtttctttttcctacctgttgtgtgcctttgtacctatctttaatctcttcttgctaagtgatagctaccatcacaacactggctttccttgatagcatatcttcctgcatgtccaaaacttaagttcacatgagcagaagttgttcttatcaaaggtaaatcagaagttaaaaaaaaaagcagagagataaaaacatcaaaaatgtacatcttgcaagcaatgatgttgaatttgggagaagtgtgttctattgaaatgaaaatcattttctagtttaaactgatcacggaagtttatatgcataataaggatttgaagtttcctatcaaattaagtacagtgtttgagcttcctaacatttaataataccatcaccaatacacctgcaaaataaaataatgtttgagccccaaaatcatcagaaatatgtagaccaataccagttcagaagaattgactttatttttgtaatggggccaagaaaaattcttaggtttttgtttagttttgtgcttgttaatcttgatttttcccagtgttttgcatgttttgagtttttaatatcaaaggtactgctctttgtaaacaagtgtaagtttacccaggcagcttcacttacacccttcccttgtaatcagatgtgaaaattacaccctcccttttggatacatgataattacacatttcaacatgcaaagaattgtctctgtttcagttgttggaatgaaaaagctgagacatttcagtaaaatatattattatattaaagatcatttccataattgttttcgggatttgtaatcaaaaccatgatcaaggtagtcttagttttaaaaagaatacacatggaaataaggagaggataaaattaattgccgagttccacttgaatgaccattcttttattttatgaaaatacagttaagtacattatattctttctttaaaaaaaaaaaaaaccttctagtaccttatttgacattttctttctccatgttcgttgaattacctattttttcaggtcgaccaaaaaaatgtagaaatacacatttttgtgatcaaggtgaaaaatttagtcagaagagagatataaatacaatgaaggaatcttttcaagaaaagatgtgtttgtttttgtttgcaagagtgcttttcagccaaatataaaattttgtaaactcaggtaaggcacctcacacttcacaatcagacttctggattcatctagagtatcactcatatcataggtaaaaatatatgtcactattggtataaaatacactgaagccttaaaaatgcagaggttttggcaaataacactaactcaaaaatatcttgtatatccaaggagagggtttaaaatcaccgattcctttttactttcttaagctaagaagaaaaggaagagagaggccaggcgcagtggctcacacctgtaatcccagcactttgggaggccgagacaggtggattgcctgaggtcaggagttggagactagtctggccaacatggtgaaaccccgtatctactaaaaatacaaaaattagccgggcgtggtggcgagtgcctgtaatcctagctacttgggaggctgaggcaggagaacagcttgaacccagaggcgaaggttgcagtgagccgagatcatgccgttgcaccccagctcaggtgacagcgtgagactctgatgcaaaaataaataaagaaataaaagaaaaggaagagagaaggcagcattagatggctgatgttatggcttcgtgaaacagtttatggcataaagaaataactccccaactccttagttttccaagtatgtaaatgtttctgctcatccaaacactagcataggtaagtgaggacacatatttcatctagcccaaatatattttttaaaagaatccctgcagattttttgcttctataaaaaatatcccaacccaaatttctaaaaattttgatttttggaattaaatgataatactaattagcatttacctatacatccttttctattttaaaatcattgcataatctggcatttatatttaattttctaaatcattttccctagagagcattcatgtaattttagaacttggaaggaaccaggatttcaactatactcatccacagacttttcccattgggtagaaattgaaacagaactgacagaaccaggatttgaataccagccttttgactccaaatcagggacaagatgcagttttgtatgttaattatttttattggttttgatattgtggccccaagatccatagtcttattttcatgctaagtgactctttactctgaagggccaggttataattgccatgtatgccaagagtgaagggacccaggaccagaaaattcagtatgcccgggtggtgagtttttagacttatggagctgcatgttctgaactccacgttctttggttttactgctcctgtgttttttgacagttgcttttttttttcttcataatttctgtacaggctgggcagagagttcaggaaatgttccaccgtgtactgacattcccctggcaataagtgggttcccacttcagtcgcattccactaagcctattttggcaccatagagagggtgatgagagggaagagtcagtggaggagaagacaggaaggttgccaggaaggaattgaaaggcatatgctcctggccccattgcctgtgtctgccttcaccacctttagcttcacaagcagtggccatggcaaataggaaaaggtttgggtgggagaaatacagaagaagccattcctgattaggccatgtgtcttccactagtttccatcagagtgggctgaccgatctgtgaagatctgggatcatgactcagtataacaagaagagtcctacacatttgattcaggaaatttgggctcctggcccacccagccctgccttccaatctcagcatggccttggacacatccttaacctctctgggcctcacattcctaatgataaaatgcagggactggacagagattgcaaactggtggctgacagatgtttgatttgtcccacacagtattttaaacacatttgaattggttgccaatatttaaaaattgggctatttcacacacacacacacacacacacacacaaatccagatttccagctcccctggagaactcagatgatctggtgtttcgggcccacatagctgcatggaaagaccatgtgggaacaactttgagttccgtaagaaaaatcaatcaacttccctcacctgcttggcctgtgtagacatttgagtgtgggaccccaattctctccaagactcctttgaagctctagttttagaattccaaatatgatttgcttgaccataagaaatatacttaatccatagtggtttctatattcacggcagaatgctaaggtatttgtttatacaatcagcatcaggtaaaagttggaactatcttaggccaaataaatcagccccatttagaacaaatgctgactttgaaatttgataatgggaggcaggaatagttcagcaaagatagcctttgaggtagttacaagaaagatggtttggctcctgactcactattacctacacagcgaactgtgtattttgcaaattatccaaaagtagattctttaaaacccaaatcaaataatacaaggcccttcagttaacattttttcacatctcccactctaaactaacatcttcataaatattgagatcatgaactttttctgttcatgtaattgcaaacaaattatattggcctgggaactgtttgatcttcttcaaaagtaaaggaactacattgattttaaaagttatatttttgtaaatcatgtttccaaatgtatccactttaaacacaaaaggtaacatttgcgactcatggttatagagtgtttaatattgtacaaggtgcattgacaaaaatatctcatttgatctttacaacaattgtaggagctagacagagaagacatttaatacaaatgaggagtctgagacccagaaaagttggatgactattggaaaattgacctattacttgcttaatgtgaaaaagagccgggattcaaatctacagcttttggctccatatttaatgttttccatgccatcagtatgcttccagtgtcttagggtatgtgtgtgtgtgtgtgtgtgtgtgtgtgtgtgtgtgtgtgtgtgtgtcttacctaaacactgactttttctctctctctgtcatgaacaagaattgagaggttaaatgggaattgtctcatgaattgtctcaatgttttctaagttgaatgaagaatcttttttggtagctattcttaagtgaatgctggatttttattaagggaagctaacagatatttaaaagcaccctccatatataaaagcacaatccatggaagcatagtgcaaggaataatgatatagacaaatggaggaggggcaataaaaagtcataaaacaggcaggtagaggtttctggaaaaataaggtggtgagggaagagtctaactgtaaaagtaaaaaggtagaagatagaaccgttgaaaaaaaaaagaaatatcagaaatataaagagaaataaacagcaagaagactccgtagtaatttaagaagtgaaaacttttaggacagaggtaggagagaaatgggaaacactggagaggaagtaacaactaggaagtgtggaagaaaaacctgcaggccagaaatctgagcaaagacttgagagaggatgatggtaaatgtgaaacattgaaagggatgttttaagggattcagacattgagaggaaagtaaattttcatcacaacaccccatgacgacaggctcaacacatttggattatgagaaaggaaattaacatggttagaacgaaagaataaaaattagtaagagaaatctttggatgtcaatggagaggaggagaaatgatattaaaaggaaagaaggcatgggtggaaagtagaatgagatgagaacctatggtaggtggaggtgaaaaatgaaatgcgtcagggaagatcatgactgggaccgccgcacactgcagtgatgaagacggagaagctattcttcagggaacctgcaaataaaaagaaaccttaagatgtatttggagggaacccaccccagcaaggtgagaaagcaagaggttacattctgcaaaaagagaaaatgaacggggagaagggggaaaactaggggaaagagaaaacagcaaatcaaagttatggagcgtacagcattgaaaggaatgaggcattctgttggaattattcatttaagcatatgggtattggcgtcccttttctaaaaccggatcctctcccttatttctcatttttctataacactattataataaattcacatggaaaagtacaaggatgagcaattttttactttagaaatgtttcaaaaggggaggtaaacttgatggttatctgtctgaagggtgacgcactatagtggcatgtgagaatgaggccagaggtaatcatcagttttgaaattgttctttcaacaaattcataatgcatataaagtaactcgtgcacacatttatggcaaaacatactctagatattaatttatattgcttatactgaagatctcttgagttttcaaaaagtttgatttacagatttttcacatcaaaaattttttgtagattctattttgtaattaagatgtgtagactcctcaataattctttaccttgatgctgtgtatactcatttatctagattaaaatacttccttgccctgaatgttctaaaagtgtaccccttggggctctagaatttagaagtctcccttccccaactatttctagtctaccttttcaattgagttaatataatggctttagaaatacaatttccatgttgctataaaaatggggttaaaagtcataacaggcacaagaaacaggaggaaatgagaattgtgtactttcagtcacacccgggccatgtgctcgggccacatacagcatgcagccctccggagtgggctgtgtaacccggggcacacttgaggtcagggcacatagaggattaatttactgaaggtggtagacaatccctctgccacaaatgcaaacattttttcataagcgcctgaagcaattagttctcttcaataataaatttaatcttttcctccttcctttctttcctcttcgtttctcctctttcttctcttttcctctataaatgctggcctttgtctaagatcttcaactcaaaggtgtagatgccaggaaagaaaaacaaaatcaatgtattgtggtactaacaaataatgctataattattagaaaaaaacagattgaagcaagatacaaaaattctcaaaagcagctatctgtatgaaaatcttttctacttctagagagtatgtgaatgactgtatctttcatatcgtgaaagcagatgcttacatgcaatcacctttaaaaaaagaaacaaactatcacagtagtgacattgcctattttatatgagtagggaaactagccaaatagctttgggaacatttattagccttgtccttttttttcttttttttttttttaacttttagtatagagagaaaatagagatgacaggtaggtggctaagtaaggtgacaggatggcagacagcattcctatcagggcagaaagaatttataagggagctgccacttatagcgtaatagagctaagttaagaattgcaaacagagtagggccaagcaacattttaagaacaattgtccttaaacattcttgtaatgctaagtcactcatctttgtttcccacttgcttcctagagttaagaaaagttctttcctaacttgggttgctatgcagagatgtgaaatttcattggctccaaatgcttttctgtctagtagggactactgggaaccctgctaatgtgcatattgatgtaccctgtagcttcacagatgatgaaagagcatattacttatttccacaacaacaaagctaagagaaatttgaaaggagccagttattttacctggggaatttctcccaggtgatggggctatggaaccatggaatttaaatatgggggccgtcctattttctaaaaagtttttatggggagccataatatcactcccaagcagaaatcaaatcaaataaaagactattgctttcatttgcatttatttagtcaactatgcctaaaatacggaaaagatattatcatgctcattcagagtgtattttattcgttgtttactagactggactgacatgatatgatttgtgctttgcggggtcacaacaagctactagcaggacaatttgctgaatcaagaggatgattgtgtctggtgccagtcagtcgcaattaggaccaggatcagggaggcccggggcttgtgcatcgtcttgggcaagctgcatagaaatcagctcacctgaaactaattgtcacaacagagaccttatgcaaatgagccctggggttagcgtgggaaaagaaaaactgtcgcaaagataggtgacctgctgagcagggggtctgttgctggggaaatctttgttcaatgagtttaaaaatgttttcattgttcaaagtccaccccccgcccccccccccaaaaaaaagtagcatacacactcactaagagtatggcaaacacactcatctaaaattccaataaagcagaagcctgctttggagcatgccataaattgggagtctttataagggctacagcaggagaataatttccctttgcaagggcctttaaagtttaggtgctgcggattgcagtgtggcctaccttgaaaattcacttgcaaggtcaagcctattgctagcctggcaggacccgcacagccttttctccctgcattccagcaggccacctccacacagccgtgaggggtgcctgtgaactagacaagaaaggcctagtttctaattgagctttactggtatctcaggtagaagagaagggccaggagcactctcttaacacatggcaaaagaatccggggaaacaatggcagtttcttgaattgtggtttctcaaatactcacaagttcaaatgaaatgcaagcattgtgaaattccaggaatggtaatgcagcccaagtggtaatagatcataaaaatttagcaaaagaaaagtaaaaattatttttaaactatgatttactttgtttttcaatccctgacaaaaacacgtataagttggaaatgacgtttgattttattgtagcactcatttggaataatctttaatatgttttactttagaaaaccagatgaagaaaagttattcaaaggtaatgataaacatttttatacgttactgtagcaaagttgcctttgggttcttcaattgatttttagcttttcaatcttgttttcataaaaacatgggctaacatattgatacttcttagctttacactaaagatttcccagtgacatagtagataatgtatattcacacaggagtataaatataatatcaaggaaatgaaatagagtgttctaagctttagcagtaacagagagcatagatattttgcatctaatgatttcaaagaaagaataatttgaatttaaaaatgtatgtgagagaaaaagaaagtttcattgcattggcgttgaatacaaatgctattttgtttggcaaattactggacctaagaaagtgttttcattgtgtttcctaaagggctggattgaaatttggacttgtacctgataagcaagctcaggaattaacttggtagccaccacaaaacctaaagaaagttaggcttagaagtgcaacttaatcacaatttagattttaacacacacgcatacacacacatatacaactcttttgtcccttcaccactgtctgaaataatttccacataagagacatttcacagtgggtacgaagtgctcagctttcactcatcaaactttaatcggaactgcattttagtttttgaataaagaacacttaaaaaatttagatgcaaattattttgcattattcatgctctaagtgtccttgtagatttaaacacttctgaggccaccttgattcaagtaattacctaggccctcactgctccgtcatgaataaggtattttgtacaagtaaagtatgcacccgatgagcttttaaagtggctttacactgaacttgtgtattgcttcttgtgcatgagtgagccgaacatgtgtcgcaatctgtctcaggtgggaaaccctggctgggcatccatgggtgacgggatgaaacccgagcgtctccttcacacacatgctcttcctttgtctctacctaagaatgttcctgcctgattctagtagttgttttaagcattaaaaaaaagcaatagattctaggaaaagagacagggaaagtgacagtgattccgcttaaccccttcatcaccagagattattggaaatgcccacttttcaggcctcctcatctccatcagcaaaggcttccttgtaaggtaataagtctctctcattttacatggttctgtacatctgtctccccatctgtcagcccagcatcctgagctattagagctaggtgctacctccaccacggtattcacacgaaatggagcaggcttcaaactcaaaagtagctgaagaatacttacaatggaaatgaaagtgaccatagagcatcaatctgtaagtttatccacacacacaaaaagagggtttgtaagagttaaatgtaactggctgaagcttatagctggtgtttgttacaaagtacccaagcttttcctttccaacttcgtggctttgaagaattataggaattttatgatgtgctgttggagttatactggcagagattacagtaaaggggttaaagttggtttatggtagaaaaaaaattatgcagaaaccaataaaaataaacacactcaagtagactaaacttgctgggcttttagttttacttttaacaaaggaagtttagatgaaagtaaatgttgcagcttttagaaaattagttgacactcatacttgatcatctttactatacagtggtataattaatatttaaacattctaataatgcagcttgctttgcatgcacttttcagcctcacaacattatattttatctggaattgtgctagcattttcttgggtagtgcccattttcatagagttaaatttaaaatagggtagggcctcagctcttattgccagtaaaacatcaataggagagtgaacaggtttcatacatctaccagacagtttattattaagaacaatatttatttgagataatagataatatataaattttgtttcattgccccatgaatgtttttaaatgatcagaatagattaagtttgaaagttgcatttggctgttgtccactcactgttcaaaacaggaggattttgatgatgtcaaggcagtgcgaaatcagcaagtgatacatgaaacatggaacccccatgcctgcccattcattagggcatctgattaacatagtaaggaatgtttattttcagtacataaaattgtagaactttgggagcatcttctgaattgcaaaagctgaacacccaggaacttagtgaaacaataaaaatatagagaagtaagctaatttgtgagaagcctgagctagtttattttcctatgagaagtttcttcctgttccaatctcatggctgtaggtggtagggaaaagttgtttcaggtgctgccctcagctagtccctttgaagagtgcaaggtgcccagtgttcctgatcttctagtttgaatgatgagaaagagcattctacctttccaccatcacttaagtgtcctttgaaattgaatttgcatgcacatatttactgctcattctttttaagtgagtaggtgtgctgagcttcaagtctattttgagactcagcccatgttaaccccttgaggcccacttcatgataggtactgccctgtgggaatcctgtcatttagtgaagcatgaagccataatagatccacagccataccaccattggggcatctcatttcgattaattccctgaagcctttggtgctgtggtttgcagaaatcaaatggcgcaaatgagaactacaaaattaggcaggttaaatttcgcaagaaaaaaaaaagataagtagtagaaaaaatagccagtgtaaaatattagtacacaggagcagtaagtaaactaagttccacactgaaagaaccaccagatctcgagaagtagatatcaagaaacagtttgcactggctgttttatttccttatgtcagaaggaagtaggtttttacagatccttggacatgatcatctttgtttctgatattcagaaacggaaccaacagtttggtgtctatttattttatttggtttgtttttgagaaagcgagttaaataaactcagcttacaaataattaacagcccctggactatttaaaacctgctactgaggtggtagagataagttgaatccaacagctgtcacatgtatgggtttgacagataggtaagtccaagagtggacaaattaaaagcatttttcatatgctaatctccacctgcacaggaataattttttttaaggaggcagtctactggcagagcaaattcaagagctatcagtagtacattacttctaggaattatgacatgcaataatgaataaatacttctatgagaaaagtctgctgtggaatcttaattccagatgggtgtcctgacagcaatgtgccagcaatattgtggaaagaaaaatgacatatatacatacatatatatatacacgcacatatgtatatgtatatatatggcttttaaacttgaataataatttcttccatgtgtaataggttcacaattatatctaaggaattacttttttagttgcgaatagagatcaaagtgaaaacaatagtcaaccttgcccttcaggtggcagttacatgtgagctgcatagtgagtgtgagagacagtcaaggatgtcaatcagaacctacagattaacccacagcagtgaaatctgagatggtttataacaagtagataacagtttcaggcctatgtgagaacgcataaactaaaacttcatgctgggacaaaacagggcaggacatttgaggtagagagtgagaaaaccatacttttattatgacaaagcctctcccatacttgttgaaatgtcactgggttgttattaaatgctcaccatttctctaggttttatattatcttacaaaaagcttttggagtttcctttaattttgataaacattcaaatttgtgcataatttctgcacttcagctttgaatgacagaaaatttcccatgcttgttgagtttcctttcaagtaagaaagtaattcttgtaataaataaaaatgttatatttctttcttccaatgttatcaagttaataaacccttaccttagtttataaagtcaaaatttactaatgtattgaaatgagaaccgaaatactcaaaaagaaatcttaaacatcaaataataacgagggtaatgaatgaatggtcatggttatggatggtgatgatctaatgtaaggtcctatctctttttaatagagagtcctcaggctcagacaatttagggttaaagtgcctataaccagatcagaatcctcagttattacgtagtactcttttaagacccgtgaattaagttataatcaatgattacaacactggtatcatttattaatgtacccttctcttctagggtagcagagatcagtttctgacaccttagaactcttcatgtgcaagaggaaattgaaacaataacaacatatttaggcagtaggcaaaatgatttgctttggctttacctacagggaaacttgggcaatggtcattagacttttttaatggaacttcaagtctgatgccttgtgaccaggtgctaacatggaaaagagttagcatcattgacattctttgattcggaagcacataagaggtagataaggagacaacacaggcgacccacctccaggccaggagaagaggacagttcctggaatgtctgcaatgtgttactatttttgtcacacctatgtgaggccatccatctggtctgaatcaatcagtctcatcccagggctctgctcctctcccagctgaaataatacccttctttcctcagtgctgtcttcaggaggggcgctgctcaggactgcccggacaaggccaattaatgagcctgtgtatttgcaaacgatgacccaggattagacactggagaaaactttctttaaattctctataaactctgctctcctagaaacagtacttgagaaaaccggatgaatcattagacaaataattgaccccagaaagcgaaagactgatgctacattactttgcatacgtacatcttattttttaaagaaaatgtccttgccttgaatttaaaccatgaattggtctgctgttatacccaaagtagataaagcctgggtgtgaggcattcaccatgacttagcctgaagtattttcttcggccacttcactctcctccacgctacatgttcaatttccctgcacctctgtaacaaccctacacctctgcttctagatcatcttcttggcattcctcatgtgcacatcctgttctctagcagtcccttatccatgccgcctcatcagattcctgcacacctgacagcctcttgcttgctatttcagctactagactactgacctctattgtacatgcctgcaatcccagcactttgggaggccagggtggtaggatggcttgagccccaagaatttaagaccagcctgagcaacatagtgggaccctgtctctaccaaaaaaagaatcaaggtatgcaccagttaagccagccacgttttaggaccacatagcactcttcccacaagagacctcaaaacttaatgacactggctttggcaaattcaataccatgacataaaactactcattttccctatctgcctagttttccattgcagtgggaaataccaccctatcgtggacctcccaaccaggaaccccatggttatttttgtctcactgctgtctttctcactccccacaaccagtctgttaccaaccgttgctactttttctttgccaatgtttcctgaatccacccctttcctttccattctcatagttgtggtcttagtctaggctttggccttggcccatggggactttgcagccttctttcccctctcccaccacattcacatatcaaattccagcttactttatttaataacactgacaaatttttttttctcttgtctatgtttttggtccattcattctctctgagctccattgagactgccagctgctctctggactggcttctaatgttcacttcatacatgtcacctcttcatccagctacctcctaattgttccaatctttttttctttctttttggaggtaagctcttctggtacttctttttttatcgttctcacacttcttcagaaactcttctcatggtatacatgttcctggtacacaccactcaagggcagattctgacactttctttcggtagtccatccgtgcttcctttctgatgtagcaaagtgtcctctttgtgagcacgcccaggttcaaaacttccatttccaccacttgctacctatgacattgggcagttacctgacagcacttcacctcagcttcctcatctgtaaaatggattgttgtgatgagtaataagatcatttatttagagcactgctggcacacagtaagcactgttaacatgtttgctattagtattattatcatatctcataggactccccaatcacaccccgcttcaatcaccatcatgctgtatgccatattatccttgcatgtaaattttgaggaccacataactgggttttaaaaatctggttctaacagtagtttatgtcttagaaatcagggcaaagttaatcgaagatacctaatatcaaaccaggtaaagatgaagactttaaatgctttttgaggatgattataaagaacattatgataagaatgatgatgatatgatgatgatgatgatgatgatgatgatgaagaaaacatgaccaaatgcttctttgggttaatactctgcttataaaacgaagtgtccaggaaacatacagtattcctcctgaaattagtttttttttcccattaaatggaaacatgttatgcataagaacatatattgtgcagtatgcatgagatttatttttcagaaagcagagaaatggcaagaattttaagtgttctacatacttatttagatctcacatcaggagataaaacaaatgaaaactctgacttgttaataatttacgttttggtggaaaattcatacaagctgttaagatacctctaagacccaacacagaaaatgcaaataacatatatccactgtgcactgaagaaaatttgtctgaaaagaaaataacatcaattaaaaaaaaaaaacacaagtgatttcaagggaatgttgaccacatttacagggctgtaattggtgcttattaattttagatgtctcttttgaaatattcgtgtaaatgatctctccacttaccaggtgtttcttacagaaagtccactgggctacctcactacctaggaggtggcttacaaataggggatttctttttagaaagccacaccattacttttctctaacagcttatgcaaaagttttgtgggggagggaaaaacccaagccaaaaaaaaaaaagaaagagagagagagagaagagtgtgcatgacaataactacctctgtcccttaggtttttgttcttttcatgtcatggaactttttagctgtgctgcctgggtaactgctctggaaggttggaatatctgttgttgaaggaggtttgtgattgagggccctctgacacaaccttttgttgcattgaggtgtttgatcctctttccctttcttctaaaaccaatcccatccctttaaaaaatggataaccagcacttcttttacttattgtcagcttttggaaagttactctgggggtttgtagaagtttaactagttaactctttgcatgctgatgtcctgtcgctaaatattcttcttctttctaaacaggaaggattttaatcacttatatcaggtaactaccgctgttatgcaggcatagcaagtgaaacatattaaggtccagaaataaagcatttgtgttcaaggtcttcaaatgtgagagtgattcaggctttgcaatgagacacatccttattttctttttgtcctagaaccgaaacatgtgagagttatgactctgccacttgaaaaaacatgatgatatactaatttttcattgaagaacaacaggctttggtaataagtaaatgcaaagggttacttcagaactggggtacataactgaatggcaacaaagaaagagagccttagaatgaaaagtgtaggggtcttgttccagtctgctgactagatgctggaatatttttttcccaaaagaagggacacaacccaggctctaggaaagaaaagaagcttaagtggattatttaacaaaaaagcaacttatggcttctagatagtgacctacattctgcacacaataatgatgttttacggtggtgatagggttaataacctaacatcattcatgtagtgttttttgaaaattgaattttactgctacaaagtaaatgtaacagccctctggagacaatattacaggcactttattgtttgctaagctgatgtcatctttctacagactgactttaaaacaaaggcagaacatttattacaaatatcactgtgtgaaaggaaatctactgaaatattgtttagaaggtgagctgataaaaaagtattaatacttggctttgatcatcttgtactataaagttatgacttcaaattttttctcatgtgatctctattcaaggcaaacttcatcctggcaattcctacctgtgtctctaacattatttgccctcaagttgaaacatttgtttaagattcatgcgtgttttaaatacatttttactctctaaggcaatttcttaacagagttgatgagtttttgagagagagagattaaatagcatctttcagagataatatatgtatgattttaaaaacaaagtatggagattaagctgtttagtttatataatgaactttcaaaatcacctgtaagtggtgactgcaaagtttgcaatttaaataagctgtttcaggcactgccaagcaagcattctgcatcacaggttgcttgcaactcagagggtttggtctctgtatctgatgcacgtgtaatacagcgtgaagttgtttgtggatcacacaggagcttcttagagcttcatttccacactgtaacccttgaaaatgtatcaaatgagcagatgcacttggctcttccttaaaaggcacaagtaatttgtttgtaaatcagttacctttcaagaaaagttaaattagggggaactcttgtttctttgatgttttccctcttagaaagccaaagagcaaattaatgatcattttgaagtaataatgataatgaggaaaatataatttagtgagctacactatcccaaaataactttttcaggtacagcatataaataacagcccaaaggactaaagcagcctgatggtgtttttctaagaaaatgatttactgctctgcctttgtctctgaactctggttagaaggaaaacacaggtcaaggaaattgggttaagggaaaaaaagcctgttatgggctaggtgtagaattgtatgaatagtgactaattgggagtctgtagcactcagatcagtgtgtgcaatgctcagtactggctgatggtatttatatcagtcaaaaatgaagctggatacatctttgcgtgctctacgaaggcagtgtgttagttggtgaattggccgtgaccaggagaaagctaccagtagtactatgattgtgactaaaccaagaactgaactgcaatgttttaaaaatttattttactaataagtgtacttctgtatagaaaaatcatttttaaaaaaccttacaactattttgaaacattttactataagcctgcctttgatttgtttgggaagctattttatagtcactcaattcatttattgtatttgacaaatattagctacttaccatgtgccagcaccaaaggttcaaaagtgagtcctcacagagccttacagattagtgtcagaaagaactgcttggcaagggtaagagtgtgacacattgtgagtattcaagaaatgtttgttgagtgactgatagaatgaattgagggatgatcaaggtaagtcctcgatttgatatatgtacaaggaggaactaagagtttccctccctgaacaggtcagaaaggacatgcttgagctggccttaaaaaaacacctgagtggcatgtagcatgtgaataatgaacaggaatgagccactggtggtagaaacagcatcccagaatatgctctgagttttagcagcacagcccatttctgacccctgcatgcctcaaagccactttaagaatttggtctttgcccttctgtcctcaccccctgttgtactgtaatacacgcaaacatgtgtgtgcatgtacacacacatgcacacacacatgtgctaactccatcgttggaattcgactgtccaccccttcaagaatcaaagcatctcctaaaaaaaggaaatggcatgcctgttccttacttgtatccataaaactcacatttgagttgtctatcatgagacctcagttttttgaccaaacattgtccttaagcatcagacacataagaaaaactggaaagaggaacaggtaatatttaaatcacccactattcttgtaatgaaaggatttttcaaacatcaagatgaaatggttttatcaaattattaaagtttgctttttgtgtccaacttagcaacaagtcatggatgggacactcaaaacaggccaatttgggacagttccaactgtaggaggccttgtgtcattacctctataaatggaatcgagcttcccttcttctgcagctatacattttcttgcctttgatttcccactctgctttctctcccggcaggctcttcctgtctcctctatcagttactctataggcagatgtgcctctttttccatttgccagatccccccaacccagatcttccaaactactcccctttgaagtctctattaccgatacaatcacttttgtttcccttccatcccctctctcactgctccagtttcttctctccctaaccccattagttacatctgctgcccctaccattcagcctgtgttaaatcgtaatgcgcttgacataacttcagtttgtctgctaagtactcaatcagcacgcattgctatcttctgatttgtaggaaagggggcaagactgagtaagctggctcagaattctctgagtgattcagctctgcccaattagcacaaccaaagtgggaaattgacaactaataataatgaaagaaatgggttttagttgtgaatataaatcccacaaacttggttcctgatgcctgtggtagatactgtatgcttcatatggtggtcagatggctcagagaatgcagaagtggatgaatgaaggagagtgtgtcaataattgcaatatttattagttgactgggattctttccctggaattcattaatggattttttaaagactctgcaaaccaccagaaattgtatgtaacatttagtatattgatgcatttttttcctgggcagtgggtccatacgtttaagcagattcttaaaaggctctatgtctccccactatccgcctccaaaaaggtgaagaatcattgctataagtgaagacacctatttggtctatgttttcatgtggtctgctttttttcccagcccattttaacattccacatgatttgagcagttcagagagtagaaacgtagggttttaaaggcaaaatttaccttctttaagaggaaaaatgtttaaaccacctaccaggttatacaattcacattttaaaaattattttagttttaccacaattcaaagacaggcctttttttttttatttaacaatgggtataatcacacatctgaacataagaattagttttatgcagttccatagaaaaccaaaatcttgaggaacactttcaaaacaaccagagaaaaataaaccattccttatgtcagtcttgttagggagggattaagaaactggcaattattttggcgaccttaattgttgcgcggcaggaaaatatgtaattagagcacgttcccaggcctgcacacctgcagcacatcctacagcataatgtcagctttcagtgcctgtcggtgccaggttctagcacaaccagtcacagtgacgctctgagaacatttcggactcatgtaatgtggcttctgtgtatgaaagaagcaggcatttacactaccacacaatggagtgcattgctgcaacactggtttcattattttctgacgcctaccttcagcactgccctggtttactccgtttgaggttttattgttacggtataatagtcctgtacatttttgaaattcccttattattcagcttattaatacagtactgacttgattatcaggctgcagttgcacagcggaagattcagtgcattagctaagtcagaagctgagtaaattcttggtataatgagaacaattgtttgacatttttttatgtagaaagatgggccatggtagttctctatatagttgcattttggaattcactctatattccctatatgttgttgagtattcgtttttcatataaagaaagcttaaaatgtgttctcactaatttgaaaagtgtttcagggtatgggaggactccatcatgattctcattagcttttttcttctttttcttttattggcttttctcaacaaaaagaaactctgacgttagaaaaagtagtgaaaatgaagaaacagtatgcacgatgcctatttttcagataattccataatctggcatagtgatagttaacagacttttcccccctaagggagatacactgtattttgctatctgacatgttgtcatatataaagaaatcaattggtaattaaatgatgcaccttgtgaagatgacaaaaggcatttggttgcgaaaagagaactgggttttgaggggtttgtagtgaaggcctaatgactattcataagagattttcagtccgttgatccacttgactggaaagttctgccctggagagttagtgctgtcagtttctctcacctcagaaagccgccgcaatcgacggtgtagaggatgagcgagaaattatctagtagttgctctaggcctgtcttaggtcacgtgcagaaggcacatctggcttcctgtaggtacaacctcaggacataaactttgactaatttttaaactataaatatgtacgagtgacactgaataagttaccttttattcatatttcctttattttagaatgcatgcaagttgtgtagtaagctgccattttggccttatttttcttccaattttaactgttacacacttgcttgttaagctaagagtgactgtttatgaaagttgtcaaggaccaaatgataacagtctccttatgtgaaatccaacaactctgtgtttgctgagaatatgccaaagttgccctgcaggaagctcacctgaaacaaatacagagtatatgattggatagcgctcttggggggtgtttattgccctatttggcaaaaggcagtaagatatcaaaatgtacatacataggactggatacaaggctgccaccacatcaagatctctagaattgcagaacattgttgctccagtgtcttcataaacacaatcacaaaaactacgatgaaaattcatgcattcaaaacagaccagttactgtccaccatggaccaggcaccatcctagctttggaggagacaaacatgagggaagtaaaatctcagtgctcatagtttactgaggaacagacaaataagaaaacagttacactacaacatataaagagttatgattgagttgtataatagcacagagtttagaatccaggaaagggttttctgagaactgttggggtctacaaacggggtaaagatttcttatacgagctactctttccattgccaaagccaaattagctggcggaaaggtgagttggacaagtgaggtgtttctgttgcatgtggaatctcaacagaacagtagtggccagcaatttctgtacatatttactcttggaaagtgcttctccatgttatcttatcaagaagctcacctaatcaaaggtaaacacatttatcgcctcattaaggcttgttttatggccacttcgatgtcatgtttgaggtagaagtacctgtcacagtctttgtctggaatgtatgtaaaagggatttcatggacactgcagaggttttaatctttcaatatcaaaataatttaatgcataatatgtatttgagaagatgtcactggtgattcctacttgtgtactgtgtgtactgagttttgctgacacatttgctagagctgtcaaggtggaccaaatgaatggacagatgccaaaaaaacaattatgcttattaatgtacattgattgcttgtttaggttataaaacaaattaaaaaaaaccattagtatttaaacccttttatagctgagctaatgattgcttgtaatatagtgtctggtaaagaatattctataatacctgtaaagcccagctatgttatctaattagtagactttgatttaagtggctgtaattatggaattgaatagttgcctttctaaataaccaaatggtagatttaaatatataaagatgttgacttgattatttaatatttgtagcaaagacaaaccacctaaatagagagattaattccacatcagtgcaacattaaaagggagagaggatgccaagaatcccattaatttgggatataagtgtctgaaatttcctcaaaacatttacgccaaggaataccaacaagacaatatcaagcagctctccctaaggatagagaggtaaggcaaacatgattttaaactgcacaatatcacacagtaaaattaaggacaatgtgttccaccagatgctaaacacagccatttatcgagctacaaggttctagactaagtaagtgttttgtatacatattagctccatattacctccatgacctctttccccatgaagccttccctgagcctcagtatccactctttcctgtaccatgaatccatttttcttttactttttcttttctttctttcttttctctctctctcgcttgctctttctttctttctctctctgtctttctttttttgttttttgttttttgttttttgttttttgagacagggtctcactctggcacccaggctggagtgcagtggcacaatcatggttcactgcagccttgacctcacaggctcaaaccatcctcctgcattagcctcccaagtagcttggaccacaggcatgcaccaccatgcccagataatttttttttttattttttgtagagacggggtctcactatgtcacccaaactggtcttgaattcctgggctcaagtgattctcccacctcagcctcccaaagtgctgggattacaagtgtgagccactgcacccagcccatgttttcaataaagatggtgctatttgaaactatggcatgtcacgtgtatattattttatttcaccatgtgtttaaatgagataaccaggtgccaagaaagcttcaatatttgcttaaatagccaatgtgacggagaataggtaacctcttttctttttttttcttatgatttgctttggctattagttttgaaacatacatgttatattcccaattagatctcgttacatccttcacaggctgtccaaaaatttccatacttctaacaagaacttcggttgactgagtttatattatatagtttttctgtcctttgccctatttctttcaaggcctttgagtcagaagcattcagcaccacggcgtacgatagccaccatttgctttgcccttttaactttgggggttacttctgaccatagtccaactgctcagaagggctttttcacaaattgtttaccgtggcagttgctaccctattggggtttgcattcagaacccataagcagagagcaatggtgtcagtataacaaataatgtgtacaattttttaaaatgctgaatttaccaaatccccatattatgttttcacactgctctttcagaaactgtgctaatacaatactcctataaactgatcttggtcctggcaggccctgttggaactaatggggcctgacagttcttcagttaaaaattatacatgagggccactttcccttaaattatctattgtatgccagctgttcacaactgcactgcttcactttctttgcagtgctagaaatgtctaattttctcataatatccatagcaactattctcatggagggcattgaagttagtaagacttcaaacacaccttcacagaaatcatgctagagttgcagtttccattttctttaattttttggttctgaaaaatgtttagatggctcattttgccggtttcatgccatagcacttgagttatatcataatttctcatttgctgcacaactttattctatttttatgctcctaaatgacgcagctctaagtacccgtgagtggcacttccgtgctgtgagtgctatcaaaggcaacctcagatggataaaactcctggttttttgttttcttttgttttttgttttgtttttgttttgtttttgctggggaggggagaagcggagtcatcaccaagggccttcttttgtttttcaggcatgttaaaactgtataaccaacagaaccatttaaaaggaagaaaaacatcacccaagttccgtgtctgaatgaaggctgtcttctcaaatgctcctcattactccagagcagttatatttggattataattaaaacgaggcttcttttttttcttttattcttcttttttcccagaatgcctcaagtgaagtattcctcccaaagttattgcacctctttactaacaagtgctgggattttaataagcctgtcccccctccttaccctgtacagaggaaaggatggcaaagagtggctgtggtacaaaggttacatattcagtgatattttctgcttttattggtaaaaatggggaggtgggtggaggatttcctttaattatgaaataagtgtgatgttagtagttatttctgtaacctggtgaaaatgctgcatatttcaggcctaatttttagcatatgttaccacgtgtgtaataaaacggtgatctgcgctctccgaatcttttggctgttaaggagcactctgattataactagttgctgtagaaacctggtcatccagatgcttatcaagaatgcattattattttttaaaccttggtggagaagccacagactgcagcagttggacaaggtcacatatcgatggaagtgacatgtctttcctctttccattgtgtgatcgtccagggcctgggggcattaatatgcaacggttctgtttttctttcagaaggacttgtaaactctttaaacagaggcacacagttgcaattgttgcggtactgagtgggtgtatagaagctagggctgcagccttgtccagttgcagatagaataaaactgacaatgatgcaatgggcctggcatgtagacaactctgtgggatggatgaatggtgcggctctcgctgtccctccggtggtggtaggccctgtaatagctagcgtaggaagggtggtgaaaattgatatgcactattactacacgtataaaacttaacactggggccattgcacaggtggggggttcctgtttattgatttttatgagtttgttagaacatgcgcttaatgcttttatactccgggagctctgggagggctcaccttaggtaataaacctttccgtactttgcaatcgctcacaatttacatggggactcacattatccagtacaaagcccagcattccccttctacttggttttaggagtgtgataaaaaaaaaaaagaaaaagaaaagaaaataactatagcacttactttgaattttttgaaaacctgtccactcccgctatgaaaatggcccctaattctaattactcatatttccaagaaaaattagtcacacaaacttatgttatgtgttgtctcagaggttgaaagcaaatcaggtttccaataagacagtacatcaaacaaagtagcatgttcttgatgccgatgacttttttttagaattatggttggacatttttggcagacagattgtcttttgctctatcaaaatgacagtttcttttgtaactgcaacattcataattagaaggagagaagcaatctgcccaatttaatatactaaaagaagtttagagtctctgctagtaatttcattatttttaaatttgaattaattgacttaaaataatacagttaagaagtataaccagcaggattatggagaaaggtttctttttccttaaaaaaaaacagtgctctcagtgttacacttaagatgagattgaaattttcttttttacgccaggtgccccgttctaagattcagagcagcaatgtgaatattcatccttgcagtggagctgagagaagttgtagggcaaatcctgggaacaaggtcactttaaacaaaaaagttctccaagtttcccatgcttataaggctggctgggcttaattaaagtcaatggatgaccaaaaaataaataaataaatagagagagagagaaagaaaagaaaatgaaagaacaaccacccaccccatatcagtctctttctaggcctcacttcacattgtataccttagccgttgatgttcaagctctttacatagatcaagaataatatttcttaaatcccttaacaacactgacgtgtccatggtttaatcactcttccccagtccacatctctaacctacgtcacttgggtggccctcacccacagcaccacaacaaaaacaaagccagaattgcattcagaatgaaatcatcataacatagcaaccttgttcaggatgtgacctttgggtttcagcaaccctgtcttatgcagccctggccaaccttaacctttcctgttggctcggagggtaacctttcttcatattttcttcaggatctctccttacgggacccagtatgttgcatgcctatgatgcacagggccaaaagtttcggagtgttaaaatctacgagcctgttttcctctatgagagaatgaagcctgcactcattttaaagaatacatacgtagcaagatctctttttacccttcctgtataattttggttatgcttaactctaaaggaaaccaattctctttagctctgttaccttatttcgtaccttagctgattgtcatctttacatgagcatcagatatggatgtgacaaagattttttagaaataataacgaccagtgctttatgagttgtgaagtgtttttctctcccacaagaaattacaacacaaagtgccctatgcatttttttagtatgttgataagacagcaggaaattttttaaccctcaaaactttctgattataagctgtgctctaaatttacacgggcagtgttccaagtcccacactcctttacaagtatatcattacagacctgcaagtgagaaggtaaatttccccatggcagttctgaaatctgacttcaggctaagaggccatggactgagagggctgattgtgctgggtacctacatatcaaaatctcctctagtattttagtagttccttctgtcctttttgcagccccgtgtcctacagaagtgacattttgttccattttcatttatcttactctccttagttgtatatcaaaagatatacacatttatataacccaagaagccagggattaaagcacaatatttcttaacacagcttcctctaagatctccagtagctacctaatgcttaaagcttgggctgacgtgggttatggggttatagtagctttatagatatttctatttgtgtatgctatgtttatatatgtaatacatatatgtgtggcttagggctatactgacatgttattttctatgtgttcatttattataaacagcaggcaagcagacgtttcacctcacacctcactctggtctctatcattcaaaaaatattgcaagattcccattctaaattaaatacatccgagcttacgtcttttatcaattctttattcttggtatctcaaaattctggtcttcgtcctttgtctcaaaaagggaaactgctgaaagcatttccacctggatgtttaaattatttaagttgcaggaaccagaccttttccctcctgagtagttgtgggttttaaaggctaaaattgcttcatcatgccaaagtgaaagtatgcataaattatttagttaaacctgagaaaatacagacttttcccagtgatctttcaagggctgcctacttaaatttcagaagaatgggcaagatttttttttcattctcttagaaaattgaagtatctcttgtgtcttctgtcagttggaatgtgaacaaaattacaaaatggtaatttttttaaaattccaagcttcataatatccagtatatctatatcattccaaggtgaatactgtgataatcaatcaataccaggaagactcctccagctggcgagaactgcaaaccctctctcaatgtattcttaggaaaatcaggcaacttgttataggtctttccctagtgccaacctaaagactggggggcatttccgattcaatttctagtcatccagagttggtatttcagttttaaaagtagaaagttaggtaattttaagatgttatgaaaactttgttgacatttttaatttgctttttaaatttacctttacttcagcaaataaaaataccagaaaagtgtgaagttgtgtggtggtggtggtggttggggtgtgtgtgtgtttgtgtgtgtatgtgtgtgtataagatagataatattaaagtagcaatgaaaacagcccagaaatataggcaattgaggcccaatttcaagtttctgtagcataaggcatgtatattacagaatgtaccacattatgtatctgatctctaaattcgccttagtataaatgctccaagtacattcttatgaccaagaaaagaatggtatttttaattgaatacctaacctcaaatcctgaaagaaacattaattgggacaggacaaaatgtcaacaaaaaagtacttatgtgagttatttagtatacagctgtctgttcatttgtagaatccatttgaattttatgttcagagaaattgggagatgagagtaaatatggggggagattggcatgtaaatttgttgagttttcatgaaaaaataaaaatttaaaaaaccttccaagcaaaataaaacctgttccattcacaaatgatggatgtcactgatcccattaatacctgttacataccaggtcctcttccttatatctaacttgctttttctcccaatttcagtgtagttgctcttgaccttgcctttgttcttctctcctccttctctcttctgcccaggcacagttatgtccactaaaccagatgaacaagatttcatactgacaccaccatactctgttaaatagttaaaaatcctattttggcttttgtttgctcacttagatttgtacacccaaggtgatgaagagagcacagatagaatctagagacaaatagtttctggagtcaggaatcagatccagattctaacacgaggtgatgtgggaaaaagtcagttaaaatttctgagattcaatttactcatctataaaatcatcctcataataattgctccccccttcaaaggtttgttatgaggagcaagtggaaaaatgtctattaacgggctctgctgtcagtggattaatgcataaatccaggtattattatataatcaaactgtccttttaaatgtagaagaaaagggtttttaaggcacacatgagattctggaaacgtagacgttatagaaagtctatagggactaaaaatgcattgtcttctatatgcatttatcttgccagaggtacatgcagacctttggggggtgctgctctggccaggacagtggtggagagctctgactcttgagtgtgagagctggaacgattgagaaaagacaggagggaaacttcgaggtcaggtgacttctttctaactacagcaggttctcagatccctaggctggcccaagatgagagaacagtcaccaaagagagtctggcacagtaagcctaagtctcagtgtcatctgattgtgaaatctgcttgtttgcatactcatacagtaccagagcttaagccctggccactgtacggatgactgtacaagagcagaatctaagaccaaggggttgtttttactaaggaagaaaaatttattagagttacttcaaggaaatctattagattatctcaccaaatacattaatagcatcaattattgtattttacataattttttttacaccagatacacagtatattaaagaatttgtggaagtcccccatgtgaaccagtattaaccatgataagagtaatcaggactggcccaagaaaggtagaaatgagaatttataaacttgtctaattctcattgcttgaagaaaattgaaatgaaagaatccaaaaagggatttatgaatattttttaaagcttaaaaagcccacatacttatcatcgaattgtctgcttacgataggagctggaagagtcccttatatccactcaactgtacttacattttaaatggttgttttcctttctcttacactactacaagagaaaggaaatgcctaggcaaataaactcagttaaaataactttatggttgtgacacagtttgacaaaagcaaaggaaattcagagtcactgctcacactgtatcctcagctgattccaactgtggaaaataaaatgctttaaaaaaaaaaaacaatggaacaaacttgggatggatttagtcttagtcttagaggcagccttcttaaatgctgaatctctgagttcgccatctttaagttcttataagagttgcaatatctgtattcatcataaatctagtcagagttaaagaagagtatttggttaagtactgcttggaaaatatgttgtccttttttaagattatgtgattctaactcaaagctgtaacttcttgggggttaataacctaccttgagatatactttaagtaataataatggcttcttgggattaggaaagatattaaacttacccatttccaacgatcctgtactattgcaggagagatgtggggagggagagaaagagaaagagagagagacgagagaaacattttgaccaaaattccatattcactattgctatgcaaattataaacctaacagagaggtgatgtatcatttttattaaacttatgctgcacaaatagtgtttacatagaagagtataaagttaattccctcccgggaagcatttctaaaaaatataaattgtattttgagagttaatcaatttgttttttctcttttggcattttaattgaagcttccaaaccgtatgcttcctcaaagtatcagaaggcaaatatcagtcgtgtggttataaaatcaactcttaattttctttcaatgaagtagcagatagtcagcttgtaaattttacctacattactatggagctgcagtgctataaattcaaaacagtgtgcaggttggtggaaattgaggtccaggcagcaaggcatgtccataaacttttctcaggttattggaacagaacgaatcaaaagcggttcctggttgtatgatattctcttttgatagagcaggctgcttgttgttagcaatccaagtgcagaggttagtcagagcagaatgtaatttctagcaatctgacagacctgcggattgaagcggcaggttttcccttccgatttcagggaattgcttcttactgtgacaaatgattagctgttatctctgactgaatttgatttctacaagcagctgagtcaggtaactttgcagcgtttgagggggttttttacaggaaatgaaatcggctccctagtcatatgtggaccaaatgaaatcttctctgtcagggcaaaattgtgcttttggttaattgaaggcagatttagcatagagggtgtgtgtggtgatgtgtgtgcagggtgtgtgtgtgtgatgctctgatggtgtaggcaggcacacccatgtgtgtacatttacaggaacgagggatcatttcatggattctctcccaactttgaaaatcctgggttcaaacaaaatccctacattctgagcagggttgaagcttttagaataaactataagtggagacagtcatgtgggtgtcagaataatgagccttcatataaggacatcctgtttcaaaagagtttgaactgcaatattaatcaaaacacaatagatactcactgagcatggttttcacaaaagtattcatcaaagggcagctgcattcaaagcaagagatttaggtaaaataagttaatccttgatctcatccaggtttgtgtgtaaattttgaatagggaggggttctagtgatagcaagcgtcctctggatgataaaacaaaaaacgtggcatgggaaattccaggtttatcttgtgcttcttgttcgcttttgatggaatcttaatagtgactacacaattaggatcaggtttatccttctgtttatagtttgtaattgctctggaaatcctgagtttcagtagttcaacttttagtttttaagcagtcggtgagttttttaaaaagttactatcggataatgtttcatagtttctaatcctattacagcaatgtaaaataaactgtatttcccaaatacgaagcaacatcttttattcccagacctcttactttgcaaagaggaaacaccatctttaaggtcatactagtaatactccttattttgtgatgaacataatatactttgtttataaatcctagtttaaaacaacagagatttgtggtaattgacgaagagtaaaaaagtcacaaatactgaatcttcatttttcagatgtgagcacaacattcctaggtatgtactaatatattctaacacggcattgcgctgtcatcaagacttttgtctaaatgtcaccactattatgagcaatacttttgctaaattctttagttgtattccctaaatggcagatacctttggacctctctctcattagctattaaaaagaatagttctttgaaaataacagttctgtgctccctaaacttcttttgttttttgttgagtgatgtcaacttagagttccacactgattgcccttcctccttgctttgtcgccacaaaaggggtgagggggtgccggagtttgacccacacctctggttagtattaatcacacagacatcaggtaatcacctaagtgcactcagacatactaatagaatgatttacagaccaggccctttgtgtttttctaaatctcattttaatttatttaaagtgacagtgaagctagactccaagctaatgagtctgcataaaaatgatttctttttccacctttgtgtttgctaaaactttctgactctgaaatcctgtcagtgaaaaattatttgagatgaaacactgcaaaagaaggtaaggggaaaggagacaaagaatatgatttgatcatcagagacctgccctgggtccaagtgggcctcatggtagccacaagtgtccagatcagacaaatggggacttttgcatatatgttttagtgcttcatccagacttgagtgcttcacagagtctgtgaggcaactcacatcctttggtagctaacaaattggtcctttctgaccagcaagcagtttaagaaagctaagctgtgttgtatgcgtattaaatatagcacgaactgcttggctttgcttaaccttagttgtattaacagattgtttgttttgatgactgcgccgttagcatgccagatgataaggaaatggttttggattagttaggacctataatatagaaactaaataagatgatagacttacaaggatatacatttcctgtaaaaaaaaatgaattcccttatcaggatttacttgaaaggaatatgtcttattacagaaggagaatgccttgaggaatgtgggaaagattaaaggcttttgtcagtagtttaggttgggaccaggtttcctgtgtagccagcccccctgtccccacgtaaatgttttgcttttcctcctctctctctttctctttaaggggaagagtaagcccttctcgctgcctggcggtgtcagattaaataccgagatggcgacaggaaaaaggctggaaggaaaaacaaaagacaggggggtgagagttatcaggttggcgacggaactgcaggcttgtcggactccaatttacagaaatccaaacagattttagttgacacgatctgcaatcattaccgccggagcagagctaattaagaaattagctttcctgattgcctgttctcacagtgatgagtagttgaataatgttgtatggctgaaatgttctaaaaccagacagtttaacaagtgtttagccttttgtggtgatgctgtatttactttatctataatatctgtgctgcatcactatttgtttcctctccttagaagcaccccttgactttttttttccttttccttggttcaccctcttcttcttggcattaagtcagagcttccccccttacttcagccgcgtataggagagaattatcatacagatttgtggcatgtggtacagaaaagttatcggaaacttgtggcacattcaaaagcatatttcctacccgtctaggcatttttcacaagaaaatatcaggtccaaagtggcatttgaagtttctgaatctgactaaatgcagaggtgattgtgaataaataacattaaaaggctttagtcagcaaagatacagtacgagtgagtggagctcattagaaactagccgtggaccccagatatgtcaaaggggggtttgctgagaggtgaccacgcagtcttcataacttcctcatctctcccacaactatcaaacacataggaagatgttatttggagaaaaaaaatagttatgtttaaaaagcttgacaaagaaattaatcaaaatgagcttcatggaccttgtaaaatatggtccaggcacatgtaatgcatatgtaataggcatgcgtaccgatgtgtccatatggacaaatagaaaacccaagagttaaaagtttctgcaaaaagacaacaacttctttccaaattaaatagaaggcttatttgaatataaactttctcgcaatacagcaaaataacaaagattggacaaaggtttccaggtgtcactgttgaaactgcaatgggaggtaagagtattgctagcttcccaaatgaaccacagaaggggaagttgcatcattcaagatgcttatcctttaggatttccaagttttaaaatgtaaatattcatctatggaaaaaccaaaatttccaagttttcctagtacaccttcaaatcatttctacacctaagaaaaataaatactaatttttcttaatgaggcctaataacacctttaacttaccaatttaagagacgctaagtcaatacaatgtgcaggtcccttctggatatttattttcctaagcacaaattcatttataccgaaaaaacagtggatgaaatactagaaaaatcttttctgcactggacctctcttttccagatttacctaagagaatcttaccaggaatggagatagacttttacttcctaagtagatttaaatttaacaccaatttattcactctagtatttctatatgggaactaacagcttctataggacctctacaaagtgccagaaatatgatctcatgtgtagtaataaatttaaatgtgttttcttttacatattctatccctccgtattttcccaatctcttccttttttatgactcccccactctcagtttctaaaatcacttgtccactccggagacccagggcactgcctagagggggatcctctagcagtcgacctcagccacgtnnnnnnnnnnnnnnnnnnnngtttcctaaaattcactttgtcccactccgggaggaacccaggggccacggcctaagagaaggaagcttaccttaaaaaaaaaattaaacccaggccggttcacaagtgggtcaaggccctgttattcccaagcggctttgggagggcccaaggcagggcggaatcaacttaaggtccaggagtttaagaccaggcctggcccaacaccatggttgaaaaccccatctctactaagaatacaaaaatttaaccaggcgtggtggtgggcgcctgtaatcccagctactcgggaagctgaggcaggagaattgcttgaacccgggaggcggaggttgcagtgaaccaaggtcatgccactgcactccagcctgggtgactgagtgagactccagctcaaaaacaaaacaaaacaaaaaaagcaccatactcagagctgctataagtaacatgcagttgtaagccacacacttctttgcatgattcttattttaaagattggaaagtagaattcgtatttgtttgttgtactaattccagtggtatacctggaattaataaatggtactaagacactaaggcgttactttcttgcattattctaaatcagagtgttgattagagagaataatccaaaggtaaaatagtcagataatttatttttatgtaagtttaaaaagagaaagagattgatttttttgaagagttataattacattcagtatgtaccttttgtgcattgaaataattttagattttctgaaaaggaaatattgatgtaattcagctctcaaaacacttgatgccatgcctttcttcctagtgtttatgtaaaagcaagtggtcaattgtcgctgcatcagagctatgacaagttcttctatattaggtgggcatcactcaaacacttttccatagtagatccagtggtatacctggaattaatacaatttattaagtactaagctatgttgtatttattgtattaattccagtggtaatacaattccagtggtaatacaatgtattaattccaggtatacctaccactggaattaatacaataaatacaacatagcttactactcaagtctattacacgccatctaaaatagctaatcagaaaggctgtatgtctgaaacacccaaaagtcactcatcctctttcttaaagcattaaaagttttggcaacttttctgaatccgagttgtgtgagtcctatactgtactaagctggacatcttaagggctgcaggttttaatatttacactgccccgactcagttggtaaccgctagcaaatcatctcaccccagtttttgtccttttcctgaagaaagctgaatttggtttcatgatcactgtttgctgaagaagacagtcccaacaatggtccaaagcaaggccagcttttaaaacagccaccaattctgagtcaaggcatctaccttcattctaatcaagaagggaagatacaaagtttcaagaccagtcttcaccttgcactgaatctgacggggtcttactcagccactttccactacctttcaacctaaaagccaagaaaagcaaggatttggattttaaagctgtacttgttataggtgttcatgggttttgttagcattgttgttttttagggatgaggggtgttactggagtggaagggggagctgtgttgcttttagtttgtcatttaggatgttaaagttagtatgggtttcagtttgcattttaaaaattagaatggtaatgagcaaggtgccagaaggaaataacaaagcacattttcctgaatagctccccctgtcttctgtgttcagattctactctgacttcccaacccggcttcctctcccgcctgctcccttctgaggtgcagtgtagaagttcattctcaggtttctctcagtttgcaggacgagatgctgccggccaggccaagggcagttatgccagctcagtgtagtgcagcttccttgccccagcgtgcgcaggctgaaagctcagccagtttctctttctgaggctgcttcacgtcttctcagggatttccaaggcacggacgttcatttgcctaaaactctcttaaactgcctgacaaaaaaaataagtacctaagtacgacataagtggtacacccacgcaggataattaggattgatgtgctcttttagaggcaccagatcctcaacctccccttactagtggcatttctcacctgctcatgtggtgcccacctgtggcttgctggcattgccactgcctgcgagtggggagatttccaagttcaaaatgaaggcctgattttacatggtggaacgctgtaggactgtgtggagctctgtgaaggaattaaggatggcatgaagtcctagtttatgtcactgctcccttgtttatgttctttccttgactattcccacgccccctctccagattttgcatggcttttatagcctctagtaattatatcagcagcatggagtctatttttatctcttctgaatgtgtgcaacgtaaatgtcaaaaaccataaaggccctttttagcatgtaccttgcatgcacagtttgaaaagtgtgatgcagcgttcagagagatgttgcattttgaggtgagacagatgaaaagtggaaaactcaatttcaccacttagctgcgtgaactttcagtaagtcctttatcatcttgaacgtttagcattttcttctgtaaaatggagtccggctgcctacctcatagggtggcagcatggaacctagtttagtgtctgggatgccccctttccacagcaggtgcccccaaactcctaaattatatatttcatgcttaaatgtcatgacctttcaatgccctgcattgccctttatccaacttagaaacggagtaaaaataaaatcttaccactgtaagtcacaataggattgtcacaaaattagcatgtgaaagaatgatacggaactcactgtcaccaaaaaactgtccctagacttggctaataattataataatacctagcatttattactaagcactttctgggagctggtctctaggtgctttacatgtaaccttcacaaccatccactgacccagtggatagatattcttgtcctccacttaataaaggaggacatggaggcaggttagataacttaacaaaagtcacaagttaggaagttagtcagctggattcaaattgaagcatcctgatcccagaacctacagaaatataaaatgtctatcaggcaggagcattcacatggctgagctgccccagcttctaggcaaggttgtttcctctctttgcacttcctatttgaagttgggccctgaaagcggctagatgggcccgtcagaagggcatgcgaagctgcagtcccttactcagctacgagttagggaccatcatgcttcaaaggggaaatggcctcagcatgtttaggtagtccagtaccatggtacagtttttatggctcattaatttatctttaattgaagataagttgggagaatttagagttgtgagaaaatgtgttgttttctagtcaaaaattctcctgtagttgtgatgaatggacaagatgggagtaactgggggatgtggtaagggataataataaataataaagagcatatttgtaggccctcaacaaaatctagtgatggaaggaagaacatatataggcatgttagacatatgagaaatatcataatacattttatgggtaagctaagaagaaccagttatgcaaattttctctacttttttatgaactacttattgattaccccagtcatttttccattgctaccactgcataaagcagaggaagccagtgcagtcagaaccctcttatttatacagtaaaggctattaccgaccaagtacttagcagccagagaaatcttgcgtgtaaaacagaactgggatctgaagaacttagaatatgtcatttaaagaaatatgatcactggtatgtactaaagtgctccaactttttaaaaactttaaaatcagttgactgaaatttacagttattaaacttaattcttttttttttttttttttgaaacagtgtctcactctgtcacccaggctggagtgccgtggcgcgatctcagctcactgcaacctccatctcttgggttcaagcaattctcccacctcagcctccccagtagttgggactacaggtgcaggccaccatgcccggctaatttttgtaatttttggtagagatggggtttcaccatgttggccaggctggtctcgaactcctgacctcaggtaatccgcctgcctcagcctcccaaagtgctgggattacaggtgtgagccaccgcgtccagccaattgttagtctttggtacggtgcccatgagtcatcaaactcatatgtggaagtttttgaaagaagaaaaaaaaatgagagtagattgattaatgactattaaaaatagcctgggatctacgaatacccatagtaaagagcaccaggcactggatagataattggtctaaagagcctggaccttgctgaagataatatatacatgtaacatgttttgtgaaaatggagtcctgaagatgaaaggtgtatcttttccatattgactacgtgacttaattgctcacttactaggctgagaaaggggagcagaggggatgtggagagggaagaaggagggaaggaaggaaagaaggaaggaaggatagagggaggaagcaaggaagggagggagaaaagaagggaggaaggaaggatgtggaaggacggaaagaggggaaaggatgattcaatatcctttgactactaacatatggcctatttggggaagtagacgatggtgcatggagtctcctgaaagcatcatatgaatgtttgaaaatgttattgcccacacagtgcaagtgcatttaggtatgttttaagataggtgggctaactctgaactagggattcccaagtttaactgccttatgaaggttagaatttgagcacttaagttcagggaaggaaggaaggaagggggagagagaagaagggagacggcactgcaggtagagtatccccacatgtcttacctcttctgaaaggctgatgcaacaaatgcgactgaaaagccaaagtatggatacgttttcaatttatttctaaagagttcaatttaataactgtctgagactgaaaccattgacacagcagagcttctagtaattataattctgagattccccaaagtggaaagtcctaggaatactgcctgaaatgacagtgcatttgctgttcaggtaaaattctttaggaattttctctgattctgatttctatttctaaaattttcgatcatcttcaccattttcccccaaaaaatgaggggtgcatttctgtcattttgtgtgtggttgggtggtattgttgcgtctcagttaggggttgtgaaatggaagctctggagggaggaaaggcattcttggtttgcaactgagagcaaaaggtaccacctaagcatcttctgtgagactagggtgcttcctttagataaatgtgtatctgtaatcagcttaactaagcaggtaaggtgttcattagctaggcagggttttcaaagagagagagagggagagtgagaggaagagagagagaatgaatgtggaagagtgagaagaacaaacaagtcaaagcatttgttcatgctgcaatctacacatcaattatcccgctgtgctaattaccacctttccataccccaggtacctaagcattcacacttactcactttcatgcctctgatcaaaaaaaaaaaaaaaaaaaaaagaggaggaaagaaatgatagaagcaggggatgatgaacccagaggagaaatacattcttagatcaaaatttcctttacatatgaaagtataaataaggggtcttctccatcttgccattgttgttttagacaattaaatatttgcaaatgttttaattgcaaaatattacttactgtcaggcttccaggagtgcttccatctcatcagcccttgtttccatacttaaaagaacacagagaggtgagaattgctggtcttgcctgagattttggggttgtgccattagaatgagatcagatcattaaaagtcagtgactactaattatcaggctacttttctgaggctattcaagaattgggcagtgaggagccagagagctacctttgtatcaaaaccttggtgttccccctcaccgactgaaccttcatctaacaattaaacattctttattatgatgaaatctgggcttggaatccctgttggtttgtgggcttccttgtcagggtgctcattttctcatttcagagtgaagttggataaaaagaaaacctatttcctgtagctcatttgatacctggtggggatgctattcaggtgacaaggatacaggcacagagggggaacagatgtgatttacacactcattatcatttgaatgaaagtgcagataggcctgttcaggggcctgggcatcacctggacagctttccttctgatctttatcccatctgagaggccaggtccccctgacatctttaaatccccgacccccagctggtgacacacagagttttatgacagtcagcagtcctctgaagctccaagcacagatgccattcagaattgtgcttcacactgtttttttcattgtgttcaggcttaatcaggaatatatccaaaaaaagcttaacttgaataatttcttttggtacttctccagaaacctgtttgccactcgaagtttgtgtatagtattctaaagggcctcagattttgtgttcttaaagttatgtgcatacgtagctgcttcagctttcgaaaaaggacaacaaaatggaaaggaccataagttatagatgtcatcaaagtcttatgtttctacgactatcagatcagatgagcttagtattgtggtagatgcagtcagaatgttagagtgcaaagacaatagaaagtttggatgaagctaccaaaaagaaaagtttctgtttggcctcttttgctcttcataaaggattttcagcgtctttgttttgctacctggaatggctgctgtcaccatgatctctcaagcattttgttacttatttgtgggatgtgtgaataacatggaaaaattgctatgtcatctgaagacctcaaatgatgagtcctgaacagtacaaactgtttttttttttttaaatacattttcaagaaagcttgctttcgttcaggacaagaatgcacaacaaccttgaataactttgtttttaaccttcccttatctcaggcagcctgacagttttggtggggagcgaaaagtgaaaggaatctgtgagaacaaatactgtggtgtttcatgattttaattaggtattgtattaaagagaaaaatataatgaacacaagcacatacacattttatttcccatctaacattaacagttaaagaaaacaatcactatcaaattactttgttacagtccataattacaactcaggttacgcttaactgttattaacagaatgtacagtaatatgttctggcatcgtaatatgttattgtagcattataattaatcttacaggaagtataataaatttacagtatcagattgaagcaatactgcatatagatttattaatgcttttaatcagttctggcaaaattaattttgcactgattgcttacattggaatttgcatatacttagtgaaagtaatttattttttatggattcctttttattaaaatagggcatatggccctttagctaaaaaactttgtggattctttagctaaaaacatttctaaacattttgaaatgccatatatcttccctttaagataattctttctcttaagatttatttttaaattatattctttaaaatacttttttaactcttatttcaatgatctattttttgaaactgtaatatttatttccctattgtcattagcctacttttccccaaggatctaagtttgaataaaaacacaggccttgaaaaatatctacattgataagggactgcattaacatttcagaaagtgtcatgtgaaaattaaatatcattgaaaaataatgaaattttactctttgaaaagtccagtaaaaatgggacagcacatgagaattttgccattatttctaagtgcaactatgttacaatactccaaaatgctttctgtgccacgcaatgtatgtgcagaaaaaaggcgagtgcagattttttaaaaaaacttaaactgatatcagtgttgtaagttcaaaaatagtattgagaaaaatatacctaaagtgtctttctattaaaatatacatgctttgtaaggaaaggtaaattattcaccaaaaaaaatcaagatgtcttcataaaatatatgtttactatatcttaacttgtcaggcaatttgaaattttgaataaactcatcacttaaatctttattttacctctttcaaaaatagtaaattaggtgttcctgtaggtattgattaatttattttgcaaaaaatatttgaagaataagggaagagtgatttcttattcttataagtcttaacaataaatatgttccttggcttgaaaattgagtgagcctaacagtacatagctttcttttcctatgttagtgagttacattatgtaaagcatattcatgaacttatatagattctgggtagttctgatgatatgaaactaaattttttaaataatttaactgaatattttgatattgcttgtatcaggaatttcttcactaaaagagcatatatgcaacagtgtgacctctttgggctcaatacaaaagtgatttgtacagtgattctgtgattttccaccataataaattgagaaaggcaggtcttggtaaaactttatagtcatgtatgaatacccatattcaggtcttcacctccaagagacattcattttaatttatgtcgttgtttatcatcaaggaagattttgaacttttgagaattggcctttatctgtcctaaacctctaacattccactgtatcttaatgaaacggaggttctgttctttctgcccagggcttctgataagtgtttgcagactatgtaaacttctgaataataactttcagtaaggcaggagtcttaaacctcttagtatcattttgtgcagtattattctgctctgtaagataatgtgttatcaatacttcataagataactttggccagagaatgaataaaatttatagtcactttcaaactgctccctttttttagggtgtgggtcatagatcatgcagctgtctgccaacagataatcttgatgagtaaaaagaagctaacagagaaaaaggtggcttagtctaaaacacttaggaaggacttaaaaaattatttcccaaagaattagggagtaaaaaaattgtaagtacatttgtttacagtaaaagagtggtctctttgtttgaggaattttccttgccacctcagaaagtgaaaatttactccttttttttttttttttttagaaaattaatgctggtgtgattgtttaacttgtgtaacctgttccttgaggtaaaatgaggaagaagcatatgatttggcctctcttttcagtgaaggaaggaagtccatggaaattactgaaccaaactagagatctaaagcaaaagcccttttgtgacacagatgaactcaatagtgcactgtgactatctgacttttgccacgtccaggcttaggccgccaagcggccagggtcagcaaattccactacctgaaaatgacagaaggcggcagggaaggggaattgaggcatggggagaagcagttgaagcatactagggaggcatgaggttctctctctctctctctctctctctctctctctctctctctctcgtgcagctaaaggaagagaaggaaggaaaagagggtgatcattgaacgactttaggggcaagtctggagttaggcgctgtggtgtccaagcagagccgtgtctggtggcggcaaactagattgctccaagcatggagcgccctgcttgaggacacttgttgttggactgtttgtttacatgcagtttgggtggcaaaaaaaggggaaagtctgggtgacatcagctgcaagaagacttaaccatatgccgatgtcatccaacccccaattatttgaacattgtgaaggttaagacatcaatccatccatttttctttctcttactctgaatcgtgacattattttctctagttcattgaccttgttggcaatttacaccaccaatataagcctcaggatccttttgtaaaatgagacttgacactaaattagtcaactaaaaatttaaagggtaaagggtccccccagccacccactcctgcccctccctgtactaaagtagaaaatttggacaaggcacaccatgcgtgtgactcaattgttctggccaaaaaatgggatgaataattttatttcatagatgcttggtgattactggactttacaaaagttaaccactagttaaaaaaaaaaaaaaaaaaaaaaaaaaatatatatatatatatatatatatatatatactgcttttgggtactgaggttgaacaattggtcggggataattccataaaatggatttaagtatttaacaaataatgtaaatgtatagagcaggcctaaaatttctccactgcctttgagtatacctttagaagtttacaaatacatgaggataaagcagtttcaataaaatgatcaattgtacaaagtatagaaatataccaagcgtctcttaagtaaatgattacaacatttagaagtattcatgagtttgacatatgcaaagcagcctatctctcatgagtctgagttccagcctccctgaacctttgtgcatttcataggctggtgaacagcccaaacatgtaaataaatagccattcaaagtgcaagcatttttaaaagtttaaaactccacacaagttcttttacaaaagagtccacccttttatgtacctttaaaaacatttagccactttattcttttgtgtctttgaagagaaaaaaaattaataaagttgtaggatccttttgaatttagaaaatgttggcaatgttggaaagaaagacattcagcatttcaaagttctggtggggaaggaaaaaaaagattctgaataaaacaattttatgtgattttgcaggtggtttgagctatcattttatatgtacgtttgtaccactgctcattggaatgttcatataatactgacctaattatgcatagaaaaagataagccatttacttgattcatttcttctttttaaatcaagaaaggaacaaaaaggctcctattttctgaaagaaattgttcgcttttattgcagaaaagtagcagcttgtgcagagctagaactgtaacaattttatattccaaaggttttgtgtgtattcggttagttacagtaattatacccaataactgacagccaaaatcacgtaggagaaagcaaaggctgttttctcacacaggccctgctgcagaacatctgctgagagatttgcatattaattaacccatattaactctaattattctgggaaattatcaaataaattgaattttctaattttaacctttcttttacttgacgcgtgtcgaggctgagaggacgcaccaggccgtctcacctgggcaatgagcaaaagatcttttctaccccttttgctcctttagacctggggcagcctggggagcttttgtgtgccttgtgcttttttggcttctgtgcctggtagggtctccatgcatttgttgagagagggaacatgtgtgcttgtgagcacagatggtggatttatacaggggtgaggaaaggtggtacctcagaacagttgagcaaaccttaagtttttttttttttttttttttcttcctcccagcctgttgtttaggcctgagcaaataaatgggagtttaattcaattagagcctggctgtagtcagtgcctcatgacagaaattattcaatatttttcccctcacattgtttggtttacacatcactgactcccttccttttgtactctgtttagagtggccataatgtgttgagcttttgtgtctgccatgtcactgtccctttcaccgttgtctggttttgtcaattgtgaggtgcaatgatgctgttttgaaaacagggtcctagtcagggtgttgctatgtgagtagggtggctgcagttttaaacatactacacagtaaataatgtcattagcccaatagacctgaatctactgctaagccttaagagaaatcctttgggtagggaagtgaactttacatgcctttctcaggtattagatgtagcttaaaactgagatttcaaagataaatctggtcagggcagtatgaagaattggactccattgcatgatcccctttcaggcatttctttggggtaagaggcaagattgactgagattagaattttttgcatgtgatcaagtttgtaacgacccatactttaagccacagcgatcaggagaaagctactgatgaaacctctaccacaagcagatctccagcccccctacttcgagccacatctcttctaaagacctatgactctatttccccctcaatgatttcacttctccccatccactaagatctattaagatgagccacacctcttgctaccttgaaggtaattgttttcctctggaagagctgttctttcccattatttcagctgatggagtagaagcattacggtacctccatgtaacattccttagactcaagaattattattgacttcagtaaactgcagaaaaccaagaaagtcaccaaataggtctgttggatggacaaatatttgaaagcaattatttttatggataggctagaactccagtctcctttttcatggaagcatggaatgccttttgcaagaaaaatatttctttaagagacaagctgttgctacttcagatgaaggtatgggttcatgctaaggtttttgaggggaggtggtttaatttcgtgggactacaatagctaaaagtgtatttcagttatatctgtatcttagaaaaatgtacagttacagacaaggtttagggtggggcaactaaaacaatcagagaaaatttttatagtttttctatttcgtgtttattttttacagcacattccaacgtactctggcagttactgactttacaccttttatgggctttgaaagttgtgtaaccttttcagaggaaggtgatagacacaatatctatttacacaaggacacatttcccctttctttatattccgtttattcaaggttttatttccaaggtcttattactataaaacttaaagctagacaaggtctgccctcatgtcagataaaaaaaaataccaaaacaattttgatggctcagaagcttattttttcatacttccaggtcctaaataaattacagttattttcacattcctcttgaatatccttcaggcatgatagtgagcatattttttctgtaaagccccttaatactttccttctgatggtttgtatagagcaagttgttgaatgatcgtggattccaataattagagagagtcttctaaaatctttttttccttttgacatattgttggaagacatatagtcacttgatgtatttatgaaagtctgtggaattattggcagtagatgtacaatatatatgaaattatttgtgtatagcagttgttttgggggtcttccctcagcatgccatcatgctaggcttgctgatgaaggtgctgttagactttttagccatcaaagggcattattgacttgtgttctggaatatagctaagtattatgtccttggattgtaagcatattatagatgttgacagaaagtgaagctgaaaaaatttctaaaggatagaaataactacaaaaactcactaaatgaaaggagcggtcaggggcctgtatgtttgaaacatcaatacaatgactagtttcctttggtaggagttaagtaaggtaatcaaaaccattatgagtcctagatatacaggaaaacccgaatatgtttacttttgtaaaaaaataaacagatgtcaagtctttgggaaatcataaatttcactgagaacactgtgacctagaaataccgtgtcttcttgaaagaaagtgaatttactgttacaaattcttcgaccaatatctgtttttaggatagcttgacaaagggagggtccttgcttttattcttatttgccattatgtttatatttttgatattaaggaagaggtttggaggggaaaattacatatctaagatgttattacctgcatgttggagcctatccagaacctcaacaaatgtatggaaatttgaacctttttgaaaatcaccagcatactgaaatttgaaaacctctcccaggtaccagggaacctgctaatatttccagagggaatgagtggctgccatcttcccaagatgctcctgtaaccaggaagttggaggagcctcagaactggcctctctccactgcaaccatggcattgcagaaattctgctctcattttatttaatatgcgtatttttttacatagctaatctgaaatggaaacatttttatccctatactgagaactgcttttgttttatcagctgacattttacaactcattaatttataatgcaggtttaatgccttcgaatgttcctgggataaaaaattaaagtggccaagctagtttgtataaaggctgactatagtatgttaacaataattatttataacaatattttgtattggatagcacattccatctgaatatttcaaattggcatggtcccttctaactggcattaattcattcatcttgcatccccaagtaataaagttattcccatttttaaatggagaaatcaagattcatgcatttcagtgacagatgttcaaattcagaagaaaatctctgtttgagtttgtctttgccttgtaatacgtatttgtcactaggcctccattattaaataagaaattgaaccttgcatttagtcctatgatctttacccacccaagcacggaggtaacaaggtaactgtgatttaaaaaaaaaaaaaaagtcaatgataaatccccccggatgggcaagagtcactggacaaaaattattgaaaaatagctgcatcctctcctcagtagcacatacttggaaattgaaattttgtggggaagacaaggaggaataaaggctaaggttcaggagaaaagtcttagaaggtcttcccgacacttgccacatgtaaagacgttgtaagaaagcaggcccacaaggcctttaatccactggctcaaacataaatgatctctaagcatgtaagcataagagatttaggaaaccaaatgattcataaaattccaaaacacttcttttttttttttttttttaaagacagggtctcattctgttgcccaggctggagtgcagtggtgtgatcatagctcactacagcctcgacctcccaaactcaaacaatcctcctacctcaacctcctgagtgactgggactattggcatgcaacaccatacctgactgattttttatttcttgtagagatggggtcttgcccaggctgatcacaaactcctgacctcaagaaattctccctgcttggcctcccaaagtgttgggattacaggtgtgagccaccatacctggccaaaaggacttattttaaatttgaagtcatattaccagcagagacatttttaaaatgaagttacatgtctgtgtcacgtctaagctgaaggattaggcatggtctctctcatcatggccttcctacttgaggaagcatttgcaaataaatttctaagtgaagggccaacacaaaaattgtgactggcacaagttcaaatcttcctttttcctcgtagccaccacacattgcagcaccagagaaaagacaacagacactgaaacaatggtatttcagtgattataccagttacatcaccttgcatttccatgttactgttttatacatcacacagtgccattgcacatacaactttgtaggctcctatgacaacctcataaacagggaaccattatcatgatttttactcatttctaccaagcttccttggatgataggccaaggccacacagctggttacacgttggttctgggacaaggcaagtcttcaagctcataattctgtgaactgcctctttatctctattgtttccaaactattgcaggaaacatgggtgtattgttagattctggtaattgatcaaattggtaggcttctataactcaaattaaggggatccatgaaagtaacaatcatcaaaacaatttaaaattaagcaacaatctccatttttgtggcatgaaaatcccaaaaagtcccagggatttccatcccttactctggtcatgtggggtttaaacttagattgcattctgcactgggaatttgtattatcatgtatgtttttgtttggctgttgtacacctaaagacatgctttctggtaccggctttgctaccaactagctgtacggcctttgacaagccatttgacctcactgtgcctgtattacctcctttgtcaaagagttgacttcaagtgtccttctggaactacaattttgtgattatatttctccaaataaattgtaagcttcctgaggtgagaatggcacttccttctatcttctggatttgccacattgtgggtatttaataaatgtttgatgatggcattgaacgatttattggcacgcttgagtagagttataggaaatcattattggctgccttattaacaattagctgtctataagctgcatatgtaattttcctttacatcaatagagtttctgcttctggtgaagacgaagtattgccccttcacatcagttcttctgtatgttaatacattagcaactgatatcttatttgtactgtaactgacagaataatgtagagaaagcatataagtaggaaaaggggttagtaaggtaacattgtatagggcatcttcaaaacaacagttctgctatttcaaatgtcaagctaattatcagcaatgtttaaatgctatgataggccatttttgcaaatgctgaaattttccagcaggtatggacgttataaaaatgtcaaattttgctactattctattacatgtcaccagaacacaaaaatctgaaaataaaagttatatgtataggcaaggaagagaaaccattatttgttttgcatatgactgtaaaattaattggcatagtgatataatttagagtattgtttacttggaaggaagagtagagaggatttaatataatgtaatctggtgaagtgaaaataatgcttattatagataaactataaagccttttaaatataggcttttagtaatgcatatgcagatatatctttccaggcccatttgctataaagcaaatttaagtatcagctttatgccctttggtaaccccatattatacatacagttttagagaaaatgaaactttaatatgattccacataaaatggtgagccatgccagtaattcttatgcccttcatatgcaaatagttttatcttatccatcaattatcatgtaaacatagtatcacatggcaaatttccctgtaatacagtacagtacctgtatataattataggtgcattttgccaatgcaactgttacacagaattgtaattaattcctctgaagactactgtgagagttttggatactgatgctgtttttggacatttattactgctctttagttggctttttgctatgcctcagagacagatgtaaaattagtgtctattttgagccagcaaacagtacatctttcctcttgtttattgaattgcagaaaggaattctttgggctcccacttctttgtggttttgaagtaactgtctgtttttgtgccagccatgtagctccaatacatgtctaaaattttgctgagactcatgcaaagggtggcttatttgacctgtaaggactgaatagaactttgctacgttatatgggaacttccaggcttttaaatgctgaataaaaagatatatatcataagttcaaaaacagacactggcctaatatattctgcccaatgaacctcatttaaaaccagtatacgttggttattatacaaaattgaatctcttctttgcagagacaaagctacattattaagatctcttctgccagtggtgatgatggtgggcaaacatcaaaacaggtccaaatgggaaaatgagcttatttttatttcataatgtaagtgcggctaaacccatcaagtattggccattctagagtaagaatattttatggtgaaaatttccacagtacttgtactaggcaaatccactgactagacgtgagggaacattttaaaggaaaatcctgggatttagaagtcggggcatggggtagggatcaggaagtgcaaagtccatctcagtgcatttaattttgattgtcagatggtcaaccagaaagagcagaatgagattgtctcatttgaattcagatataaaaactatgttatgaattgttgtacctggatttaaaaaggggttgggagagtggcacaccagcataatggcatatggaaatgcatatcctagttaacacagcgctagaaaagatggcatactgcctctgtaagtgaatttgacagcagttatttatttagtttaaaagtatttactactatttgtgagcacaaaccctaaaggttgtgaagtattgttgtcctgtgaaggtgatggatgctgtactcctgaccctatatggtgagacatgacttcattgcttgtttagattgttctgatatttgggactcctcaagggctgttcataaatcatttatctctcttttttttccacaagaaaatatttcaattgtattgctgcaggaacactcacgtgtcacacgggatattgtggtccatgcagaaaaagaccttaaaaggcatgggtttttttttttttttttccaggataaaggccttttaatgcctgtccagccttagataattttattcactccttctggacctttctttattcctcctgtgcccagagatcagtttttaggaggtgggttgaaagcttcccaggccttaggagcttttgttgtagcccccccattcccactcccccctacccccagcattctgaaaatttgtaaagaatcttctgcttgttgctaagaaatagttaaatctcagtcaccaggaaaaaaaaaaagaagcacattattgattgtactaaggtatatctggaccacacagctagagcagagatgttagaatatctctctttttgtagatctgagggcattacccagcctgaacttgcctaagcccttgtggtcacacctcttgaaaaggttttgtttcccccgtcaattggtattcaaaccaggtcagcagattctgtttgcccggctccgctgccgttttcattttaatttgcacctgttgtgcagttgttcggaaggcaagtgcagacccgcggattatacaaagatcatattatgagcagatatgcacggtgtaatctttttgtccccagcttcacatgacaaaaaaaaaaaatctctctctttttgttccttttttactccctgggaacctgtcaaagcaaacagatatgactgactaaaatttgtaactagacatgtttccagaattctccaaaagcattatgaacctgacacacaatccttttcatttttttcctccttttctgccacttttgtataatccgatagctggcaagagccacttgagatagctcagttgataacttagcggaggattgctttattaggcgcagagaaatcaaaatgaacctgaaaattgtttgcgctttttttttccacagccttttttccccctttctctctccctcttgttcccatgatgtcatggttctaacttgtttttttgtgtgtgtttctggagagttgggttaacagttcttggcaatcctgtgtgtgcgtaacggctggtgtgtttctctagctgagctaatgccccgtgtttattactctaatctttcttgtctggtggtaaagtggacaatttatgtactagcatgtaggccgagagcctgtgagggctgactaattcagaaacagccaccttcaattgagttcacagaccttatttacaggctgtctattttaagaaaagctactgagcattgctgggactgagggctgcaaaagcagcccgccggttcttgtgagttattttaacatttgtgttggtcttgcctgtgtcactttgaaatcttctgtaattatgacactatgaagacatctcaatagtagtattaatggcccagaagatatggcttttcctcattttctgcttaaaagattaggatataaatggccttagcacatgacggttgacatagaagaaagagtgaaaattcagatggagcaggtttgtgtatgtgtttgtgtatttgggtaaatagatggacgtgtgtgtgtgtgtctactgtttctagggaaaaaaccacagttaatatagtgaagtcatctcgtatttatagtacaacattatatagtaaatacttcatgtctctaagctaataaaattgtctattgtagatctattttataagtttttgtggagtatcgaaagtacatattgcaatacgtctctttacatatgcagtataggcatagtttgtgtgtctatgtttctgttgctttttagaatttcccatcatttttaggaaaaaattgtttaaaatcagaaagagcacccagctataattgaaaaagaataaaaatgctaaaacctgaaggatattaattatattttcctgacatggttgagtaattcagttatgaaaatattaattattttccatttaactaaacaattaggggtggctgatgtttctcaacagagtgtttagagagtgtgttttgtgcttcttctgcagtggtgaactatgacaatgtagtggacacaggttctgaaacagatgaggaagacaagcttcatattgctgaggatgacggtattgccaaccctctggaccaggagacgagtccagctagtgtgcccaaccatgagtcctccccacacgtgagccaagctctgttgccaagagaggaagaggaagatgaaataagggagggtggagtggaacacccctggcacaacaacgagattctacaagcctctgtagatggtccaggtaagtgtctaaaatcacttggcctcttcctgtaccatcttcacatcttcaactaatctgttccacctagcagatcgcccacaaccaaataattaaaatatttctttccattgagcccttgcagaatagagataccaaagctggtgacagattatgaagtgatagtaatgttatcacattgcggcagttacatcttaggaagggattatatttcagttttgatgcaagtcaaacatgaaccacactttcaacacataacatgaggtatttgcaccacatttacaatgtgcaaattatgtaacatgatcaagatctatactttcatgataggaaatggaagcaaatgtaaaaactcacaacatatatatgtatataaaaatattttgtgtggaaattatgtagcatttcaaaccaaataactgtcagtttaatgtagcttcagtgtctgtctgacacctcctattggaattcaatcgtttaatgattcccttttgttaagtgtgaatgtgatttcacacttttacctggtcaggtagctttcttattatttatcagctaagtacttgataatgattcctgctgtttggtgggactctcaagggaagtaaaaatggtcccaggccaactataataaaactaaggtaaattatattcaaactaaaacttccgacaacactgtgcaaacgggaaatgtcttggtctaaaattcacttatgacggagaatcgctaaggtatgaaatgtttaacaaaatacaagaaatcttattcctgtgaactttctctgctcatctttacatggtaaagtggcctggaaaatttgtttaaatgacctctctaattcagacctcatgtcaccttcatctctattcccaggacccactgagagttatcattgtttaccccaccttgttttttctttgacaacataagcaacaaaagcatttttataaataggtgaagtggctgggaaggagtctacctatatgctgttgtgatgtcgcagactataaaccatcaaacataggcagaataattgtttggtatactggaaggaggataataaaagcacttccactacgaaagaaaattaaatgtgagatgaaagaaaaagaaaaaagactgatggcaatttgagtacagtgtatttgtttttcgttttcctaacatactgtgccaagttttctactctttccgtttccaattttgctttcggtgaaggtttctcgaatctcagcaatcccacacataaacatttatcgttatatccattaagccttaaggttttagattttcaactatgagggagaactcagccaaagatgcttgaaagataaatacgtttaattaggggcagaggatgatcattaaaggaagtctgactgctgcagaagtcattaacaatcttaaatgaaatttttatttttatgatagccatttacatgtataataagagccaatgattcttgggagcagtgtgacagaaacagagtgtggcgagaactcatgtaagacatactatttaaatgagctggtgttagctattcatatttgttaatgaactagatatgcagggctataagaatgaatgttctgatgctttaaattttaatatctagaaatcaagggtaaggaccaattactagaatttccacccttagaagaataattaataacaatgtaacaaatgtacagccccaaacctcttttaaaaaagtttaatttaaaaaatttaatatcaatagttgaaaaacagccaaacagcaatgtcaagctgtagtagtttgtgattgtggcagctttttgtgttggtcatggatcataattctaaacgttttaatatacagtaatccatatgaatgcattgcagaccctgttatcacctgtagttaatggtgcctgtgatacaagtgaacaggctgttctttgctcttacctttatggtaaataaaccagcattctggagtcacaataattaaataaaatgtaaatccctaatctcatttggctatttggaccaagaaacttacccggctattacctgtctagttctaatgattactaatgatttattgttctttttttttattgttctaaaagtgctctgatgtggtgccttgatgtctaatgaaaagaaattggtcttaaaaagctactcattgtttatcctgactctgagataacacatttttcttctgataaaatatttttcttatttattgttcaaaacacacaatatagacaataactctaattctggtgcagttttatttagtagtgttttatccccggtgcctggctgtctacagtcatacctcagcacatagctttactctgagataagccctctctcctttgctctttctcccatgctttctggagtttgtctgcaggatgcaggttttgaactgaagagcgcagtggagttcttactgtgcctttccggttccagcacaatcaaagttttgtgtttggaattgtccttgacattctttcgtcccacaatggggtggacacagtgtgctggaaaccatgacatcattatcattgacacagacttaaataaatcacctgcatcttggcctctttctgcttattcaaggattcttcatcttaaggaagaaagtgctctttatttttacaaatcttcatcccaggggtgactggaagacgcaaacttttacaagtgttttaaaaataaatatactatgtggttttagacacagtatgctgagtcagaggtgtcttagagaatgtttaaggttagacataaggcagaaagacagccagattgcctttaattcggaggcaatattcctaaactgtgtatcattatgtccttctgaatatggattcacttgaaacttaattaaataggcatatacataacatttcaaatacatacctgaaaaggcttagtagtgtttcattttcacacattgagcttgatattcaaaaaagaaaaagattgatgctcagtgaatcaaagcaaagtactttctaggtaaaagtgacaccatctcatccaatgtctctgaaagatctcagttgcacagtctttggataaaaagggttataactaaataatactacaaaatgcaatttacacaatgtgctgactacacatttgtatacccagcatttattaatttgggaagcaaccaactactgtaacttctctttactttttcataagaaaatgacaatgaggaaggaagtgcagcagaaatcttgaacattaccactattatgcaaaaaaaaaaaaaatgctgttaactgttttcccctcagtgacttgatgtgctctcagatggaaaacttatgattcttgtgactcttggctacccgaaatcacatgagatgagcaaggaagaaagacacaaaagctatatttatatctagccctgaacttctcagaaataccttaatatgattccttgcagagactgataaaaatatcagatgagggagactttcaaatgatcaatgattacaattgacaatacaatattgctatatattaaacttctaaatgtttaatgtaaaatgtctctctgaaaatattttttaaataaaggaaaattccttgctcaggaatgaatttaagtggttgtacagcttaaacaaatatcattcaaattatctgattattatgaggagtgagattaaattagcatccaggtatatctgtgtattttaccttaagaggatcatgatttttcagttctgattccataaagagatttgctgcactgcttgtaaaatatattttattttatttttgctgtaacattttctagaacctgttctttcatgaaagtagattagaatatgataagcaaagaatgaccaggacagatttggaaattcgtagagtcctagttacaaagtttcccttgttttaagtaaaatgattatcacagagagatattcatcctggagcatatttggtctcattagtattgtcatagtaaaaataaaaatttttaaacttcacgtttaatttacttaagagatttttaactatcagctatcctgctctgtcctcctacgtcctctacaatctggtaggcagaaaatttgagagtgcccctatttttcaaattctcccttattttaaaatattgcagtttttgacaatgacctttaattgtttatgaatttttaacttcaacattatatatattcaccttcatcagaacactgagctgttgttatatatgtttccccagaaaatgattatgattacctacaggggcataaatcatgatgaggacaagacatttatggagtagttgggataggaataaggcaggtacgttttagaagtttgtatcaagcagtgaaacaggtattgttgttacttctgggatatttgttgtacaaactgggcattccaagttttgatatgtagaattaggttttcaaaaagtatgcttgcatagattagcaccattatagccaccccaaggggaaagaaaagcatgaaaacaaaatgtgaaattctgacttgccactaagcatccagagtttccagaggcatagcagccagcatgcctcttcatgagtgcaaatacttagttgcttttgactcttattgaaaaaataatatctttcccccatttgtcactagaactgccaccagaagaaaagcccttcatttgctccaaataagcacttctgtttttcacagcttgcagtaatgcttaaagtaaataagttcttgtgcagctagcactattggattcattcaattgcctgaacaaagctattgtttagaggtctacaacaagccttttctctgtttcctttaaaagaatcttccttgttcctgtgcttggcatgcttagtatagtaagcctttctacaattctcaaatgctaaagataattttcccccacagaagaaatgaaggaagactatgacactatggggccagaagccacgatccagaccgcaattaacaatggtacaggtgagttatgttggccacgctcagatcacatttgtcctgtgtcatgtgggtttagtgaggcagggaaggaaacagtgacacatccatttgtatctccatgacttaacaagtagtcaactttacaggtctctggttttgtttcaaatcaaaatttcctacattttggtattttactaagcaaatacatctttcattctcacacccctaatttacctgtgacgctcaagaatactgaactctatgaatggatcctttcagtgcatgagttgggtgaatttctagtagtaacttttattttaaaagactgcaaaaaattattttaaaattaggatatgatatacctctgctagccaccacttgatatcagtcgttgagaattcaaatgataaggtgtaatttagactgtaaaatttttttttcagaaagacaaatttccacgaacatttctctcaataattaatcatctcagttccttttaatcctttctttacttgtaattctctgcatccttgagcccttttaaataattttttccaggcagttttagagaagaattgacaagtttacttatttttaatgaagctaaaaaattacagtgggaagatactgagtggtgttttgttttactctgctactgcaatagaatggagtttcaggacaactgtgatattccatgttttttcccaaacactgaatggcatcttctctcacattcttacatcaccaacacaaatttacatgttccatctctcttttcctagatgagactatttattttgtggaggggaggggtgttgcaaacagtcctctacactaccatcacaaatattagcatagtgtccaccataaaattatcttccaaaataaaacaaaaaaaaaatgtaactacttctactcaactcatccatgaaaaataacttgaagttttatgaaatgtaaaaaactaagatgattttacatcacccttatgttgatacacatcatgatagactgctcatgttgtgtttctgtttaaaatgtgcttattaataacttaaaagcatgaattcactttcctgggtataaaataagagaaataataaaaacctattgtcattctattcattcgaataatgtcaatttaaggtataaaaataaagctgtacaatagatgattctagaaaaagtatagaatcaagcaccaagaatcctaatttttacacacagccctgacaatgactagattgtaacccttgggcaagtcagttttcctctttggaactcagttcccacaactgcaaaacgaatagattcaactagtttcttgataataatacttctagttttaatattttatgttgcatgggtattatcaccatgtaaaaatagaaacaagataaaataacttcatattaaaacaaaaataaagcgatatcatgaattagatactttctataatgtcccaactcatgggatcaaaaatggcttcaagttccttttaaagataaatgttaaatttcagcctccagcataaataaaagctgattttgattacccttataagcacttaaagtgtcacaaaagaaaatttaccccacaaagtaacaatttactagctgttgtatacacctagagtttaaagtgaggttaataaaaattgcttctattcagaaggtttaaaaatcaatcttgaatgtcttttcaccaggctttaaacaccccttttttctcataatacctgctgtaccttgtagttcatatgtattcagtcaataaataaatcaataagtgttcattgagtgtgttctatatagtcactgctgtgtgcatatgtggtagaagatgggtcaggaagactaaaacatggttatcatttcatttggaagatgagactaatacacctgaaaaaataatgatgaagaataagtgaaaatatgtgataaacctgcaacaaatggtaggagccataattatttagttttttgttgttttgttttgatttgttttgttttgtttgagacaagagtgtcactttgtcacccaggctggagtgcagtggtgcaatctcggctcactgcaacctctccctcccaggttcaagcgattctcctgcctcagcctccctagtagctgggatttcaggcatgcaccaccatgcccggctaatttttgtatttctagtagagacggggtttcaccatgttggccaggctggtctcgaactcatgacctcaggtgatcctcccacctcggcctcccgaagtgccgggattacaggcatgtgccactgcgcctggcctataattatttgaattacagaagtgagagagagtctatggaatgggcattcacatcaggttttgtgaaggaggtagaattcgaactaaatacattttcaatagtcatggaggagtgaggaagggctttctaattgaagaggagtctgtgagccaagaagggaaagtgtgacatctattcagaggatagtgagtaaagggttttggctgaatcagagagtcctaggaggcaatttctgggaaataaagctggacatttaagttaaagccagatggtggagaatataaagcaccagacagaagagtctgggtcatgttatgctaccatgatttctgtgggtgaaaaccagactctgagagaccaactggaagtcactgtagttatccaggtgtgaagtgataaaaatcttgtcctaaggtggagacagtgatgaaattagcaacatgacttcttaacaaacaattgattctctgaatgatggaggcaaaatggcttcaaaattacagatctgcatgtttagcatatagcagtacttgctatttctagatttacagaagaaggatctaattttgagaagatcttgaaccagcctttagacacaagtattttcatataaaagatatatagatatgggaatataggaatgtcctttggaaatgaggaattgaaacccaagaagtcagggctggagatagagatttgagagttatgcaaatatactcagatcatgttcaagatcacacaggactatgagatttacaactgagtgtatttgttgaagcaagtagaaagctgaggccagggctcctggtgggtggggaggaaaatcaacaaagattttcttttgaaaaaaaaaaaaaaagattatgacacaagagaaaaaaattaaacattcagaagcaaagaaagagaatttcgtaaaggtgagaactcagttaaaagcttcaaataactacccttgaaagaaagctgagcaaatacactggacttagttaattagaaatttactagtgatcttcagcttacaactctgccctttgagagaataagtacatattctttcttcctagctacaagtttaccacttcttctccctgacatctctttggatgctaaatacatgtggttttagaaataatacatcttttctggttgaaattgcatctaaaagactatcttcctctgctcccaagtcttgctcatcaagctcctgctattggctgaatttcttctctagccattccacactagaatgtctccctccaatgagcctgtggggtttgggctgctttatcgccatggatcctggaatggtctccatcacaaagtgtgtctgaagaaatgagcgagtgaatgggagacaaacagcacttggacttcccttttgtattttcaggttaacatatttttgagccctggcctgaagtaaccaaccagacattttcatctctccattattccagtcatccaaacttgaaagccttagttatatttgactgttctctgtccctcatgtcctcctctatttagtcagcccacatctttcctataacagtttcctcaatgtccaaattcccttcttagaatcctgaattgccccttagcacctacaggacgttcttcagtccgataataagtgccatccattgtataccaatggcgctccattcttgtcagaccaaatcccttggtgacaacaaaaaagaaccacatttataccaacctctgaatctctgcccatgctatcccttcagaccctaatcccccagctcctttcttccagtcatccaaattctccccatccttctgttcttcaagtccaggtcacatcccatttccttaatgtggtcatctctgaacaccccaaacgacagcaatctcttcagaacccttgtggggttctgaaatcccacaaccctaaggtgtatgtggctaacttcagcatgtttcatcgttcctccttatattgtttgcccttatttcatgtagtcaatttcatgaagacaagaggtttcttcagctgaaaaatgagggtggatcatcctggtatctacctcattggctgaccttgttctctagccagtaattaaataaataattactgaggtaattaaataaataatgaagccagttgtggtggtctggcccataatctcagctactcaggaggtcgaggctggaggatggcttcagtccaggagttggaggctacagtgagccataatccactgcactccagcctgggtgacagagcaagaccctatctcaaaaatagtaataatcagaatgtatatgtcgatattagtaagtgactaaaaaaatgtttgccctaaggaaaggactattccatttgcctcaacaagcccagttatagcagggagcacacatggcagatattacaactggtgaaatgaatgaatgaatcaatgaatgaatatttggtggagaagaaatggattctgataaaggaagccacagtaggggaaaacattctctgtggaggagactaagtatcttcagagagtgaaactaggatctaagtccctgaaggattttgccttgttaaaggcaaagaagaatagcctagagtatcactacattttttttttaacaacaaagttagattaactgaatggcaaaattgatctataacacataaaacagtgcaaacctggatttatattaataactttccacattgcataagttcaccagtttttatttttttttaaaaaaggaacaaaattgtaatgctttcacacgtaagataaagaatatcttctaacaaagagccttacaactttcagatattaataggatttaaattcaaaatgaaattattaggtaaaatttttaagtgtgtgaatgaaccattttctaagaagagtagagaaatggaaaaacttggaagcattatacacatgagtttgcctacgtgctagtagtaacaaggagctatcttaggtgcatggtgatcattagcattaatgcagttccacgtgcatatcaatatccaaatagggccctgatgttttactctttgaatgtgtgaaagttatatttactcagacaatctagtacctctagttataaagggctattaataaccacctgcatctgcgcttcctttgctaagagggggaagaggtaccttacatccagaaactgggcaaggccaatttaggcatcagttcttaatcttacacaacacaataaatttcttgtctaagaactaactttatagactctaactatagtcaaacttgtttccagtattctaagaataatacataaattatttcacatatgagaggcaattgttttgggaggctccagattctagagaccaattacctacacttgaattttatctctaccaattactagttacattaacttgagtgtgtaattgataagccttcatttctacatcggtaaagtggaaatcatgattccttatgtacaaggcctcgctgtagggattaaatggcatgacatttttatttatttattttttaactttatttttattttctttctttttttatttcaataggttttggggaacaggtgatgtttggttacatgaataagctctttagtagtgatttctgaggttttggcgcacccatcacccaagcagtgtacaccgtgcccaatgtgtagttttttttccctcatcaccctcccaccatttccccaaagtccattgtgtcattctcatggcatgccatttttaaagcacccagtacaacaactaacatagactagatgctcaccctgttttgttttgccagtttttttttttttttgtttgtttgtttttttttgagatggagtctcgctctttttgcccgggctggagtgcaatggtgcaatttcggctcactgcaacctccgcctcctgggttcaagcaattctcctgcctcagcctcctgagtagctgggattacaggcatgcgccaccacgcccggctaatttttgtacttttagtagagatggggttttgtcatgttggccaggctgatcttgaactcctgacctcaggtgtccccccgcctcagcctcccaaagtgctgggattacaggcatgagccaccaggcctggccaacttcaaactatttttgttcattaagaaatgaatacatcgtaaacggttttctccattcatactggttcctccttaactttttctctaggaaacaaaaatacaattttaacaaatttgtaatgaaagaactaaccaattttgagaggctttgacatttaagttcttttgacattctggaaaactacacagacaagttgtaggacacattattttcagtactctggcatttgaggctaaaatatgaaggttaagaactagtttcgttttatatctgatttcatttttatgtagcatcccttctttaactgtgtaggaggaggatttagtagtatttataatgattacgtataataatgatgaaagctgtcagacttttcctttctttgacaactgactcacatcaggaatcgtattctttttaaaaatttattattgacacataacaattttacatattaatattcgtgaggtgcaacatgatgttttgatacatgtataaattaatgatcaaatcaaggtgattagcatatccatctccttaaacatttatcatttctttgtgataaggacattcgagaacccccgttctagctattctgaaatatgcactacatttttgtgagctccagtcacataatagaccaacataactatttctcctatctaactgtagttttgtacccattgagaaatctctcattgttcacccttccccctactctcctcatcttctggaatcagcctaaatgtccatcaacagatgaatggataatgaatggtatatatacccaatggaatactatttagccataaaaaataatgaaatcatgtcatttgcagcaacatggataaacctggaggacattatgctgagtgaaataagccaagcacagaaacataaatatcacttgacctcactcatatgtggaatctaaaaagctgttctcatggaagtggagaaaaatcatatatatttttttcttcttaccctggataacaaccaataaacaaaaacgaagcatttgcccattgttaacaaccactaaaatacatacattcagagtgtttgttgtatgtagaatttgaactgaggcttgaggaaactttaaggaaatagaagggtgagttccttccactaagcaacataaaattttaggggtgttgataaaaaaaaatcataatgacaagaagagaaaatttacaaataaataattatagcctcattagttattcaactcaatggtcacttattgggaccctactaagtgcaaggcattttgttagtcatcacaaaagatacagtgagaaaagaagagtcactgtcattaaggacctacattcatccgggtgaataaaacagtggtagacgaatacgaaatgcatgtaaaatatttagtgcaacgttagcgcataataaatgcgctatcatttctagccattattattgattataatatcatctggattaagacgttttatttgaaatacagcaagctatgtaagttcaaatgcaaagtgttcagtattgtagagggtttctgacagtatagggtcaaatattggagataggacaagagaggtgccttaaagaaattgcaaatttcagggaagactttcttcaagacaaagacttgctgggtatgcctctgtgcacaagagagaaagagagaaaggctgaaatgtaaaaggagactgggtgaaagatggagtgggttatcaaacgagttgtaagagaataattttagatgatagccacaataatgtttattttttagcagtaagatcagaagaagaagacagaatgatgataggagagaatgtagtcaatttaagatgatccaaggaatacacactgtatgggttgcactctttgaagtcaataggaaaaagagactatcagtcagcagtaagggaataggaatacagttggaatcttgagacatggacatgtagaataattgctgtggacaatgcgtggagattcaattattaggaaggaatatcccattttgaaaacatagtctgcaacaagactatactattatttaagatttttttaagatacgtttgatactccagaaattggactggatcgtagttcagcagggtaagaatgatacaagtgtaagggacagagatggaagtgatgatttcaagttccaaggtgaactgaggtaaataaaatcagaatgggtaaaagggactaggaaacttttcagggcctgattgtcacattgaagtacacgtttcaagggaatgagaaactggatgataggcaaggggagaaagtagaaatcagagagcgaaagttcgcggttctggttcttgtcccagggttagcccaggagcaagtgtggccatccatgttgctggattagagaaagcctaagcactgtgaagccaggttctgcatggactatctattaagtgatgaagtttcccagaatgcaatggcatcctgtgggaaatgtaatcatgggacaggcgtcattttgcttgcagtatacaggcaatgtcctaaaacatgacggtgaaaatggatgactttcgacttcgacttcaaaccattacagctacagagtggaaacaatttgagggtagaggttaggtctgctcttctccataatccctctcagaggatgcagtggtttatacagtgttaatggttcataaccagggtatttgttgaattaatgaataaataaacaaagaaataaatgatgagtgagttgacgaaacaggaacattgattggaagcagtagcgtgaattaaggagtttgttgacccttcctctttgttctgtgagtcataacaaatgaaagcaggaatggccctgtggaaaaggtctgtaagggatgggttattatcaggggatgacacagtttcatttagtctgaagaagtggaacacatgtaggaggatataattaagcatgggaggaaaataacgagtaatatgtgaaatgggaaagcaaaatgaaccgggaataaagttcttttttggtttctagtccaaagttaagcttgaggcatttcttgtttactataaccacaaaatatctaatatctgctaactaataactaatacctgctattttaacagatgttaaaataatacctaataaaaattcacctttgcaaggtgctatggaaagttattctttattgagcgcctttagaaacttgattacaaattagaaacagtcaaattaggaaatacaatccttaaatattaaatggaaattttaaataagcatcttgaacagagaatttgaaaaacttttatgtgttctctttgccccactagacccagctctggattacccagttaaaaaaaaaaatgtaagaataaaacaagtgtctaggattcagaggaatggggacatttaaaaaaaaaaaagaaaaaaagtaaaaattttctacacacacatatacaaacacacacacacacacacatacactctgaagtgggcattttaactgacttccccccatattcattgtatggtgtaataatgttgctatttagaattgcttataatgtcattgtgatcgtttcagtatgtagggcctgttcaaatggtaccaagtcaggcatgatgaaaaactaaaaagatgaggttctctcttttcttgcctctttctctcatgttgagtcattatggtgcagtagaaagagcagtgggtgaagagtcaggatacataaatcctacatacagctcttccagaaattacttgtgcaactttgtatgaatcactaacctcactgtaccttagttgtaacatctgttaaatgaggaaatcaggctagaaattttgaactccaccccaccctgccctttcttctaatgaaattttactggaagcatgaacaaaaaaattactggaccgcactagccgtcatgggatgggaggctctcgggggccctgcctcacgataacatacacagggccagcttcctgggtctgggacctgcacagtcgcacagggcccagcactgagaagggctgcttggttggctctgcagttgctgtcttgaagctcttgacaatttttgaatgaggggcccaacattttcattttacactgggccccaccaaccatatagccagtcctgttcatgtctcacaaaatacatgagaagaatagcagagtacaagctaggatgggaagtggtggaatcagagaggcactgcttcaagtattgaacagaaatgccagttaggtctaagtttacaggatccttctttgggtgtctccagagcaattgaaccccaagtaaagatccagatctagactgaaaatcttgcctcagcaagaaatacagtggtgccaggtgtaactcccctaaactgataatattagtataaggttggcagcctagccagcaattaagtctctttaaccatcaattctgtgcatcgcatcgttagcataggggaaagtgggggaaagaagaactttttttactttcactatcctcttggtttaataactctcaatttctcctgttcctcttaacatggagcttaaattaaaacttttaaattagttagctttcttatatcagtaacagaagcgatacaagtttgattataacgtatttctctgcaagagttgagtggatatataatgttaatcaattgtacaaaatcagtttatcagataattcagttagtacctaaatacttaacaaggagggaatcatactattacaaagtatgtcatattcttcttggttgtatctatcacatttttataggttggaagagttttgtctgccagtcagacatctgtcagggaagtcattattttttaatttcttagttaacttcatacattgagtttttaaaaataaggtggagaaagagataggtttggaggagagaaaaatagaagtagtgcttggcaggtgagacgggggatgattttcagactataatcagtgaacgccaagaagagcctgttcacttcctggctaatgaatgctgttgttttattagctttgtttgcgattaggagcagctatcttcacttcacagcaagtgttcccacaagaaataactgatatttcaagcttcttgagtgcctccttcattcattcaacaaatatttaataagcgctgttttgcttgtgatgttgtctggggtttccaggcacttccaaaatattttctcttaatctgcatgtttgttttccccatcagaaagctgtgttgttttgagtttttaattgaaaagaatacagataaaattctctaggcctagccagtaaagaaaaagcaaactgattaaagtaattaattaattgaaattatggaattctggaactttgaggacaccccagaaagcacaccctggctcattttacagatgaggaaattgaaattcaaaaacatgaaataactgagccaaaatgaggagtccaaggaccctgaaccttgcctaatcattcaattattgcataataactgtgacccaggcactatgctaggtgctggtgacacaaagctgaataacatatggttcattcttttatcagctcacagacacgtaagagaaagattacgatgggatgtgatcaattcaatgattgagacacacagatgacattcagtaagtgaagaaggaagtctatgtgaactcaggctgagatagtcaggaaagctacctaataataataatatgggaccaattgtgcttctctccaaaatcatgttatgaatgtctcatttagccatgcgaggcagaggattgaatttgtagagttcttaaattggacaagggtcagaatttcgtgaaagacttgttaaaacacagattgctggttccataggtttggatgggccccaataatttgcatttcaagcaagctcccagatgatacggatgccactgacttttgaaaatcactgactgtcctgagcattcttaggtttcacgtgtctctacataaagcataagaaaagagcattgaattgctgggcaaaatcaccttacttcatcaactcctctaaattataataaactagtctatctttttggtaatatgccaattccaaatttttaggttacacagtaatgtgaaagacaagtgcatattgtctatattgggaatttttctttgtgtgtgtgagatggagtttcactcttgttgcccaggctggagtgcagtggcacgatctcggctcaccgcaacctccgcctcccaggttcaagtgattctcctgcctcagcctccctagtagctgggattataggcatgtgccaccacacccggctaattttgtatttttagtagagatggtgtttctccatgttggtcaggctggtcttgaactcctgacctcaggtgatccgcccacctcggcctcccaaagtgctgggattacaggcgtaagccaccgtgcccggcctatcttgggaatttttaaaaaagtaatggactctatcattctgtgccaatacacagcaatcaaaatcgttgagtgttagcagtctctacatcttgatattcaaaatcccctaatgtaagatctcctgctgtttagggagatatttgatactgcagactactacagattcccattccttgtccactcttcacctcgctctcctgaagctctcttacatgagaaactctcattggcatctgaacatgtgttccctggagaaagccatgttcagagcaggggtggagagagcggccaagatgctgtactaattcccaggaagagcagaaaacttttctgttgctcttgacgacctggctttatccatgcctctgtaccagctggaggctctgcgaggccgcccatgtagctgtgtaatgagaaaaagatcatcctcttccctcacggttgtttttaggtaactagtgccaatatgtcttttggaaaccttctgcaaaaacgcatacatgcacttttaatgatgaaaagcttacatttattaattagtcaactttaaacaaagtagccatgagaatctatagacctcaacaaatgctgaatatgtgcttccttaaactaaaaaactcaatacaaatgactacattcaaaataattttcgtgttttcttatcatctgagatgttaacaaaaaggctgtttttcaaaaagatgataaatacagttacctagatttgtaattgcttcttcaggtccctttgcctttcatagtgaagtaagcaaaagccagattatatgataaatacataatttatgttatatacattacattacactggggaagcgtgtgtgtgtgtgtgtgtgtgtgtgtatatatgagatgccctattatacatatatatatatatatatatatatatatatatatatatatatagacatgtctgtatattgcagaatcacaaccattatgtgtatatatctccaaacgggtgaatcacagaagtaggaaaaaaatttaccactcatgtcctcatttccaagaacactggcactagtaggcactcaataaacagttattaaacaaggggatggatggatgattctactcagttttttacatatacttgctgcaactcctctgtaccttccaagatattttctttttaaaaagaattatttattcattttgatgtttacttaaatggcttaacataatattcaattttcttccattttttatgaaaattaaaagcatgcaggacactaaaccagtgataatagagtacctgtcttccactgtgaacacaggcttgctacaaataaagaaaatgaatgccaaagggaaacagaaaatgataaagaataagtatctggtctatatttcattacctgtaaacactaagcaaagcccacttttaagtatctttgagaaagtattctaaagcaacttgattatgggggctgactaatttggggaccaatatttctcttttatttagagttctgttaacatcgcttgaattttaggcaataatttttaaggccagtctatgttgatatttattattatctgtctgaaaaatcaattatctatctaacgcagccataaagatatctataaaagtgtcattaataagcaacattagtaagagtggccaacatattgccaagagaactgaggctttcctgacaaaaagggacctgaaaattcaccctaacaatctaacagtattaaaatacacatggtcatgaggaaacatttttaattaacattcttttttatggctgggcgcggtggctcacgcctgtaatcccagcactttgggaggccgaggtgggtggatcacgaggtcaggagatcgagaccatcctggctaacggtgaaaccctgtctctactaaaaatacgaaaaattagccgggcgtggtggcaggcacctgtagtcccagctacacaggaggccgaggcaggagaatagtgtgaacctgggagacggagctggcagtgagccgagattgcactactgcactttagcctgggcgacagagcaagactctgtctcaaaaaaaaaaaaaaaacaacaacttttttttggtttttttgagacaggggtctcactttgtcactcaggctggaatgcagtggtgcgatcacagctctctgcagcctcaacctcccaagctcaagcgtttctgctacctctgcctccccagtagcagggaccacaggcacgcaccaccatgccaggctaattcttttactttctatagagacgagatttgttgcccaagctagatattctttttttggatagagaaaaggttatctaaccttagagaagattgagagatatttgcaagacattagggtaaattttaggactaaatgcaaaatctctggagaaggtatgggaagaaattacttgagccttcttgtgaatttttgttatggtttgatcataaataccatgcaaatatcctttgtcagtgtgttttggcagttcttccaaagagaccagggagtgaagaggattacagaaagaaggaaaatgaggttgattttacactagaaaaatgcagtgaagaattctacaacctttcagctacttttgtacctcattcctgtgtccagtacacattattgcataatctttctaaaaacaaacatacaaactttcagatacaatcaaaacttcattcttcccaacaattctgagagtaaccaaaattgaatcccatcatttgtcctagtattgtaactgttagggtgattttagttttaagagactgaaacacaacataccttcaagcagaaaaggaagtttcttggctcacggaatttaaggaaggtggtcaaccgaaccactgcaaggtgcacctcggcctcaggaacgagaagagctagaaatgaactgtcagaacatgcaatcttgtctgcttttctctgtatgtctgctttattctctcttcataaatcttctttttctagatggaaaataacaattccttcattccacattttatagctacagtcacttggcagaaaaaaaaaactgccttgatgctttttctggaacaaagtcctaaaatcatagggaagggatttattgaatttaattggatctattggctaccctggaccaatcaacaagttggcctggagaagagaggactgagattggctcacctgagcaacagagatcaattgtggctaggggagcaggatcacatggtaacacagcagctccttgggtaccataagccttggcaatcaggaaatggagaagcattcctaggacaaggtgaatgttgaagtactgggcagaaaaactgtatattactagcacctattgcacctcatggaaaaactacattagattcatgctggtgatacctagtttctgggaggtttaactctagcccacttaagtgaccctaggtatgtgagatatataaacaacagaatatctatacagcatgaagaaatatccagatggagcaaatggatttaaatgattgagtgacatcttcatgaaaccctttttgaatacttatctgagccctatcaaactctttcaagtatttatgaccactactacacagtttatcaaataattattctacagttgcctgagtattaggtctaagttcctagctcagctgcaggtatcttattttatgcttccttttaccaaaagacctctacaccaagattagtgttaaggacataatttattccacattcatcccataaatgattcttgagagcctactaatttctaggcaatatattcaatgcccaggatacaaagatgatcaaagatgaatccttaaagagagcgcatgatttgatgtattttgtccccatcacacttgacatagaaatctagcatagccaaatttgatctagcaattgaattacctctccaaacaacagtagtgtatctagatgcagttttgtttgcctatccagaaaaatcagaattttcctcccttttaagccaaaaggctattaatgcaaatccaattgaatttgcatatgattacatttctgatggaaacattcatatgcaaatgaaaattcatgcaaagatagccagatcattcaaatagttgctgaaatatcaagataaaattaggatattaaatgtacatccatctatgtttactaggttacactaaggtcatcaagtaggacaatattctcaaaaaacttaaaccatgtcttaacccttaacataaaccattgacaaccctcaagtagatacgaattcagaaaggagctattacgttactttgtgctgtcatagtactgaaaaagaagtcagtcactgataaaatcagtgaagttactcaaaagacattcatcatggctctgccattttgccccttttatcctttcttcccatcaaaagtaaaaggtgattttttgatagatctgatgttattttgatgatccaaaacaatgagcaaatactttatgcaagttgacagtttctacatactccataggggctcagtgatgcaagtgaaatgacatcatcacagtcaccaccaataagtatccattggaaagcatccatgacattgtgcatacagcaaggggaaagtgatcttatctaaagcccatattctttattaagtccagctaataacagatttaagcaaaatttcaaggtataaaatcttaatccactactgtacattccaaatctatttttgagggaaatacggtcttggaatagaccgttgttcttgttaaccttattagaagttacagaggcaaaaaagaaaggtttgagatcacagcattcaggattactggcgcttagtttagtggtccacatagtgtaattctcccacttccttttatttggtcccatatatttgtttatagtttcaagtctttttagaattctagtgttctttgctttgatgaatgtcacctaccatccatcaaatttggaaagtataaacctgagggaggtaccttagcatctcccaacttgacaaactgaattctttcccagatgaatctgaggaattttggatcttaggtatttctcaaatccagacacttccttcatctccatcatcaattccttaacagtatcttttgcctggcctaggacaggaacctcctaaccggattcccaggacctacttttctctttctccaatccctatcatactatagccaaggatgtcatctaaaaatgcaaataatcatagtttcatccagccatcctccttgcttaatactcttcaatagcttcctgcttcttttagagtaaaaacccaaatccttaaacaagctcttacctgctgcatggcctggctcccgccttactctccacccttacatcacgtggttcccctttcatcctctgcactccagcactgtcctttttttttaacatcctgagatgtcccatgcttgtttcagtcaccacattgcacatgctgctcttctccagcttctacatttagttaacttcatgcttcttcagttaagaccttcctgatcttctagctgccatcaggttcctgtgttactttttttataccaccatataactttctttcataatacttatctgagtttgtaatgatgtgtttactttggagataatatcagttgtattaatctctctcatggcttcccgaaggatgagcctagaactgttttctgctcaccagagcaggacatgatgcctatcacacactaggcattcagaaaatacttgttgaattaatggatagttccactttctattcccctcataaaaaatccaagttcataatcatgaaagcaaaaaaaaaaaattgcctagcttgcttgcgcatcaccctgccacagttgccaaagagaattagtatgtcaaatactataatattgtttatggtagagaagacaaggtgaagaatctcgtggcaccaaggttaactgctttcaaaaactatgataataggattccaccattaattgtaccagcaaagcacttttttcacctacttaggataaagaataatataacagctactctcccaactttgttagcataaaaatattatttatgatagctaagccacatcttatttcagaaacacatctagaggtttcaaatatacaaaatcttatgacacaagttgctaaaattgagttacaactgttattcatttcacaggaatagagtcataattacaaaagttaaagtcacatcaaaatcacacaccagtttcttaactccctctgttactttttattttatttctatcagctgtgagcttaattttattttcagcagctttaaaatacggaactaaagattaaaattatagggaaagataaaatgccacattctggtgcttttttttttttaacaaagttgcattattatctgtctaggaatatctttccttttgcatctgtctcagactatgtagtcctggctgtctgtgacattcagagggtggagggttaaaaacttatatttagcaacaggatgtatctgtggttagggacgctcagtctagtggacaatgaaaaattaaatatacctttcttagaagaaaatgaaatttcagatagactattaaaataggcttaatcttatattatctttaatgtttatggatcttagaatgcagttgttggctttttaaaaaaaatttatgaaaaacattttaaatttctttcattctttgtatatacagactaatattccaggaagaaaaaataaaataaaatgtgcttatttaacttgaaggaaagtgcccgccttcttgcatatattgcaagaataagcattcagtcaataatcggtcatcttcaacacttcttacaaataaactaggttttgtagtctattgcaagtcagcatttctcactggctatgatggagatggacttgggatcctaggaagaaggcccggaaacaacatttcttctccttttatgatttcagtgaagaatgcaaattgcacatcagattttgaggaatactttgccaaaagaaaactggaggaacgcgatggtcatgcagtcagcatcgaggagtaccttcagcgcagtgacacagccattatttacccagaagcccctgaggagctgtctcgccttggcacgccagaggccaatgggcaagaagaaaatggtgaggctgtaaatcatttttagccactgcactgacctctgcagctgttacaattacaaatgcactacatgcctgggtgtttaccttaaaatttgaagaacagctgcagaggcatggaatttcatgagcaaagattagaactgtaattttagggtattgtgaaatttttttgtcagcaaatttgtgtcatttgtacatccaataaagaacaagaacaattagagcccatttctaagagataaaaatatctaaatgtattcctatctttctgaaatattttacttttgaggaaaaaaaagttgagaccgacactccctcaccttttgttcttctccaccgacacctgaaacgccccttcacactgtgagttcctgagtaatctgtggctacaggtttcataggaactgtcagtcacctaaagagaatttcctcatttatcagctgtttaagtcccccccacccccccaaaaaaaaaaaacctgaagtaattaattaatttttgagcacagtgtgagctgattccgacaagtctgtcctgggcatgcgaggggactggtgtgcgagggggccgggtgcaatgatggcactctgtggagcagattgcagtgattcctgtcataccatcccgggcagtcagcccattagctgccattgatttactgaccttttggcccgcttctctctctctctgtctctcggctacagacctgccacctggaactccagatgcttttgcccaactgctgacctgcccctactgcgaccggggctacaagcgcttgacatcactgaaggagcacatcaagtaccgccacgagaagaatgaagagaacttttcctgccctctctgtagctacacgtttgcctaccgcacccagctcgagcggcatatggtgacacacaagccagggacagatcaggtggggggatggttttaagtgatttctttctataataaccccttagagaaacgatattgctttgattggcaatcattattaatttttcatggcattttgaagatgcagatcttttaatggtaatagctttaattgaggtctaaatgattttttgatggtctcttctaatatgatttaatagtcttatgttcacgatcgaatgagtgtgttaatttctaatttagaaattttatttgcactttaacttgactttagtttcatttttatgttccacaaaaagtgaatgaaattgtagcattttaattatacattattaaacatctcagcaattttaattccatttttcacctcgctttacttagaaattttcttttcatataggatctaagtcatagaaaaagaagtgtgtatttctttcatttttcatataacaccttcaattacttagagtatttttataagctgctactagtttatgaaatctgattaagtgttttaaggaaaatcaaaaaggcatatattatctgtgtatatataatatataaaataaattggattagtactaaaacgttggatgtacattaaaaatgatcccttaatatacatatttgtagctaaatgttaaaattactccccctctttttgcttacttgtctcaaaaataaaaactctgtcttcaacagttaagtatagcttcttaaatctttaaaacaactgaataggattgattcacagtgttccttaaatgttacatcaaaactcctctttcccactgggaggattgactctgcaaattgatattatgatatgtttgcatggacagaagtggtgtgccttaagtcacaataactggccctacagatccggaatcacttaatttaagtcttgacaccatgtctgtttttaaaattattgaacatgatattgtattcaaaattcttaggttttccttataaccttcattttcttcgaataaggaaaatgaggataagcaaacacagtcaataatggtgataagactagattatggaattttactattttaggagaacagctcatgtaaattattccatttatatctgattgggcttgtcacctgaatgcttttcaaagatgagttataaaaaatatgcttgcatagttgcacttatgtaacagtttatctccccttgcttatatgcacaaaaactcaaggaaaaaaaaagtgcctagatatttatctagcataaccgctttaaatttcacatgcagaagtgtgattgtgttggcgcattatgaatggtagctttggtgttgaaaagtcccctcatttgctcatggcatttacaattagtaaattaaaatgattgtatcatattaacagtggcacaactaaagtttatagtagtcctctgagggctgtggggggagacaaagcagctgttgctgtttgtttatgcaactcagcaacatatgagcgctggtccctcaatggcgctcggcgggctgggctctgcttgatctttgaaggttgctgctgtttgaacaaacctccctgtgtcccatgtaacaccatctgtctcactaggaatgtgggaagattcagcacaccctagcagttgtcataccgtttctgtgctgtctttttgcaaaaggcttttgtgtcattgctgctagaaaaaggctgacctcctaccttgagcatccagagtggatgactgcattttttttccagaattctaagtcacactgcttttttccccttgttcaaaaaggtcagctgtgtttgattatatctttgctgcttttaacttgtcttttcaggaaactttttttccttttttgtccctactccctagcacactactaaaaaggaaaatgaaaagtcgttgaagtctttcctactggcctgtgataaaactgctcaagcagctataacccaagatgttgtctcttacgtttgataatgaatcaaatctgataggcgacacctcaggaaaaactgggcttatatttgctactagcacaatgaataggatatttaaacatgctcatcatgtaatgaaatatttatagtcaaggtttttttgtttgtgtgtttttggtttgggattgggttttttttcttttttaaattttagattgcttcagtataagatatacttttatgctgatacaaaaaaattgataacttttgttgtgtgggggtggtttttcttgagactattcagaattttcaggaaaatatttttttcttgacagaattgtcacattctagcagagaatgttcatattttagaatttgtggtaaacacgaaaaacaacaaatatctttacagttatacttcctcgtccccaaaggttcaaagaaacattttggaaaagacactacagaaataattctaaagcaagtgttggatgcgcatgtgaaagcacttttttttatttgttccaattttattaccaacattatcacttttattgcaactctgaaagactgagcagataaataagcatgcactcaaaccttttggcctgtctgaaaaacagaggccttttaaaaatatttgtaacaaattttctttgttcctcctgcacaaaactgatgtcagtctttctccttttatagcaccaaatgctaacccaaggagcaggtaatcgcaagttcaaatgcacagagtgtggcaaggccttcaaatataaacaccatctgaaagaacacctgcgaattcacagtggtgagtagcagaggtgctggagctcgcatttgcattttacttaattaggggagttttaaaagattgtttaaaatttacacagtcctatttgtagctttttggaactatctatttatttcatcaactctgtgtgcctgatttgtgttcatgagacttatggtacaaccagtagcactgtcttataaaaagaagcagaatgcttacatgtcttaaaaattacaaatgctttgatttattacaaaatctagaggctcctttttgtccttttaaaaccgcttctccagaataaatatttctgacctgaggaaactcaactggcaaattctgaaagatattaatttttgagacctacccatgaaaaaaagggtgaagaattttggataagagctatgtatgataaatactccctgattcctgagggccgtggatcacagaacagaatcctaccactgagatttcctctttataactagtttgatagctctgccaagcattttattaccaagttggatgctattcaaaggactagttggattggtagaatcaatggaatctccacaaagtttattaaagccatggctacacttgcctttaaatactgtgacatctttattgtgctattgaccacacattagtctgacactctgtttaaataggaggctgccgatggcagacaagatttgggatctcagctgaaaaaggcatagatagcccttaccttccactgtgaacatcttgaattatgtcctcccagggcagataaagttcagaaatggttatggtcacataattctaatctaagtacctagaatgtagaggtaccccattgtgttccttttgtttggtttcacagattcttctcttggtagacaattgcaattgttatctaatcaaggaaatgtaacggtaattttaattatcattttaggtgaaaaaccttacgagtgcccaaactgcaagaaacgtttctcccattctggttcctacagttcgcacatcagcagcaagaaatgtattggtttaatctctgtaaatggccgaatgagaaacaatatcaagacgggttcttcccctaattctgtttcttcttctcctactaattcagccattacccagttaagaaacaagttggagaatggaaaaccacttagtatgtctgaacagacaggcttacttaaaattaaaacagaaccactagacttcaatgactataaagttcttatggctacacacgggtttagtggcactagtccctttatgaatggtgggcttggagccaccagccctttaggagttcatccatctgctcagagtccaatgcagcacttaggtgtagggatggaagcccctttacttgggtttcccaccatgaatagtaatttaagtgaggtacaaaaggttctacagattgtggacaatactgtttccaggcaaaaaatggactgcaaggctgaagaaatttcaaagttgaaaggttatcacatgaaggatccatgctctcaacctgaggaacaaggagttacttctcctaatattccgcctgtcggtcttccggtagtgagtcataatggtgccactaaaagtattattgactatacgttggaaaaagtcaatgaagccaaagcttgcctccagagcttgactactgactcaaggagacagatcagtaatataaagaaagagaagctacgtactttaatagatttggtcactgatgacaaaatgattgagaaccacaacatatccactccattttcatgccagttctgtaaagaaagttttcctggccccatccctttgcatcagcatgaacgttacctttgtaagatgaatgaagagatcaaggcggtcctgcagcctcatgaaaacatagtccccaacaaagccggagtttttgttgataataaagccctcctcttgtcatctgtactttctgagaaaggaatgacaagccccatcaacccatacaaggaccacatgtctgtactcaaagcatactatgctatgaacatggagcccaactccgatgaactgctgaaaatttccattgctgtgggccttcctcaggaatttgtgaaggaatggtttgaacaacgaaaagtctaccagtactcaaattccaggtccccatccctggaaagaagctccaagccgttagctcccaacagtaaccctcccacaaaagactctttattacccaggtctcctgtaaaacctatggactccataacatcaccatctatagcagaactccacaacagtgttacgaattgtgatcctcctctcaggctaacaaaaccttcccattttaccaatattaaaccagttgaaaaattggaccactccaggagtaatactccttctcccttaaatctttcctccacatcttctaaaaactcccacagtagttcatacactccaaacagcttctcttctgaggagctccaggctgagcctttagacttgtcattaccaaaacaaatgaaagaacccaaaagtattatagccacaaagaacaaaacaaaagctagtagcatcagtttagatcataacagtgtttcttcctcatctgaaaactcagatgagcctctgaacttgacttttatcaagaaggaattttcaaattcaaataatctggacaacaaaagcactaacccagtgttcagcatgaacccatttagtgccaaacctttatacacagctcttccacctcaaagcgcatttccccctgctactttcatgccaccagtccagaccagtattcctgggctacgaccatacccaggactggatcagatgagcttcctaccacatatggcctacacctacccaactggagcagctacttttgctgatatgcagcaaaggagaaagtaccagcggaaacaaggatttcaggtaaagagacaaatgtttttctgctatgaagaaaagaggtggcaattattttgattatgtgcatgtaggaaaaaaaaatcttagtgaaaaaactcagcagaaacagaagagtttgctttaacatgaacctaaaaccatcagtgggctagaacaatggatgaaacagtggatcactgtactctaagcacatttgctttaaaaacaaaaaggataaagaagaaattaatatttattttgagatgtatttagatggactcatctgcttttaaaattaaactttggtgaaaatatttggtaggacttacctaggtgctagaagttaaagtttataaccgtcacgtgcttttaaagatgtacacaggacaggtgtgatggctcatgcctgtaatcccagcactttgggaggccaacgagggtggatcacttgaggtcaggagtttgagaccagcctggccaacatggtaaaacaccatctgtcctaaaaatacaaaaattagctgggtgtagtgctgggtgcctgtaatcccagctacttgaaaggctgaggcagaagaatcacttgaacccaggaggctgaggttgcactgagcagagatcgtgccacagcactccagcctgagagacagagcaagactctgtcttaaataaataaataaatataaagatgtgcacaacttgcaataatgtatatacacattttaataggtacatttgttttacagagaatggtttattttgaagagtattcttaaaaatatcttccatatttcacatgacttcttaccaaatcttcaaagtagttaataattatgctttatcaaataggaaagcagttatattttaacattatgcagcatataatctttgtttgcaaaataggagcataagtagcagtgcacctctgtaacagctgttccagtattccaatttacagtacatctgccctctttgtaaatgtatttaagcctatttaatcttctctaatattaattagtacaaacatagtctaagaaaactgaactgtgggctagcaaatggaaatgtatgttatcatgcaagtttgcactcctttggatcaagacaaaataaatatcaagaaatttaataatttactgatccacattcattaatgttcaatgctgaaggctgttttaacatagaacattgataaaaagtgttattaatattccctatttcaaattagaaaattaaatataaaaatatagcttgaggcctttagttggtagacatacatttaaatagattgcataataataacattttgtacctaaatataaaattcaattaaaatcgggtttctacagctacagatcatttctaaagttaagcatactggaaaatacacaaatttcaatgttaaattttcacttatgggtatttcttggtataaaggaaatgaaggattttagaaaaatttgtttctctcaccttcagagttgaccatttcctgtccttaaaaaacagtgagatctaccttccagggcagagaagtttatatttttgttgcgtatattgttgcatatactgcatattgagacctcatatattgttcatggaaaaaaaaatgtttaactcaatcaattagtagcaagcaattttgaggttctccaaatgtccccctatgtgaagttgtttggtgtgagcacaaagagaagccactgtattgaactgtgtgattctatcgcagggagaattgcttgatggagcacaagactacatgtcaggcctagatgatatgacagactccgactcctgtctgtctcgcaaaaagatcaagaagacagagagtggcatgtatgcatgtgacttatgtgacaagacattccagaaaagcagttcccttctgcgacataaatacgaacacacaggtatgagtgactttgcctaactggttagagcttcccgtcctgctgtacatttcataatatttaatgagcacacttgtgcaacataagatgtaacatatgctgataccttcaacaaggaagaaataatgcttttgccgagctcagtaggacttttttgttgcctgtttattggatcattcatgtctttatgagtgtgcttgtcttaatatctttccagttattctgtaaaccaaatttagaaattatgtcaaagggacagtcagatggccagggcaatgaaatggcatgacacagccagttattgaaaataccttcaaattcttaagtttcaaagcttaagatgaacctatatatgtaaaaatctaataagaaattcagacagtaatacattagtttcatcatccaaaacaccaagaaagccataatttaggggtaattttgtttgccttttttttttaaattcgccacattttgaaagaactaaaggcattagtgtcataaaagaaaagtaatagatcagatgagctacttgaaaccacctatatttggaagattgaaataaaactttctaaattttaattagtatatttccaattcatgcattactaattaggaacaattacaaagagttgacaagaaaacagcctaattcttcactatgagtagagagatagtgggttaatttttgaaaagaaagatgaagtaccatatgtaatttaatattacttcccacaatccaagatctgcagctctatggttgagctccacttgtgtttcctccctggctccatccccacctccctgaacaataaggtagctgaacctcatccctacccctagcccatctccaattcttctccactggaaatttggcatgctctattagccctggatcgggggggaaaaagtgtaggatctcagtcaaaattttggcacgagggaacaaaaaaaataggggagtataggaaaacaactcattctaaaccaggaagtctagtatcaaacatttcaatatggaggaaaaaaaactagcactttggggggaaagctttttgggggaaaagcgatgatgaggcacaaaagaaaaagaaggaagacagaaaagggaatatgagccaggcgcagcagctcacgcctgtaatcccagcactttgaaagaccaaggcaggaagactgcttgagcccaagagtttgagaccagcctgcacaacatagtgagaccttgactctacaaaatattttttaaaaattagctggatgtggtagctcaagcctgtagtcccagctacttgggaggctgaggtaggaggatggcttgagcccaagaggtcgatgctgcagtgagccatgattgtgccactgcacctcagcctgagcaacagagtgagaccctatctcaaaaaaaaaaaaaaaaaaaaaaaagcgaagggaaggtgaatacttcctgtcatattttgactacctagatacaaggcactcttttctgtcactgaaaactgtccttgggaagtactcgtactcatcatcggctattattcctcactgggcacatgctggaggcagctcaagtgaccagcatcagcctgatagtgtggggagggtttttgtgaagcaacaaggttgataaataacagggttcttactccaaccaatacagttttctttttctttagctgtctgatattcattgttattattttaaaagtttaatgataccttaaagacaacccaatctaaatccaaacagcttttatacttgtgttatataattcaatgtttgaaacatcaaaattttcttttagtgtagatattttctttagtactaagtgctacttaagcatttacaaagtaaagatattttcatacctaaattttactttaattttaatattttaatcaaccttaaatatattttgtattccattattcagctacaataggcacatcactgaaggcatctttccctctctgattggttttattatatgaccatatgcaaactctatcatttactacacggtgagtgtacaacttttattttagtgagggctgtcatacacattgacatccagtcaatatatttacttcttataaattagagaattgtaaccttcataggtctgtagatagttgagaggcccaaaagttgacaaacacaaatatgcataatttatttgaaaaataaacttcaggcctgatgcggtggctcatgcctataatcccagcacttttggaggcagaggcaggtggatcacctgagagcgggagttcaagaccagcctgaccaacatggagaaaccccgtctctactaaaaatacaaaattagctgggtgtggtggtgcatgcctgtaatcccagctacttgggaggctaaggcaggagaatcacttgaacccgggaggcggaggttgcagtgagccaagataaggccactgcactccagcctggccgacagtgtgagactccatctcaaataaataaataaataaataaacaaacaaactttgttttttaaagtaaaaataaactattctgctccttcaagatgtgagagctgctgcctcgaaacattgcctagcaacaagatgctaatcattcaatggttgctctaaacttgtgattaattatcttcctgttggctttccaacttgtcaagtttccagcatgttaactttttggtcacttgaccaaacatctcatgacattactactgtcagtgtattaggttctattcaaatcaagttcttcatggattttctattgatgtgatgtatgtggaaatttagtccatgttcctatcccaattgaacctgtgggatagttcctatcccactagcctttcatttgtttacattaagcactagtaatattttgagaatgcactaagatgaaaattataagtgagaactgtcttgggactgactgattctaaggtcgggaaataaaattgaatcatcatttcattatgcattgattatgaatgtgtccttggtaaagtgtgtttgtgatgtctgtctacaattttacatatagaatcgtttaacttaagaaggaaattatgagctacttattcttgagacccagtgctttttttgcctcaatttatttcctaggcagataccaaagtcatcatgcttcatttttcttaccaatggcttattgcttgcttgcttttcctgggacctgggactgggacagaggagggaaacactatgtaaatgttgacttcaacagaattaattgtcacaaacaaggactgtgaaattaaaaactctgaaactcctgttaggcactgtcaagaactcatttgtattctaaaatttaaatctgacctttattgagtgctttctctgttgagacatcatggtaggtgcttttgaaacccaccttatttagaaaagtaatacaaatgtttctacttttgagtagataagtctaagttttaaataaatttaccagtcaatcttgtttctcagttatatggtaatttttttcataccacaaacctttcatttattattaagttcagttaccattctagctgtcaggtgaatcacaaatctagatattagagaaaatatttaccctaagaaagcttgattcactcagtatcaatttggatgttctgaatcttggtcatgtggaaatttaattctaggacatcttgatttgaatcaggtaaaccagcaaaacaagttaaaaagagatgaatgtccaagtcagttactatttaaattgaatttattaaatgcttaccactgaaacttctggagatcagtagactatttagtgtaaggtatatgtcaaaactctcacctgctcccagattctatcctttgcatggtatcataactgaacattttattttttcaggttgtcaattcataatgcaggattaatatatgcgtattataagcatactgtttattatcgaatgagttctctgaaaattgaatgtctataaccaaggcatatctctaagacagactgcagtttagtgggcatgcccgaagcattgctaacgggccttgaaacctataacagaggatgcttgctctctctggacactgctctgtgttttgttgctttggaaaagaaagccatatcataatgttcattcaaaattattcatacagtctcttccagaagttacctaagtagttgacctttttgtgctcctgagctaatgagacattagtatccaaaagaggttgtaggacagtttgcccatacacgccgtagcaactagagcatcaagaaaattttcatctataatttctcttctctctattcagatttattacttccatgtactctgctcctgctgcatgcgtcctacttagaacttgagaaattattgaacatgtattaatgaataagaataacatgatctaacattaactgactgcctactatgtgcaatccttgtactaaatgctttatataagttgtcttccttattctttatgcccagtccatgagttaggtccccaaatgatcttccttttacctactgatcctgagagaagttaacatgcctgagaatgcacagcctgtcataaatgatggatgtgaacccagataatcatattcatttaacactgcccctatggatgaattgctgcgactagaaacgtcttatcctttctcctgacagcatcctttcctttaaggtccaagtccacacaagtgagaccaaattcataacataatgacatgaagtttcccgggagacaaaacctcttgtctttttcccaaatacacgtctgcttcctcttaaattaccttcctaccacggtgtctttccaaatggaaaagcatgctatctttgcagactcttggcactccattgggattctctgttatccagtttacctcattcaaaacatcttttccaaaagttaaggaatggttcttgtgtggtttgaattatacttgctttcttcagagtatgagctaccttgaagtaggttattagaactgtctttatttcccatataactagtagtcaccaacaaatatctttctgatttccactcttccagttaaataacttctttctactctaatattataccttactacatttatcatcactaaatttctagtggacattccagttaaataaagaccattaatgaaatgacatatagcagtctacagcactttccgaatagtggcatgccctggaggcattcaataacattattaaagatatttaattactgattgagattttatatcaccatataactgaatacctaaagtgtatagaatgggtccctaaacttataacatgacacttagcaaacgaaaatgggattggatctactttgttgggttttaatttaatttgctgaaatgcaagtttgtattaggaaataaagcatacaacttcatatatgttacagtgatccatggcactctacatgacacatttctgactttaactctggagcatcaggctgataatttttttttatcagttctattttggaaataaactttcaagtatggcagctatggaaggtgttgaaggcattccagtgctatttgtggcctggaatcaaccagatgtgtttaggcttggcactggctttaagttccaaacactggttagaaactgcctggaatgccaaaggaaatacagcattccctagctgaagagtattttaacactcaacaagtggctgacatcttatggaaaactttagagggaaaacactatttggaatcagttcagcctccatgatatacaccctcctaatttgtattttctaatggtttcttctctgatttttattcttagactcctatgactgataagacagtcttgacatcctctttcctctgtttcttccactccctcctaacttggcagtttgctcccatttaagacctaagatcccctttcaaagcaactatctcatgatataacaagcagaggatatacatgccaatgccagcgatgatgccatctttatcacttttgtacaagtctttgttttaaaaatgtaaggaagagaattacctgatgaaaacatgtgctagatcactagaaatgtcttgttgaatagaacatttttccaagttttaaaatgagacaattagcaatggaaagcttcctgtctgagaattttcctccagcagctttctaagttcttcttgtttattaactacattgcatcagcaagcattagaaaaccaaattgtgggatggaaatgcatcttcctaactctccatcgattagaccggggtgtgttgatctttcaggcataagtacacacgcttatgcctgagtctggactcgcgtacagaattagtggaaagagacttcatgcaaagacactaatcaccctgtcatcttgttctttctcccaggaaaaagaccacatcagtgtcagatttgtaagaaagcgtttaaacacaagcaccaccttatcgagcactcaaggcttcactcgggcgagaagccctatcagtgtgataaatgtggcaagcgcttctcacactcgggctcgtactcgcagcacatgaatcacaggtattcctactgcaagcgggaggcggaggagcgggaagcggcggagcgcgaggcgcgcgagaaagggcacttggaacccaccgagctgctgatgaaccgggcttacttgcagagcattacccctcaggggtactctgactcggaggagagggagagtatgccgagggatggcgagagcgagaaggagcacgagaaagaaggcgaggatggctacgggaagctgggcagacaggatggcgacgaggagttcgaggaggaagaggaagaaagtgaaaataaaagtatggatacggatcccgaaacgatacgagatgaagaagagactggagatcactccatggacgatagttcggaggatgggaaaatggaaaccaaatcagaccacgaggaagacaatatggaagatggcatgtaataaactactgcattttaagcttcctatttttttttccagtagtattgttacctgcttgaaaacactgctgtgttaagctgttcatgcacgtgcctgacgcttccaggaagctgtagagagggacagaaggggcggttcagccaagacagatgtagacggagttggagctgggtattgttaaaaactgcattatgcaaaaattttgtacagtgttaaggcctaaaaactgtgtggttcagagactaattcctgtgtttaatagcatttatactttaagcacaactagaaaattgtaagaattgcactctacttatgtatcactacaaactttaaaaaactatgtctaatttatattaatacattttaaaaaggtgcccgcactaccatacatcagtatttttattattattattgttattcctttttaatttaatgtgctcgcactacaatgcatcagtattatgattcctctgtactttcctttcgctattcatcaatttcccattttttttttcagcttaagtaaccacacaattttaggcctcaatttttttttttttctgtgaaggaacttgaagtgatgcatgtgtgaatttaagataccgaagtcttaaagtgacctggacgtgaaggaaaaagtaagatgagaaataaagaaagcctttgtaaggtggttttaaaagccttatatgcaaaccttttaatctgtgtttctgcaagtgccatccttgtacagtgttaagagggtaacatgggttacctttgcaccagcttcagtgttaagctcaccctgttctttgaagcacccatgtcagtattagaagaataggcagcagttccttagtttacatatgtttgtgcaattattttctgtacttttttgttcattaattttgtcagtattacaccaaactgtttttgcaacaaaaaaattttttttgcattcatttaattttaggtcaaataacattttatttatgtggctcattttatatttcctaattttatttatttcatactgtagtgtacagtattatagttcttcaatatatagatatattttagtaaaaaaggaacatgacgttgatcatttgggcaaattttacgtaaagagaagagcatttattgtgttttggaacattaattgtgagatgggatttttcaattttattattttatttttgtttttttccaattactggaaattccaaatttgggaacttttgatacgatcttgtgaaaacactgtattttcgactgaaaattccactttcttcatcttgttttttagctaaaaagagggactgttaaatacaatgtatgataccatgacaaaaatctttcctgaattgtctttgtaaaagtattattgaattttcaatttgtaatttcttttgaaaatgaccatgctcgaataaaaatgtagccaaactaagaatgtagttaatgagttctgtacttttagagagttttccttcaatgaccattaacatgtaacatgctttatgcttataataatgctaattatgtttttttcatataattttagtttagcaataattttgactggtaccaataactgttttttaaaattccatacctatgtacagcaattttacagcttttctcaactgatcctgattccagattgtgtatttttatgtgaggttatattattcaaatttagtctatttactttacagacatttctacttttgcattacgagtatttagagattatgtgttaaaaattcacttctctgtccaaggggtctttgtgatttattcaaaaaaaagtctaatttcaaaaagacagctattattcagtgttatttataatatgtaaccttttttaaaggattgggatagtttatctcactttttgaaatgcagacagtagtttaccgtttatctgaaactagaaggcgtgggtgggagaggaaaagctaaaagcaaatgctaacaaaaataaccgtgattttctaagacagtttttcagtttttacaagatgaccctaatattcagaatatgaatgtattcgtaggttttacataatgacttttatcaagaaactagattctgcttcttaaatctaattgccaagtgaagaataacagaaaaaacagattaccttatcaaatttacagctcttgaatatacagaactataatatagtagctgtccatgtattttttctactttagaatcaaagaagaaaagcatcattttgctattaaatttgctaaaattttgagtatgatatttccagttggcaagaacaacatatttatatttattccttagccataataccactttcctaaatttcacaaaagtcattctttgcaacttgaaactcaatagaaagtgtgtatgtgtgtgtgtgtatatatatatatatatacacacacacacatacacagaaaggatgtaatgaagatacagtaatagttgagcagacctttttagaaaaacatgtttttagctctatcttcaaactttctggcagagggggtggggggggcagggggaggagtggcatcaaaatgctatgcctcctgttatccacagcctagagtttttatatttggaaagtttagaaaattctatcctcgtttctccttctttgaatggcacaaataaatacactacataaatttttctggtttgaaaggctctaggcgataactttattaattcaacctgaaaatatcaagccattaaattttgtccgggtagaataaatccctgtggcctcttttaaagcaatgtaggtctctgttgcccatggggcatatctgtgtcccaatccacaagagataggaccaacaaacaatgaatgtgcaacctaactctttctccttggaaagaagaaagtgtgcacgaagtagaggagggtgggcagaccctgccttgcccctcctgttacccccttctctgtcatttgttcctaactccatttcataggcaggctcagaatacctgagtctgaaaatatcaggataacacttgtgaattgtgacaatcactacaatgtcccatatctgaggagttttttttaatgctatttatccgctggacacgattgcacattagggctgcataatcctctaactctagggaaaaataaaaacttttgatttgtcttaagattcttctccaaggtcgcaaacaagaaattcccctccacaaccaagagatgtgcattttagtaacatcagatgtgttcttctgttttatcaactacttactcttcccacacgcttagttctaaatctaacctttcccccctcgaatagggggcaggggaggatgaggaaacactggaacaactgaacacccctgcccattttctccaagagccttttgtattctagcatatctgtgcaatcttttcttttttcttcacatgacactgtaagcttaggcctgaaataactgggaagagagatgcgtatcagaatttctccgcaagagctaaacaaaacatacatcttccttagcatgaattggactgggggcggagtgggagggcttggaggaaaggggaaagaagggactatatttgaataaatatgaataaatgtattagatacttttcacaatcagataacttttaaaaaggtcattttttatctttctaataatgtaagccttaataaaagcaaatcttagtcacaaatttgaggagactgcccaataataagtttacatgtatttgaactgaaaaattgttaaccatgcttttgctccaagatgtgtgaggccattcaggggctgtagggccctggatatacacacaaacaagtgtgtgtatatctggagccccacacattgtaataaacacagctgcatttatttgactatgtgatcccatgtacatgtaaaaacattcaaacaaacacactcagcggatttatttattgtgcaatggggcaattattcaaataaacatgctcaatgcaattatttgaatctcacattgcatgttcatcaatcatagcactaaaaaaagagggggaaaaaacaccaaagaattcacatggggaaaaaatatatatatgaaaaccaccttattatagattttatagggcagctgaggttatggctcccttcttaactgtaactcaactattctgtattcaatgacatttgtttctaatgattaattggttcactcacttgatcatataatagcaaactttataaacctgtattgtgtagagatgtgaaatctctatatttcaagagcagaagagttctttctagacaccttacatcaagggacactggtccaattattatcgcttatataagcactcctataaattctgaaaaattttatacatgcaacaaaacattcctacatttgaagacattaagaaaaatcacaggtgactcatctgatcattctatatattaataaatattatgacatatatgtgaacacatcacaaatcatattggtgtaccaagaggcaatttatgcctctcttaagtatgtactgacataacctaatatactaaaatgggaaggggcttttagtcactgaaatatgcatcgtgtaacaaagatgaagaaaatacatggcttgtgcccatcataaaaaaagattcagactgaaggcttagctttggttttttcaattaaattgttaaactgtgcacagtgatttttttttagaacttgagacatttgtgatgttggctgtttaaatctttgttaccttcgctgtgaattgaaattgtacatatttagtaaatcatgcagacaaaacaaactttttagacaatatttttattggagagttttcttttcctgtatccatgttaaaaaaaaaaaagacctcctttcccaaaataaaaatgtcaatactaaatttaaagaagtataaaggaatgattgcttcctttagagcaaaatatttaaataaacatggagataattggcaacatgttctttttgggctagtaggctgtgtccaattttttgggtctgatgtttcagagggcctctgtttcagggttgaagatgatatattaatctcggaattaaacaaatgctattaaataacagaaataaatccttcagtcttcatttgtatctgaaatgtggaattagtcagagaaatggcaccgagataatatgatgctgaatatgccacaagctaaaactttctctattaaacgagtcgcctactacctataatctagcatgacatgttaaaatgctccaaaatactgaaaatagaaaatgaacactactgttccgatttggtcttgagattaatatgacaaagattctaataattttagtcaaagaaaatgatgagtaaaaaatacatgaagattaaagtgatgacaaatgatcttttaagtattctaattggtctttctcattcatagctttgattccacagaaattgcaaatcctgattatcctgatttgtaagtgcacccagtcagctttctctctttcactccatggaatatgcctgttagatttggaacgaaggataagcccccaaaatgttaaaaatagactactgccctggcaggaaatttagcattggcaagcacagaactcagaaggaattgatctaacataaggaaacattcagagaaagatttgtgcattatgatcctgttctgaccattttcagagcagtcaaagggaagtaaagtgtatgtgggtgtgcgcatgtgtgcgtgtgtgcaggtttgctaagtttgtgtgtgtacatttgaatagctgtgtttcttaaaaaaaatactcaagacatggaaaaagtctgaaaagaagtgcttttcagacattttacattttgttatcttacatcgaagacatttaaaatgttgatactggaaaaataaaaggttccgaagacagcctcaccaaaaaaaaactatataatttataagatatgccaacaacaaaattgagaaaatattaaattatctttactcattttatgggaaacttagattttagttaatgacctttccttaaacatgaaaaaatcacgtttattcattcctaaaacggtattattatagggggaagaagtacggttatacccattctagttttgtttaagaaaagagaaatacagccttcaaattacttgaaaaaaatgtggatgaataaaagaatgtaaatttagaaaggaaactcaagaacaaccctatgctcaccgaaaacattacggtatatttagtgaccacaagcaacccagaccttggtttttacatctcttctgaaagacaccacttccaacacaaacaacatttcccaaccctgtagtgcagaccaggattggtgcagacataaagggagaacaccaactattgaataaccctcaaccacttcctgagtcctgaaacattctgtggaggtctaccacttcattattgaacatgcttagaaagtgtgagctcataggtttccggttgaaggtacatctaagcaagaggggaaaaagagaagtactaaccaccctgcccaacttgctttaacccttaacacactagtactggagagaaaagtaggcttagaaataatcagccaaacacccaagtagagccttttctttcccttttctgcagagtaaagtgcttttgtattatcaaagacaattccatgacaagggaagtttcactcactttaaaataaatgtggatggaaccatccacaaaatcttctgagaacaagagttctaaccacaagagctgcttaatatgtacttccttgaccttttaaatgaaaatcagaataatgatttgtacaaaaactttcccaggaattgtcatggcccctcatgtcagataccttcatttacgaactggcctgtgttaactcctttatggcttgaccaaattataacacacttcgcgtctaccttaaaattgtcaaaactcatgttctcattcttcagtaaaattttcatgtgagtttagtaagaagaaaatctttatgtttgtaacttttggaaaaataaaagcagttaattattaatctactacctgcattttatagatgaggaaactgaagtctacagatccttgagaccacataggctgtttgtttccgtcccacaatggtctctagaaaacagttaagcatagattgtcagaatctcagtcttctgcatcattgtttagtgttctttccaacatgtcacagtaaaactcttcttcaaatggctatggaaacattagaaggaatgagttagtttctctacttcctacaagaagttcgttctggtctacaagaactcttccatgcaagagtgcaatgaaaataatctactttagaaaccctttgttaactctaagatgtcacatcatcatctcaggactattaatcgcttgtgggctagagtctgttttaactaagagccagagacatgctcagttttgaaaaatgctctttaaaaattactaactgctgttgctacatgttacccactcattatgttgaagactcttgacagtgctcatggccattggagagtggtggctccatccaacctctctacccacagttttcagcctgagcccactttatgagtcctcagtaccattctttctctgctcatgacctttctgaaccctgaatgcactgaatgatcctgacgtggtctgaggaggaaacaaggcagcaggtgtacacagtaagaggagcagtaggaattcataaatctgcaatgggaaaattggaacagacagaaacagaccaaaaggttagagtgtgaaggaatcttagatgctctctcatccaaagccctggcttttcaaattctggtgttctgaggaaataaaaccctagatcactccatagttactggcagagctgggaccagaagccagatctccagttatggcatagatgtttttattgcttctattgatacttctactacttgtatgatgctttcattttattatatttagtgggcctacaaataatactaataaataacaatagttgcaacatcaataatagttcaatgtactgagtacctagcgtgtgtaaggcacaatactaggtactatgggctacccaaaaatgaacatggcaggattactgacctcaggcttcttacaatctggcagaggcagacatacacaaataaggataataccaagttccaagtgccttaggaagggactaatgtggaagtctcaaccatgttcccttctgtaccctgctgcttcctctatttaaacacaaaatgacacctttctctcaataatatgtatattagtgagtgatactatatgagaagcactttgcatgtcctggggatacagcggtgaatagacaatatcctcaccttcagggatgtacattctagtggggaaagtagaaaacagaaccattttatggatcacttcagatagtgctgttttgttgcaggtaaaagaaggtgatgtgattgtaaatgagatggaagtagcggacagtcagctgggggtgggtgcagatccacaaaagcccttgagggcagtggtgattgacttgagcctgaaggttgtaaagaggtcagccatgggaagattgtgcagtgagagttccagaagaagaaacagcaggtgcaaatacatgaggctggaatgagtttggcttttttggagaataaaaagaaggccagcctaacaaagcatggtagacaagggagaagggtggaagatgatgtcagagaagtagagaaaacagttcccaggtcatgggaagggtttatagtgtgatctagtacttaggaccaactccacggaattcagaggatctggaggaatagaacctcttaggtcctttgatccaatgtcatgtttccataggcgagaaaacagtttataaatctatgaggttcgctccgtgggagcccgaggcctcctgagttattcttctcagtgacttgtccagaaatgagcacagcaacctgtttgtggcctattcataattacctcccctataaaaagaacagtaacatgacattctatgcccttctgattttagaatgagaggaatctcatttttcagactcacgcaagaccacctgccttgtgtctggtcacaggcagatccgtcagcctggaaaacagaaattgtttggctcaaagaaagtttgtattttggaaacgaaagcactagatacagcaaacaggacgccacggtggtacgttaccctggaagcaccttccccaatcaacatgtcccagcactatccccgcagttgccagtttgctccaaacagctgtgctagaatcaggcatgagcaagagcctcggccatttccccttcctctgaactcctaaaaaatacaaaaactcacagagctgagagagaagccaataagaagtaaggaacatgcagcaggtggtaccatctgtgcccggctaattccagccaaaacaatctgctccctagagttcccagttgtggagaagggaagagaatctgacagcggcggagccaggggagggggtgtgggagggcaagtgccgaggctattattctaacactcagccagttggaggaagtagattattgatgccagtgtactattatctctctccttttctctttacaaccacggtgggagattcctccaaagtctcgctaagctggcaagtctcagaacccacacctgtgagacagacacgcaggcatcactgtgagtctgtcaccactgaggtgggagggacaaacattctccagcaagactgggaagcacagcccaccccaaaacgaaaaaaaacaagagggaggaagattatgtttattttattttattttcctagcaactgaattcccttccacgctcgtgttcactctttgaaaattatccactgtttaaaatgggcttatagtccacatgctttctccccaggttggcattttctgaaataaaattctttcgcttgatggacttctttgtgagggacaaatctcctcccgtagtgcacttaaaatcatgaaatgaatcaatgcgagcaattcaaagatagatcaaattgtctgtagcaataacttttccttaaaagagtaatagatagacagggcccatccttttcccagattgaggagacagccatgattacagggtcacagacagacctatgtactgaaaaagaaaatgttacccaatgcaaaatttccaccagcatcttgaggttaaagtgctatctccatatagtcatctgtcaaatgcaaatacctgggaggggtgatatttgcctattatcacctattatcatcttcccttggcttaatttatcaattctatagctgagagttgaaccctgagggagtggagcataagcaagtttgcttttatcagatgaagagaaaggaaggtctgaatttcagatactgtcccagaaaatggtgcactcagaggtccctgaaaaaataaagagatagaaacattcaggaatgaaagacaggtagaggtggagggaaaaatgggaaagaaggggggatggtgatcttaaccctctgtttggactgacttctgtgctccaccaaaatatatgttgaagttctaacccctgatatctgtgacatgacttatctggaaatagggtttttgaagatgtaatcaagttaatatgaggtcattagggtgggccctaatccaatatgacggatgtccttatgagagggaaatttggacacggatatgcacagggagatggccatgtgaagacagaggcagaaattagagtgattcatctgcacaccaaagaaggccaaggattgccagctgttaccagaagctaggagtgaaaaacgggacacattcttcctcaggtcccctggaagaaactgtcccccggaagaaactaacaccttgattttggacttctggcttccggaactgtgagaaaggcttggttgtttccagccagcccatttgtggggctctgttacagcaaccctaggaaactcacacactcccaaaacaacccacagccaggccctttagcattcactctctggctaggtcaaaaactcaagatcaatttctgatctcatcattctcttggtgctggggctttaacagatagaacaaatatcagcaggaatatcccttttggttttgagatgcatatcatcaggaaaaagacacactgcctgctcttttccccaaatgtcctctataaggtaatccttttaattaggataattaaattcttattacaaagggcaccaaagtgcaagcattatcgtctgatttcctgtaaagagtattttcctatctcctgttccacatggtgtccatgaacagaagaagcacccagtgagtcagacattatggttacaggtttgtggctcatgtcagtgctgagaagagggaaatgagaaaggaaaacatgaattgggaaaccatgtcagagggcaggccaagataatggaagaaccagaaggcaaaggaaaagggtgttgtgtgggaaccaaaacgttgcttcaggtaggaaatgtcagagaaaaatagaataacatttaaaattaaggggcagggaagatctaagcagatttttttttttaagtttgaatttgatcatagaaactagtgggatgtacccattcctctagattcattacttcagtatgatcttcaactttttcagctccaggtttctggtgaaattgactaataattcccataatatacttaggtcaccatgatttgggaagggttttgggagttccatgggtaaggccagaggggagtaaggcaagtgatgtgcgttttgaaatattgctctggcagccaggtgcttaaaggtgggaaacggtgagaccaggtgctaggacgagttctcatgtgtgcccatgagctcttttctgccccattagtccatgcctgccactgcccgcccacccatgagtggacaacagaaaacacaggtaagaaagcgaggggatggttcactaaacatctctcatctctttgctagaaaaacaaacccaaccctatgtcttcttcacagagggccggcatgccatcctttatattttccttctagaagatagtataccgtcttgaaagcctagtttaaattgctttttctctaagctttgtggtattttttatatgccattagtcagttattacatgttactagcaataacagtcccacctaatgtatttaatttgttttgaaactcatagcacatctttacacatagaagaggcagcttttaattccattgataacttcctccttaaaagtactcttttaaattcctaaccacattcttcttggttttccttctacccactgaccaagatctactttttccactcagcccttaaatggtagcatttgccagggcccctctggggatctctgctctcctcattccaatcactgactttttcaacacccacagcttcagcttcaactcctacctatatgccaagactcaaaaatgcaaaaatgcaaatgcattgccccggtcagacttcctcctggccactagacctgcacatccaaatgaatactgagcctcgctgcccgatggtctcataggcacctcaagcctgacctttacaaaatggacatggcagtacccttctcccttccccctacaaaatctggtgaatgtcacccaccaggtcactcaggtgaaagtcatgagagtcatcctgctggatctctatgtgagttgccgagttttgtacatcaggctccctattagctcttcttcctgtctttcttcctccatcaccattgtcacttccttatttcaggcaagcatcacatcccaggaattgcctaatagcctcttaactcgccacactggctctgatctcacccaaggtgctgcttggctctaatgtggcagggaatggagctaacactgatagttggtggagggctagcagacaaaagcatgccatcttttaggtcctttaaagatatttcttgatattctttatacaggcattactttaacactattccatcacagtcttaacaactgttatgtttatgtatttcctttaaaaagattaaaaataatgtgctcaagagaaacaactggtctcctctcacccccttgacacccttcactatacttttggtctcatcaccttctaattcattccacatttttacgttagcccaaagtgctcttttggtactttttttaccttcatgtctatcttctcctacagaaacctcctaaacctgtaagatccttaaagtcagggaatgtgttgtctttgtagtcccacttctgtgacttactgccaccaagtagatattcaatgaatgttcactgaattaattaacgagtacaaatttgatcatgctgaagccctacatcaaaatcactgtgtggttctccatagcatccaaaatatagttcatattccttagtgtggccttcaggagttgacccctccttgctttcctttccatcgtctctcactgttcttccaattgcatctgcctgggcataccaccctctattttctttctttctttctttctttctttctttctttctttctttctttctttctttctttctttctttttttctttctctttctttctttcttctttctttcttctttttctttctttctttctttcttctctttctttcttttctttctttctctctctctcttctctctctctcctctctctctctcttt

SEQ ID NO: 24792 - DNA, 9061 bp, Homo Sapiens
atgaatggtcaccgttttacgttcagaactcgttcgcttctacctttacaaaagggacaacacagatgcattactaagctcttggctcataacgatccctggggtatattcagagccccttcctcgcggcgttcatatagtgtctcaggggtctgtcagccagcaatccccaattcctcattacatattcctcacaatgcatgctggctaaaatggaaattgtgttcagaaatagccctgccctaccatcatatactaggagaaaggaggaaattatgctctattagaaagtttgaacactggcgggaagatgtccgcagctgttgccaggccagggttctcccgagagggaggacgctgggactgtggcttgccctgatcggccgagaagagtttgccatgaatcttctgcgtcggagtgggaaacggcggcgttcagaatcaggctcagattcgttctcgggaagcggcggtgacagcagtgccagcccccagttcctctccgggtccgtgctgagcccgccgcccggccttggtcgctgcctgaaggccgcagctgcaggagaatgcaagcctacagttcctgactacgaaatagacaagctactattggcaaactggggacttcctaaagcagttctggaaaaataccacagttttggtgtaaaaaagatgtttgaatggcaggcagagtgccttttgcttggacaagtcctggaaggaaagaatttagtttattcagctcctacaagtgctgggaagactcttgtggcagaattacttattttgaagcgggttttggaaatgcggaagaaagctttgtttattcttccctttgtttctgtggctaaagagaagaaatactacctccagagtctgtttcaggaagtaggaataaaagtagacggttatatgggcagcacctctccatcaaggcatttctcttcattggatattgcagtctgcacaattgagagagccaatggtctgatcaatcgcctcatagaggaaaataagatggatctgttaggaatggtggttgtggatgaattacatatgctgggagactctcaccgagggtatctgctggaacttttgctgaccaagatttgctatattactcggaaatcagcatcttgtcaggcagatctagccagttctctgtctaatgctgtgcaaatcgttggcatgagtgctacccttcctaatttggagcttgtggcttcctggttgaatgctgaactctaccataccgactttcgccctgtaccgcttttggagtcagtaaaagttggaaattccatatatgactcttcaatgaaacttgtgagggaatttgagcccatgctacaagtgaagggagatgaggaccatgttgttagtttatgttatgagacgatttgtgataaccattcagtattacttttttgtccatcaaagaaatggtgtgagaagctggcagatatcattgctcgagagttttataatctacatcatcaagctgagggtgagggattggtgaaaccctctgaatgcccaccagtaattctggaacaaaaagaactcctggaagtgatggatcagttaagacgtttgccttcaggactggactctgtattacagaaaactgtaccatggggagtagcatttcatcatgcaggtcttacttttgaggagagggatatcattgaaggagcctttcgtcaaggtctcattcgggtcttggcggcaacttctactctttcttctggggtgaatttacctgcacgtcgtgtgattattcgaacccctatttttggtggtcgacctctagatattcttacttataagcagatggttggccgtgctggcaggaaaggagtggacacagtagggagtatcttaatttgtaagaactctgagaaatcaaaaggcatagctctccttcagggttctctaaagcctgttcgcagctgtctgcaaagacgagaaggagaagaagtaactggcagcatgatacgagctattctggagataatagttggtggagtggcaagtacatcacaagatatgcatacttatgctgcctgcacatttttggctgcaagtatgaaagaagggaagcaaggaattcagagaaatcaagagtctgttcagcttggagcgattgaggcctgtgtgatgtggctactagaaaatgaattcatccagagtacagaagccagtgatggaacagaaggaaaggtgtatcatccaacacatcttggttcggccactctttcttcttcactttctccagctgatactttagatatttttgctgacctgcaaagagcaatgaagggctttgttttagagaatgatcttcatattctctatctggttacacctatgtttgaggattggactactattgattggtatcgatttttctgtttatgggagaagttgccaacttcaatgaaaagggtggcagagctagtgggagttgaagaggggttcttggcccgttgtgtgaaaggaaaagtagtagccagaactgagagacagcatcgacaaatggccatccataaaaggtttttcaccagtcttgtgctattagatttaatcagtgaagttcccttaagggaaataaatcagaaatatggatgcaatcgtgggcagattcaatctttgcaacagtcagctgctgtttatgcagggatgattacagtattttccaaccgtctgggctggcacaacatggaactactactttcccaatttcagaagcgtcttacgtttggcatccagagggagctgtgtgacctggttcgggtatccttactaaatgctcagagagccagggttctctatgcttctggctttcatactgtggcagaccttgctagagcaaatattgtggaggtggaggtgattctgaaaaatgctgtgcctttcaaaagtgcccggaaggcagtggatgaggaagaggaagcagttgaagaacgtcgcaatatgcgaactatctgggtgactggcagaaaaggtttaactgaaagggaagcagcagcccttatagtggaagaagccagaatgattctgcagcaggacttagttgaaatgggagtgcaatggaatccatgtgccctgttacattctagtacatgctcattgactcatagtgagtccgaagtaaaggaacacacatttatatcccaaactaagagttcttataaaaaattaacatcaaagaacaaaagtaacacaatatttagtgattcttatattaagcattcaccaaatatagtgcaagacttaaataaaagtagagagcatacaagttcctttaattgtaatttccagaatgggaatcaagaacatcagacatgttccattttcagagcaagaaaacgggcctctttagatataaataaagagaagccaggagcctctcagaatgaggggaaaacaagtgataagaaagttgttcagactttttcacagaaaacaaaaaaggcacctttgaatttcaattcagaaaagatgagcagaagttttcgatcttggaaacgtagaaagcatctaaagcgatctagggacagcagccccctgaaagactctggagcgtgtagaatccatttacaaggacagactctgtctaatcctagtctttgtgaagacccgtttaccttagatgagaagaaaacggaatttagaaattcagggccatttgctaaaaatgtatctttgagtggtaaggaaaaagataataaaacatcattcccattacaaataaagcaaaattgttcatggaacataacactaactaatgataattttgtggagcatattgtcacaggatctcagagtaaaaatgtgacttgtcaggccactagtgtggttagtgaaaagggcagaggagtagctgttgaggcagaaaaaataaatgaagtgctgatacaaaatggttcaaaaaaccagaatgtttatatgaaacaccatgacatccatccaattaaccagtacctgcgaaagcaatctcatgaacagacaagcactattaccaaacagaaaaatataatagagagacaaatgccctgtgaagcagtcagtagttacataaatagagactcaaatgttactatcaattgtgaaaggataaagcttaatacagaggaaaataaaccaagtcattttcaggcattaggagatgatataagcagaactgtgatacccagtgaagtacttccatcagctggagcatttagcaaatcagaaggccagcatgagaattttctaaatatttctagactacaagaaaaaacaggtacttatacaacaaacaaaactaaaaataatcatgtttctgacttaggtttagtcctctgtgattttgaagatagtttctatctggatactcagtcagagaaaataatacaacagatggcaactgaaaatgccaaactaggagcaaaggacaccaacctggcagcagggataatgcagaagagcttagtccaacagaactcaatgaactcttttcagaaggagtgtcacattccttttcctgctgaacagcaccctctaggagcgactaagatagatcatttggaccttaagactgtaggtactatgaaacaaagcagtgattcacatggggttgatatcctgactccagaaagcccgattttccattctccaatactattggaggaaaatggtctttttttaaaaaagaatgaagtttctgttactgattcacaattaaatagttttcttcaaggttatcaaacacaagaaactgtgaaaccagttatacttctgattcctcaaaagagaactcccactggtgtagaaggagaatgtcttccagttcctgaaacaagtttgaatatgagtgatagtttactatttgatagcttcagtgatgactatctagtaaaagaacaattacctgatatgcaaatgaaagaaccccttccttcagaagtaacatcaaaccattttagtgattctctgtgtctacaagaagacctaattaaaaaatcaaatgtaaatgagaatcaagatacccaccagcagttgacttgttccaatgatgaatctattatattttcagaaatggattctgttcagatggttgaagctttggacaatgtggatatatttcctgtccaagagaagaatcatactgtagtatctcctagagcattagaactaagtgatccagtacttgatgagcaccaccaaggtgatcaagatggaggagatcaagatgaaagggctgaaaaatcaaaattaactgggaccaggcaaaatcattcattcatatggtcaggggcatcatttgatctaagtccaggactgcaaaggattttagataaagtatccagtcctctagaaaatgaaaagctaaaatcaatgactataaacttttccagtttgaatagaaaaaatacagagttaaatgaagaacaagaagttatttcaaacttggagacaaaacaagtgcagggaatttcattttcttctaataatgaagtaaaaagcaagattgagatgctagaaaacaatgccaatcatgatgaaacctcatccctcttacctcgtaaagaaagtaatatagttgatgataatggtctcattcctcctacacccattccaacatctgcttctaagctgacatttccagggattcttgaaacacctgtaaacccttggaaaactaataatgttttacaacctggtgaaagttatttatttggctcaccttcagatattaaaaaccacgatttaagtccagggagtagaaatgggttcaaagacaacagccctattagtgacacaagcttttcacttcagttatcacaggatggattacagttaactccagcctcaagcagttcagaaagtttgtccataattgatgtagcaagtgaccaaaatcttttccaaacattcattaaggagtggcggtgcaaaaagcgattttccatctcactggcttgtgaaaagattagaagtttgacatcttctaaaactgctactattggcagtaggtttaagcaagctagctcacctcaggaaattcctattagagatgatggatttcccattaaaggttgtgatgacaccttggtggttggactggcagtatgctggggtggaagggatgcctattatttttcactgcagaaggaacaaaagcattctgaaattagtgccagtttggttccaccttctttagatccaagcctgactttgaaagacaggatgtggtaccttcaatcttgcttgcgaaaggaatctgataaagaatgttctgttgtcatctatgacttcatccagagctataaaattcttcttctttcttgtggcatctccttggagcaaagttatgaagatcctaaggtggcatgctggttactagatccagattctcaggagccgactcttcatagcatagttaccagttttcttcctcatgagcttccactcctagaagggatggagaccagccaagggattcaaagcctggggctaaatgctggcagtgagcattctgggcgatacagagcatctgtggagtccattctcatcttcaactctatgaatcagctcaactctttgttgcagaaggaaaaccttcaagatgttttccgtaaggtggaaatgccctctcagtactgcttggccttgctagaactaaatggaattggctttagtactgcagaatgtgaaagtcagaaacatataatgcaagccaagctggatgcaattgagacccaggcctatcaactagctggccacagtttttctttcaccagttcagatgacatcgctgaggttttatttttggaattgaagttgcccccaaatagagagatgaaaaaccaaggcagcaagaaaactctgggttctaccagaagagggattgacaatggacgcaagctaaggctgggaagacagttcagcactagtaaggacgttttaaataaattaaaggcattacatcctttaccaggcttgatattagaatggagaagaatcactaatgctattaccaaagtggtctttccccttcagcgggaaaagtgtcttaatccttttcttggaatggaaagaatctatcctgtatcacagtcgcacactgctacaggacgaataacctttacagaaccaaatattcagaatgtgccaagagattttgaaatcaaaatgccaacactagtaggagaaagcccaccttctcaagctgtaggcaaaggcctacttcccatgggcagaggaaaatataagaagggtttcagcgtgaatcctagatgccaggcacagatggaggagagagctgcagacagaggaatgccattttcaattagcatgcgacatgcctttgtgcctttcccaggtggttcaatactggctgctgactactctcagcttgaactgaggatcttggctcatttatcccatgatcgtcgtctcattcaagtgttaaacactggagctgatgttttcaggagcattgcagcagagtggaagatgattgagccagagtctgttggggatgatctgaggcagcaggcaaaacagatttgctatgggatcatttatggaatgggagctaaatctttgggagagcagatgggcattaaagaaaatgatgctgcatgctatattgactccttcaaatccagatacacagggattaatcaattcatgacagagacagtgaagaattgtaaaagagacggatttgttcagaccattttgggaaggcgtagatatttgccaggaatcaaagacaacaacccttatcgtaaagctcacgctgagcgtcaagctatcaacacaatagtccaaggatcagcagctgatattgtcaaaatagccacagttaacattcagaagcaattagagaccttccactcaaccttcaaatcccatggtcatcgagagggtatgctccaaagtgaccgaacaggattgtcacgaaagagaaaactgcaagggatgttctgcccaatcagaggaggcttcttcatccttcaactccatgatgaactcctatatgaagtggtagaagaagatgttgttcaggtagctcagattgtcaagaatgaaatggaaagtgctgtaaaactgtctgtgaaattgaaagtgaaagtgaaaataggcgccagctggggagagctaaaggactttgatgtgtaactgtgctgttgatgaagtcctcccagggaagcctgtgcagatgcagtcacctggaaagaacagagattaccctttcacctacctcagcaaaacaaactttcaagtcttgatagacttagcctagtaattttatagtgagagtttcaaactatatatcagtgtctatagcatcaaaaacttctgggggcgtgggggaagtagaataccaagtataatagttacattcactttcaaagagcatctatgaatttgccttttgtaacttactgtggctttaaacatattcagaacagatgcttgaaatatgcacttagcactttggttccacatctgtctgggtaaaccatgaagaaaatgaagctgctgcctcaatcgacccagacagcagccataggcagataaagatttggtttcaccctggtggtggtaggcatcgtgtgtgactttttttcctctaatatcaattttacagtacggaaatagtattttaaaatagtattggctaataaattatgaattctataaagtagtaagacttggtatggttggagtgtaggaatgaatattcatgaaatgtttcttattgcttttccttccctaattcatacaatgaatgtatttggaatacttacatattataaaataaactatacctcttcaagaggtatcctgttctgtaagatcagatgtttttattgcaggtcaatataatactgccagagacagaaaatacccccttatcagtcccttagtgcctctttctgtttgtggcatggtgagaaaacccatgctgaaaagattgtactttgtgatcccaatcagagggatggagctaatctttttgctgttgaaataaaatgaatttatgagaaaaaaaaaaaaaaaa

SEQ ID NO: 24793 - DNA, 2206 bp, Homo Sapiens
  misc_feature (45)..(45): n is a, c, g, or t
  misc_feature (100)..(100): n is a, c, g, or t
cccttttcctccccactccttcccaccagcgccacagcaacatcntcagagtctgagcgaactgcgcccagtgtcgggcacggagcctcccaccgccagnaacctgcggccccggagaaggcagcgagcgcagtgacagcgcctcaccgccaccagctcctggaccaccatggccaagaaccgcagggacagaaacagttggggtggattttcggaaaagacatatgaatggagctcagaagaggaggagccagtgaaaaaggcaggaccagtccaagtcctcattgtcaaagatgaccattcctttgagttagatgaaactgcattaaatcggatccttctctcggaggctgtcagagacaaggaggttgttgctgtatctgttgctggagcatttagaaaaggaaaatcattcctgatggacttcatgttgagatacatgtacaaccaggaatcagttgattgggttggagactacaatgaaccattgactggtttttcatggagaggtggatctgaacgagagaccacaggaattcagatatggagtgaaatcttccttatcaataaacctgatggtaaaaaggttgcagtgttattgatggatactcagggaacctttgatagtcagtcaactttgagagattcagccacagtatttgcccttagcacaatgatcagctcaatacaggtatataacttatcccaaaatgtccaggaggatgatcttcagcacctccagcttttcactgagtatggcagactggcaatggaggaaacattcctgaagccatttcagagtctgatatttcttgttcgagactggagtttcccatacgaattttcatatggagccgatggtggtgccaaattcttggaaaaacgcctcaaggtctcagggaaccagcatgaagaactacagaacgtcagaaaacacatccattcctgtttcaccaacatttcctgttttctgctacctcatcctggcttaaaagtagctaccaatccaaactttgatggaaaattgaaagaaatagatgatgaattcatcaaaaacttgaaaatactgattccttggctacttagtcccgagagcctagatattaaagagatcaatgggaataaaatcacctgccggggtctggtggagtacttcaaggcttatataaagatctatcaaggtgaagaattaccacatcccaaatccatgttacaggccacagcagaagctaacaatttagcagccgtggcaactgccaaggacacatacaacaaaaaaatggaagagatttgtggtggtgacaaaccatttctggccccaaatgacttgcagaccaaacacctgcaacttaaggaagaatctgtgaagctattccgaggggtgaagaagatgggtggggaagaatttagccggcgttacctgcagcagttggagagtgaaatagatgaactttacatccaatatatcaagcacaatgatagcaaaaatatcttccatgcagctcgtaccccagccacactgtttgtagtcatctttatcacatatgtgattgctggtgtgactggattcattggtttggacatcatagctagcctatgcaatatgataatgggactgacccttatcaccctgtgcacttgggcatatatccggtactctggagaataccgagagctgggagctgtaatagaccaggtggctgcagctctgtgggaccagggaagtacaaatgaggctttgtacaagctttacagtgcagcagcaacccacagacatctgtatcatcaagctttccctacaccaaagtcggaatctactgaacaatcagaaaagaaaaaaatgtaatgcaaattttaagaaatacaggtgcatgaccaattgtcaattaaatattcagttttatgtctccatgcaaacattcaaagtgcttccatcagaacggagtaaaatactaaacacctctgaagactgcaaactggattagttcttttacttcagtgtttaataagcagatgtatgtatgcatggttatactattttgttaacatgtacaatttcctgatttttcttcaaaaatgctgttataaagtatttgtctatttatgataacagtacacgtgttctgcttgaatttactaaattctactactgggttataattaaatcatgtgatattccaaaaaaaaaaaaaaaaaaaaaaaaaaa

SEQ ID NO: 24794 - DNA, 1182 bp, Homo Sapiens
gacccacgcgtccggttctatgtactctctaaaatgttatcgttttcatttgtctactaattttcgagcatttgttactactgagtttcttaatatctgactggcctccgcccacgggctctgcagagcataaatactcaggctgatggtagtgcagagactctccctccttgatcagcgcaaacgttggtctgaggcttgagggatggagcaacattttcttggctgtgtgaagcgggcttgggattccgcagaggtggcgccagagccccagcctccacctattgtgagttcagaagatcgtgggccgtggcctcttcctttgtatccagtactaggagagtactcactggacagctgtgatttgggactgctttccagcccttgctggcggctgcccggagtctactggcaaaacggactctctcctggagtccagagcaccttggaaccaagtacagcgaagcccactgagttcagttggccggggacacagaagcagcaagaggcacccgtagaagaggtggggcaggcagaggaacccgacagactcaggctccagcagcttccctggagcagtcctctccatccctgggacagacagcaggacaccgaggtctgtgacagcgggtgccttttggaacgccgccatcctcctgccctccagccgtggcgccacctcccgggtttctcagactgcctggagtggattcttcgcgttggttttgccgcgttctctgtactctgggcgtgctgttcacggatctgtggagctaagcagccttagatagcagcagaaggctttttggattctcctccttgaaaagattctcagttaccaaacgtctccacctagaaaataaaaatacattaagatgtgctttcattgctggttgtcagtttttaaattctctttttcccttatgtttctttcttgtttcgcgtcgcttattactttcagtttccttgtattttaaatattggtatttcattaaatatttcattcgtatctgttttcactttgagaaatctattttacgattgtagaattcttagagtttttggcaaatttaaaatttgtttttttccattgtattttaaaatcttattcctactatttttctaattattgctttttaaatgtattgtttgtttacatttaattttaaaaaaaaaaaaaaa

SEQ ID NO: 24795 - DNA, 1080 bp, Homo Sapiens
atggcccccatgggcatccgcctttccccactgggggtggcagtgttttgcctgctggggctcggcgtgctctaccacctctactcgggcttcttggccggccgcttcagcctcttcggcctgggcggcgagcctggcggcggcgcggcggggcccgcggccgcggccgatgggggcaccgtggacttgcgcgagatgctggctgtgtcagtgctggccgcagtccgcggcggcgacgaggtgaggcgcgtccgcgagagcaacgtcctccacgagaagtccaaggggaagacgcgcgagggagccgaggacaagatgaccagcggcgacgtgctgtccaaccgcaagatgttctacctgctcaagaccgccttccccagcgtccagattaatactgaggaacacgtggatgcagctgatcaggaggttatcttgtgggatcataagattcctgaggatatcctaaaggaagtaactactcctaaagaggtaccagcagaaagtgttactgtctggattgacccacttgatgctacacaggaatatacagaggatcttcgaaagtacgtcactactatggtgtgtgtggctgtaaatggtaaacccatgctaggagttatacataagccattttccgaatatacagcttgggcaatggtagatggtggttcaaatgtgaaagcccgctcttcctacaatgagaagaccccaaggatcgttgtgtctcgttcccattcagggatggtcaaacaggtcgctcttcagacttttggaaaccagactacaattatcccagctggtggtgctggttataaagttttagcacttttggatgtgcctgataagagtcaagaaaaagctgatttatacatccatgtgacatacatcaaaaagtgggatatatgtgctggtaatgccatcttaaaagccctaggggggcatatgactaccctgagtggtgaagaaatcagttacactggttcagacggcattgaagggggactccttgctagcatcagaatgaaccaccaggccctggtcagaaaactcccagatctagaaaagacaggacataaatga

SEQ ID NO: 24796 - DNA, 3500 bp, Homo Sapiens
tgttcctcttctttcgtgttgtgtcagaagccatgatttccagtcttctcatctggaagatgaaggaaaagatagacccgaccccacagggttctgaggctcaaactgaaagcctggtggtggggcacctgtgacaggtcccatctgatgccgaggctgaaggagtctcgctcccacgagtccctgctcagccccagcagtgcggtggaggcgctggacctcagcatggaggaagaggtggtcatcaagcccgtgcacagcagcatccttggccaggactactgcttcgaggtgacgacgtcatcaggaagcaagtgcttttcctgccggtctgcagctgagcgggataagtggatggagaacctccggcgagcggtgcatcccaacaaggacaacagccggcgtgtggagcacatcctgaagctgtgggtgatcgaggccaaggacctgccagccaagaagaagtacctgtgcgagctgtgcctggacgatgtgctctatgcccgcaccacgggcaagctcaagacggacaatgttttctggggcgagcacttcgagttccacaacttgccgcctctgcgcacggtcactgtccacctgtaccgggagaccgacaagaagaagaagaaggagcgcaacagttacctgggcctggtgagcctacctgctgcctcggtggccgggcggcagttcgtggagaagtggtacccggtggtgacgcccaaccccaagggcggcaagggccctggacccatgatccgcatcaaggcgcgctaccaaaccatcaccatcctgcccatggagatgtacaaagagttcgctgagcacatcaccaaccactacctggggctgtgtgcagccctcgagcccatcctcagtgccaagaccaaggaggagatggcatctgccctggtgcacatcctgcagagcacgggcaaggtgaaggacttcctgacagacctgatgatgtcagaggtggaccgctgcggggacaacgagcacctcatcttccgggagaacacactggccaccaaggccattgaggagtacctcaagctagtgggccagaagtacctgcaggacgccctaggtgagttcatcaaagcgctgtatgagtcagatgagaactgcgaagtggatcccagcaagtgctcggccgctgacctcccagagcaccagggcaacctcaagatgtgctgcgagctggccttctgcaagatcatcaactcctactgtgtcttcccacgggagttgaaagaggtgtttgcctcgtggaggcaggagtgcagcagtcgcggccgcccggacatcagtgagcggctcatcagcgcctccctcttcctgcgcttcctctgcccagccatcatgtcgccctcactcttcaacctgctgcaggagtaccctgatgaccgcactgcccgcaccctcaccctcatcgccaaggtcacccagaacctggccaactttgccaaatttggcagcaaggaggaatacatgtccttcatgaaccagttcctagagcatgagtggaccaacatgcagcgcttcctgctggagatctccaaccccgagaccctctccaatacagccggcttcgagggctacatcgacctgggccgcgagctctccagcctgcactcactgctctgggaggccgtcagccagctggagcagagcatagtatccaaactgggacccctgcctcggatcctgagggacgtccacacagcactgagcaccccaggtagcgggcagctcccagggaccaatgacctggcctccacaccgggctctggcagcagcagcatctcagctgggctgcagaagatggtgattgagaacgatctttccggtctgatagatttcacccggttaccgtctccaacccccgaaaacaaggacttgttttttgtcacaaggtcctccggggtccagccctcacctgcccgcagctcgagttactcggaagccaacgagcctgatcttcagatggccaacggtggcaagagcctctccatggtggacctccaggacgcccgcacgctggatggggaggcaggctccccggcgggccccgacgtcctccccacagatgggcaggccgctgcagctcagctggtggccgggtggccggcccgggcaaccccagtgaacctggcagggctggccacggtgcggcgggcaggccagacaccaaccacaccaggcacctccgagggcgcgccaggccggccccagctgttggcaccgctctccttccagaaccctgtgtaccagatggcggctggcctgccgctgtcaccccgtggccttggcgactcaggctctgagggccacagctccctgagctcacacagcaacagcgaggagttggcggctgctgccaagctgggaagtttcagcactgccgcggaggagctggctcggcggcccggtgagctggcacggcgacagatgtcactgactgaaaaaggcgggcagcccacggtgccacggcagaacagtgctggcccccagaggaggatcgaccagcctccgcccccacccccgccgccacctcctgccccccgcggccggacgccccccaacctgctgagcaccctgcagtacccaagaccctcaagcggaaccctggcgtcggcctcacctgattgggtgggccccagtacccgcctgaggcagcagtcctcttcctccaagggggacagcccagaactgaagccacgggcagtgcacaagcagggcccttcacctgtgagccccaatgccctggaccgcacagccgcttggctcttgaccatgaacgcgcagttgttagaagacgagggcctgggcccagaccccccccacagggataggctaaggagtaaggacgagctcagccaagcagaaaaggacctggcggtgctgcaggacaagctgcgaatctccaccaagaagctggaggagtatgagaccctgttcaagtgccaggaggagacgacgcagaagctggtgctggagtaccaggcacggctggaggagggcgaggagcggctgcggcggcagcaggaggacaaggacatccagatgaagggcatcatcagcaggttgatgtccgtggaggaagaactgaagaaggaccacgcagagatgcaagcggctgtggactccaaacagaagatcattgatgcccaggagaagcgcattgcctcgttggatgccgccaatgcccgcctcatgagtgccctgacccagctgaaagagaggtacagcatgcaagcccgtaacggcatctcccccaccaaccccaccaaattgcagattactgagaacggcgagttcagaaacagcagcaattgttaacctgcctgaggagggaggaagctacccaaggagagggggactatggtggccaagggcagggtctcggcctggggaggcacccacggttgcagccccagcgcgggtgtcaggaggccgagcctcccctccctgccgctgtccaggaggcggccgca

SEQ ID NO: 24797 - DNA, 3912 bp, Homo Sapiens
ccgcgggcggggccggctggcgttcacgtgacccggcgtcattggctcgctcgcggaagtagtcctacattcgcggtcagcgcggggtctccgggcgccctgcagggcgggcaggctgtgccatcccgccggacgtcgggatggtgcagctgtacaacctgcacccgttcgggtcgcagcaggtggtgccctgcaagctggagccggaccggttctgtggcggggggcgtgacgcgcttttcgtggcggcgggctgcaaggtggaggcgttcgcggtggccggccaggagctgtgccagccgcggtgcgccttctccacgctgggccgggtgttgcgcctggcctacagcgaggctggagattatttggtagcaattgaagagaaaaacaaagctacatttctacgtgcttatgtgaactggagaaataaaaggactgaaaactctcgtgtgtgtatccgaatgattgggcataatgtggagggaccattcagcaaagccttcagagaccagatgtacattattgaaatgccgctttcggaggcccccttgtgcatttcctgttgccctgtgaaaggagaccttctcgttggctgcacaaataaattagtcttatttagtttgaagtaccagatcattaatgaggaattctcactattggactttgaacgttctttaattatacacatagataatatcactcctgttgaggtttctttttgtgttggatatgttgctgtcatgtcagacttagaagtcttaatcgtaaaactggagtcaggccctaaaaatggagagagagttcaccaccatccacataagaccaacaatcgaataagacggacagaagaaggcatcagtaatgaaatttcacagcttgagtcagatgattttgtcatctgccagaagcccctggaacttcttggtgaaaaaagtgaacagtctggattatctgttacactggagtctacgggattagctgatgaaaaaagaaaatattcccactttcagcacctgctctatagacgttttgctcctgatatttcgtcctatgtcttgtctgatgacatcaagctacattccctccagctgctacccatttaccagaccggttctcttacatctgatggaaaaaatttgtctcaggaaaaagaattgctgagtctcttttgctttttctccttacctcatgtgggctatctctacatggttgtcaaatctgttgaattgatgtcagtctaccagtatcctgaaaagtctcagcaggcagtactcacgccacaatttttgcacgtcattacaagtaacaacctgcagtgtttcactgtgcggtgcagtgcggcggcagctcgtgaggaggacccgtacatggacaccaccctgaaggcttgcccacctgtcagtatggatgtctgtgctttaagaatacagcttttcataggcttgaaagccatctgtcactttaaaaaccacatcatacttttgactaaagcagaacctgaagccattccagagagaagacagtcacccaagaggcttctttcgagaaaagataccagtgttaaaatcaaaatacctcctgtagctgaggctgggtggaatttgtatattgtgaatacgatctcaccagtgcagctgtacaaagagatggtagactatagcaatacctataagactgtcaaaacccagagctgcattcaccttctcagtgaggctcatctgttagtgcgagctgccctgatggatgccagtcagctggaacctggagagaaggcagagcttttggaagcatttaaggaaagctgtgggcaccttggggactgttacagcaggcttgactcccagcattctcatctcaccttgccatactataagatgtctggtttgtctatggctgaagttctggcccgcacggactggacagtagaggatggattacagaaatacgagagaggattaatcttttacattaatcattcactttatgaaaacctggatgaagaattaaatgaagaattagcagcaaaagtggttcagatgttttatgtggctgagccaaagcaagtgccccatattctctgtagtccttctatgaagaatattaatcctttaactgccatgagctatctaaggaagctggatacttctgggttttcatcgatcttagtgacattgaccaaggcagcagtggctctgaaaatgggagatcttgacatgcacagaaatgaaatgaaaagccattcagagatgaagttggtatgtggcttcattctggaacctcggctgttgattcaacagagaaagggacagattgttccaaccgagcttgcacttcacttgaaggaaactcagcctggattgcttgtggcttcagttctgggcttgcagaagaacaacaaaattggaattgaagaagcagattccttttttaaggtgctttgtgctaaggatgaagatacaattcctcagctcttggtagacttttgggaagctcagctagtggcatgtctcccagatgtggtacttcaggaactctttttcaaactcacatcacagtacatctggagattgtctaagaggcagcctcctgacaccacaccattgcgaacatcggaggatctgataaatgcctgtagtcattatggcttaatttatccatgggttcacgtcgtaatatcatctgattctttagctgataaaaattatacagaagatctttcaaaattacagtctcttatatgtggtccttcatttgacatagcttccattattccgttcttggagccactttcagaagacactattgccggcctcagtgtccatgttctgtgtcgtacacgcttgaaagagtatgaacagtgcatagacatactgttagagagatgcccggaggcagtcattccatatgctaatcatgaactgaaagaagagaaccggactctgtggtggaaaaaactgttgcctgaactttgtcagagaataaaatgtggtggagagaagtatcaactctacctgtcatcattaaaagaaacattgtcaattgttgctgtggaactagaactgaaggatttcatgaatgttctcccagaagatggtactgcaacatttttcttgccatatcttctctattgcagtcgaaagaaaccattgacttaaaggtatcatttgaaaaataccataatggcatttgagactgaatttctaaaaattgaatgccaaagtacaagtagaggagttttttattttatatatacacacacacacacacacacacacacacacacacacatatatgatacaaatgctttcaggctgcttaccttaccgtgtagtggtaactattcacttcttaatttatgacctcaatcaatttaattgtctagaatgtaaaaagtctttaagacataagaattcctcaaagaagccatacattttttaaggtggggattgacttttattccaaggaacaacatcagttcactgttgttggagacatgacaatcattttcatcccaagaacactttaaggaaacattttacaagtatgcttgaaagaatgtcactaactggtccagaattttatcttcttgatttttccagatttctctatgtttttgagaaagatgttaatgttttgccatggtaaaagatttcaaacctcattttttttgttccttttcttgttacttttaagaaaactcatgctctgtttctctgaatcaaatgaagtagaagtttacaaagctaactttcttcttgtctagctattaacatgatttgtcaaatgcatgtttttttcagccaaagccttgtttccatttttgttgatgtgtactcttgctcttttagctagagtgtatgtgaaaataaagaaatacatcattgtattcacaaaaaaaaaaaaaaaaaaaaa

SEQ ID NO: 24798 - DNA, 1794 bp, Homo Sapiens
cacatataataatagcaactcctggtcgactgattgaccacttgaaacctttcgtattttccaagtgctggcaagcgcttcctgcgcaggccgaggcgacctggagtttgtgacgctgtgatggtctagaggctggagattcaagatctgggtgccatcattttctggttctgttgatgaccctcttccaggttacatacagcttacatcttgcatcctcaagcgtttttcttataaggctaaaaattcacaaagcatatatcaatgaatcaggaggatctagatccggatagtactacagatgtgggagatgttacaaatactgaagaagaacttattagagaatgtgaagaaatgtggaaagatatggaagaatgtcagaataaattatcacttattggaactgaaacactcaccgattcaaatgctcagctatcattgttaattatgcaagtaaaatgtttaaccgctgaactcagtcaatggcagaaaaaaacacctgaaacaattcccttgactgaagacgttctcataacattaggaaaagaagagttccaaaagctgagacaagatcttgaaatggtactgtccactaaggagtcaaagaatgaaaagttaaaggaagacttagaaagggaacaacggtggttggatgaacagcaacagataatggaatctcttaatgtactacacagtgaattgaaaaataaggttgaaacattttctgaatcaagaatctttaatgaactgaaaactaaaatgcttaatataaaagaatataaggagaaactcttgagtaccttgggcgagtttctagaagaccattttcctctgcctgatagaagtgttaaaaagaaaaagaaaaacattcaagaatcatctgtaaacctgataacactgcatgaaatgttagagattcttataaatagattatttgatgttccacatgatccatatgtcaaaattagtgattccttttggccaccttatgttgagctgctgctgcgtaatggaattgccttgagacatccagaagatccaacccgaataagattagaagctttccatcagtaaaaggatgttttcttttttcacacagtaaaaattcttatcattcaaggatattggaaccacaggactatttggataaaaaacattatttgcaaattaatgcgcatagtacttttattgcaaaatggcatgtgctgccatctattattcatttttaaatggtcatttcttattcagtgagtgctttagtgttttaaactatatggataagaatgcaggtagataatattctaggcataaaacatttaatgtaccttacctcatgcaatattctttggattctttgttgatttatgatattgctaatataatattttcttaaaatatataacaatatcttttatgcatttgagttccagctggtgcttctttatatttagaaattataatgggaaggtcatttaatttacagatggttttaaaattgaggtaatatctgaggtggcataatttaaaaatatttagcaaatttgtttcatatatactgtcttatttctagatttgtttaaaattggaatatgaaaaactaatggataaagctagcataaaattgatattttagtttgtattattaatatatcatgttaccttatatattaatctactcttgattctgctaattattaccaacaaaattgtattcatgacattttattaatcctctgtgaattttctgtaaataaaattatttctgaaaatctctaaaaaaaaaaaaaaaaaaaa

SEQ ID NO: 24799 - DNA, 1388 bp, Homo Sapiens
gggcacggctgtcttggggctcatcgaggctgcctgtcatgtttgctttttctttcctcagacagatcgaggagctgctagagctgctgatgactgagatcctgcaccccagcagccaggcccccaacggtgtgaagagccacttcatcgagatcttcctggaggagctgaccaaagtgggcgccgaggagcttacggcagaccagaacctgaagttcatcgaccccttctgcagaatcgctgcccggaccaaggattccttggttttgaacaacatcactcgaggcatctttgagacgattgtggagcaggccccgcttgccattgaagacctcctgaatgaactggacacacaggatgaggaggtggcgtcggacagtgatgagtcctctgagggcggtgagcgtggagacgcgctgtcccagaagaggtctgagaagccgcccgcaggctccatctgcagggctgaacctgaggctggtgaggagcaggcaggtgacgacagggacagtggcggccccgtcctccagtttgactacgaggcagttgctaacagactgtttgaaatggccagccgccagagcaccccttctcagaacagaaagcgtctctacagagtgatccggaagctgcaggacctggcaggaggcattttccctgaagatgagatcccagagaaggcctgcaggcgcctgcttgaagggaggcggcagaagaagacgaagaagcagaagcgtctgctcaggttgcagcaggagagagggaaaggtgagaaggagcccccgagcccgggcatggagaggaagaggagcaggaggaggggtgtaggggccgaccccgaggcgcgggcagaggctggtgagcagccaggcacagctgagcgggccctgctccgagatcagcccaggggccgtggccagagaggggctcgccagagaaggaggacacctcggcccctgaccagtgcccgagcaaaggcggccaatgtccaggagccggagaagaagaagaaacgcagggagtgatgtggccgggccaaggacaggcagggagggaggccaggcctcgcttgcaccgcgggacgaggctgaccgggctgttctgtagactcaggaccgtggctccagaactcctgtgccaggcgggagggaagggcggcactggagagatgggcccatcattaggggccagcatcccaggaactggacctttccccagagcctccgcctgtggctgtgatgaccttgggccagaaggtcaaactccgaagactgaaactctgcctgcagcaggactggccgcccctgctgtggggggttcagaaaataaaatgccgcgcagcccttgccaaaaaaaaaaaaaaaaaaaaaaaaaaaaaaaaaaaaaaa

SEQ ID NO: 24800 - DNA, 8326 bp, Homo Sapiens
atgaccaatgggtctgtgttttggaccggcgaagcccaatggcgcgacagggaaggcgggcccgagatgggttagggtgtccttgcagggtgtctgagctaaacttcaccaaataatagctgtttgtattttggctgctgcaggagccattttagaaataaatatcttccttcaatagatgaaaatgaaaatacagaaaaaagagaagcagttgtcaaatttaaaagttttgaatcactccccaatgtctgatgcctctgtcaattttgactacaaatctccatccccatttgactgcagcactgatcaagaagagaaaattgaagatgttgctagtcactgtctgcctcagaaggacctgtatactgctgaagaggaagctgctaccctttttcctaggaaaatgacatcccataatgggatggaggacagtggaggaggaggtactggagtgaagaagaaacggaagaaaaaggagccaggagaccaagagggtgcagcaaagggaagcaaggacagagagcccaagccaaagaggaaacgagaaccgaaagagccaaaggaacccagaaaggccgaggagccgaagaaggccaaggagcacaaggagccgaagcaaaaagatggggcaaagaaggcacggaagccccgggaggcctcgggcaccaaggaggccaaagagaagaggagctgcactgactctgcagccaggacgaagtccaggaaggccagcaaggagcaaggaccaaccccagtggagaaaaagaagaaaggaaaaaggaaaagtgaaactacagtggagagtttagagctggatcagggcctgacgaacccatctctgcggagtcctgaggagtccactgagtctacagacagccagaaacgacgctcgggaaggcaagtaaagcgcagaaaatacaatgaggacctggacttcaaagtggtggatgatgatggggaaacaattgctgttcttggagctggtcgaacatctgcactctcagcctctacactggcctggcaggcggaggagcctccagaagatgatgcaaacatcattgagaagatcctggcatctaagactgtccaggaggttcacccaggagaacctccgttcgacttggagctgttctacgttaagtatagaaatttttcctacttacattgtaaatgggccacaatggaagagctcgaaaaggatcctcgcatcgcacagaagatcaagcgatttaggaataaacaagcccagatgaagcacatttttacggagcctgatgaagacttgttcaatccagactatgtagaagttgatcgcatcttggaggtggcccacaccaaggatgcagaaacaggggaggaggtaacacattacctggtgaagtggtgctcactaccatatgaagaaagcacgtgggagctagaggaagatgtagatcctgcaaaagttaaagaatttgaatctcttcaagttctccctgaaattaagcatgtggagcggcctgcttcagactcctggcagaaacttgagaagtctcgcgagtataagaacagtaaccagctccgggagtaccagctggaagggatgaactggcttctttttaactggtataacagaaaaaactgtattttggctgatgagatgggcctagggaaaaccatccagtccatcacattcctttcagaaatatttctgagaggaatccacggcccttttctcattatcgcccctctctccaccatcactaactgggagcgggagttccggacatggacagagatgaatgccattgtgtaccacggcagccagatcagcaggcagatgatccagcagtatgaaatggtgtacagagacgcccagggaaaccccctttcaggagtcttcaagttccacgtcgtcatcacaacatttgaaatgatcctagcagactgcccagagttgaagaagattcactggagctgtgtgataattgatgaagcccacagactgaagaataggaactgcaaacttctggagggtctaaagcttatggccctggaacataaagtgcttctcactggaacacccttgcagaactctgtggaggagctcttcagtttgttaaattttctggagccatcacagtttccttcagagaccgctttcttggaggaatttggagatctgaaaacagaggagcaggtaaagaaactgcagtctatcctaaaaccaatgatgcttcggcggctgaaagatgatgtggaaaagaaccttgctcccaaacaagagacgatcattgaggtggaactgaccaatatccagaaaaagtactaccgtgccatcctcgagaagaacttttccttcctgaccaagggggcaaatcagcacaacatgcccaatctcatcaacaccatgatggagctgaggaagtgctgtaaccatccctacctgatcaatggagcagaggagaaaattctagaagatttccgaaaaacccacagccctgatgcccctgactttcagctgcaggccatgattcaggcagcaggaaagcttgtgttgattgataaactactccctaagctgattgcaggtggccacaaagtactcatcttctcccagatggtgcgctgcctcgacatcctagaagattacctcatccagagaagatacacctatgagcgaattgatgggcgagtacggggaaacctgcgccaggcagccatcgaccggttctgtaagccagattcagaccgctttgtctttcttctgtgcaccagagcgggaggcctggggatcaatctcacagctgctgatacctgcatcatatttgattctgactggaacccacaaaatgacttgcaggctcaggcccgatgtcaccgcataggccagagcaaagctgtgaaggtgtatcgcctcatcactcgaaattcctacgagcgcgagatgtttgacaaggccagcctaaagctggggctggacaaggctgttcttcaggacatcaaccgaaagggcggcaccaatggggtacagcagctctcaaaaatggaggtggaggacctactccggaaaggtgcttatggagccttaatggatgaagaagatgaaggctccaagttctgtgaagaagacatagaccagattctgcagaggcgaacgcacaccatcaccatccagtctgaggggaaagggtccacttttgccaaggctagctttgtggcttcaggaaacagaacagatatttccttagatgatcctaacttttggcagaaatgggctaaaatagctaaactagacactgaagcaaagaatgaaaaggaaagcttagtgatcgaccgacctcgcgtgagaaagcagaccaaacactacaactcgtttgaggaagacgagctcatggagttttcagagttagacagcgactcagacgaaaggcccacgagatccaggcgcctcaatgacaaagccaggcgctacctccgagcggagtgcttccgggtagagaagaacctgctcatctttggctggggccggtggaaggacatcctgactcatggccgattcaagtggcatctgaacgagaaggacatggagatgatttgccgtgccctcctggtgtactgtgtcaagcattataagggggacgagaagatcaagagtttcatttgggaactgatcacacctaccaaagatgggcaagcccagaccctccagaaccactcaggcttatctgccccagtccccagagggaggaaggggaagaagacgaagaaccagttgctaatcccagagctaaaggatgcagattggctagccacctgcaaccccgaggtggtcttgcatgatgatggctataagaaacacctcaaacagcactgcaacaaagtacttttgcgagtccggatgctgtactacctaaaagctgaaatactgggagaagcagctgagaaagcatttgaaggatctcctgccagggagctggatgtacctctgcctgacatcgactacatggagatcccagtggactggtgggatgctgaagccgataagtcacttctcattggcgtgttcaagcatggttatgaaaggtacaatgccatgcgagcagacccagcactttgcttcctggagaaagttgggatgcccgatgagaagtccctttctgcagaacagggtgttacagatgggacctcagacattcctgaaagaggcaacacagataaagaagacaatgctgaggacaaagtagatggcctccagaaacaaacggagagttccagtgatggaggtgatggcgtttttagcgaaaagaaggatgacagccgggcagcccaggatggctccgacccagacaaatcgccctggccagtttcctccgccctcacagctcgtctcagacgtctggtcactgtttaccagcgctgcaaccgcaaggaactgtgccggcctgaaattctgggaccaggtaaccaaggatattgggttcaggaagagatgttcaggagaacctcagaaatggacctcatcaacaaggaagcccaaaagaggtggactaggagagaacaagcagacttctatagaacagtgtcttcctttggtgttgtttacgatcaagaaaagaaaacctttgactggacacagttccgcatcatttcccgtttggacaagaagtcggatgagagcctggaacagtatttttatagttttgtggccatgtgccggaatgtctgtcgtctacccacatggaaagatggcggtcccccagataccaccatctacgttgaacccatcactgaggaacgtgctgcaagaactctgtaccgcattgaactgttacggaaagttcgagagcaagtgctcaagtgccctcagctgcatgaacgcctccagctgtgcaggcccagcctctacctcccagtctggtgggagtgtgggaagcatgatcgagacctgctcatcggcactgccaaacatgggctgaaccgcactgactgttacatcatgaacgacccccagctgtccttcctggatgcctatagaaactatgcccagcataaaagatctggcacccaggcaccaggaaatctctgttgcctttaccagaccaactccaagttatatgaatctcttacatattctcaaatgagtaggacttcagagtcccttgaaaatgaacctgaaaatctagtgagagtagaaagcagagatgatcatctcagcctgcctgatgtgacatgtgaaaactttatttctaaagttcaggatgtcatttccatcaaccatgatgaaagtctgctgcctgagtccttagagagcatgatgtatggtaagaaggtgctcagccaagaaccaagctcttttcaggagagcccaagtaccaatactgaatctagaaaagatgttattaccatctcaataagcaaagatgggaactgccagtctggtggccctgaggcagaaatagcttctggccctacttttatgggtagcttagaagcaggaggagtagctcaagcaaacatcaaaaatggaaaacatttgttgatgtctatttcaaaggaaggggagctctgctgcagtgaggcaggacagagacctgaaaacattggccagctggaagccaagtgtttagcttccccttccttgaatccaggaaatgaaagtgggtttgtagatatgtgcagtcttagtgtctgtgactccaaaagaaacctgtcatcagatcagcaattaattgatttattggaaaacaaaagcttagaaagtaaattgattttgagtcagaaccacagtgatgaggaggaagaagaggaggaaaacgaggaggaaaacttagccatggcagtaggcatgggggaaaggccagaggtattgcatctcacggagcccactactaacatctcaagggaaaagaaccaaggcttccaagatgaaaccaagaaaggaagcttagaggtggcaaaccagactcctgggctacagagggctttccccgctccagcagcctgtcagtgccactgcaaacacatggagaggtggatgcatggcctcgagaatgatgaatttgaaatcgagaaacccaaggcttatatcccagatctgttcaaaagtaaaaccaatactatcgccatggagggtgaacccactgctattccatcacagccgtttaaagtgaagcatgagcttttaaaagaaccttggaaagaaagtgcagaggggcaaaacgttttccccacatatcctcttgaaggaagtgagctcaaatcagaagacatggattttgagaataaagatgattatgatagagacggaaactgccatagtcaagattatccagggaagtactctgaagaggagagcaagagctcaacatcgggcatcacaggagacattggggatgagctacaggaggctcgagctcccactattgctcagctgctacaggagaaaactctctattccttctctgagtggccaaaggaccgcgtgataattaaccgcctagataatatctgccacgtggtgttaaaggggaagtggccctctagccagcagtatgagccctcaggcacactgcccaccccggtattaaccagcagtgctggttctcgaaccagcctctcagagccggaagcagcagaacacagcttcagcaacggcgcagcattggcggcccagatccacaaggagagcttcttagctccagtattcacaaaggatgaacaaaagcacaggcgtccctatgagtttgaggtggagagggatgcaaaggctcggggcctggagcagttctctgccacccacgggcacacccctatcatcctcaatggctggcatggggagtcagctatggacctctcctgctcatcagaggggtccccaggagccacatcccctttcccagtgagcgccagcacccctaagattggggctatcagttcacttcagggagcccttggcatggacttgtctgggattctgcaagctggcctgatccatcctgtgactggacagattgtcaatggaagcctcagaagagatgatgcagccacgaggaggcggagagggaggcggaaacatgttgaaggagggatggacctcatctttttgaaggagcagacacttcaggcgggaatcttggaagtccatgaagacccagggcaggccaccttgagcaccacacaccctgaggggccagggcctgccacctcggctcctgagccagctacggcagccagcagccaagccgagaaatccattcccagcaagagtctgcttgactggctaaggcagcaggctgactactccttagaagttcctggctttggggcaaatttttcagacaaaccaaagcagaggaggccacgctgtaaagaacctggaaaattagatgtcagctccctgagcggggaagagagagttcctgccatccccaaggagccaggactgagggggtttcttccagaaaacaagttcaatcacactctggctgagcctattcttcgagatacgggcccccgcaggagggggaggcggcctcggagcgaactcctgaaggctccttccattgtggcagactctccctctggaatggggccactgttcatgaatggactgattgctgggatggacctggtaggacttcagaacatgagaaatatgccaggcatccccctcaccgggctggtggggtttccagctggctttgccacgatgccaacaggtgaagaggtcaaaagtaccctgagcatgctgcccatgatgctgccaggcatggctgctgtgccccagatgtttggtgttgggggactcctcagtccacccatggcaaccacctgcacttccactgctccggcgtctctatcaagcacaacgaaaagtggtacggcagtgactgaaaagactgcggaagacaagccgagtagccatgatgtgaaaacagacactttagctgaggacaagcctggtccaggtccattttctgatcagtctgaacctgcaataactactagtagtcctgtggcttttaacccatttctcatcccaggagtatctcctggactcatttacccatccatgttcctctcccctggtatgggcatggctctgccagccatgcagcaggccagacactcggaaatagtaggtctggagagccagaagaggaagaagaagaagacaaaggggggcaaccccaactcccacccagagcctgctcccagctgtgaaagggagcccagcggtgatgagaactgtgccgaacccagtgcccctttgcccgcagagagagaacatggggcacaggctggggagggggcactcaaagactccaacaacgacaccaattag

SEQ ID NO: 24801 - DNA, 3253 bp, Homo Sapiens
cgctcgcaccggcgggcaggtgagcaggcagcgccgcgcgctagcagctggcccccgtagacgccccagccgccgcctccgcctccgcctccgccggcgcatcgcggacgcccagcaggaatgaggggagaatcatacttcatcggaatgaggagcccagggcagcagggacacgtccctgaagatggaggacttttcttactgtgctgcatagacagggactgggctgtcactcgttgttttgcagaagaagcctttcaagcaatcactgacttcaatgacctccccaactcgttgtttgcgtgcaatgttcaccagtcagtgtttgaaggagaagagagcaaggaaaaatttgggggactgtttcggacttatgatgactgtgtgacgttccagctatttaagagtttcagacgtgtccgtataaacttcagcaatcctaaatctgcagcccgagctaggatagagcttcatgaaacccaattcagagggaaaaaattaaagctctactttgcacaggttcagactccagagacagatggagacaaactgcacttggctccaccccagcctgccaaacagtttctcatctcgcccccttcctccccacctgttagctggcagcccatcaacgatgccacgccagtcctcaactatgacctcctctatgctgtggccaaactaggaccaggagagaagtatgagctccatgcagggactgagtccaccccaagtgtcgtcgtgcacgtgtgcgacagtgacatagaggaagaagaggacccaaagacttccccaaagccaaaaatcatccaaactcggcgtcctggcctgccaccctccgtgtccaactgagctgcctgctccttctcgataatagccgtctcctctttatcatgctttttccccctgttgtttgtcaaaaaaaattgcctttaaattcctgggtgtttggttgtttgagattccttccttgttatcaagcctctcggacaaaagggctaggaaaaggtgatatgtctcctgatcatatcatacccattaagtataacccattatttagaaggttctagggaaaaaagtagtattttcttattaaacaatcagcacagcctatatctttgttctctcatgttgatccaagccagagacatcggtaacaaatagcacctgtgttgtttgtgaggtgtttcagtcccagtcctgatgtgtgtgcgttgttctctcctggccacttaaataggaccatatgtaaacttgactttgactgcatgagatatccctatctggtctcactcagtcctctgcatcccaacattcccaggacatgcatgatcaccagcatttattttcattatttgaggatatcttataactcacagattgtcagcatccagccatgtcctatctagattaggaaaatgatcagaatattccagctcaacaagtctgggtatactcactattgtgagtcaatacaccatagctctgttgaaattcctggaggcaaaattgaccttggccccaaagatattcctcaatagatttcaaacaccactcccctgtagaactctcccagcctcgttggggaggcttgtccagggtgatagagactgatttcagacaaacctatttattacaaaagtttcatggtgtctgaatgattgttttctctctttgtatatttgtacaaatgtttcagctgtgcttttaaaaaatctggatgttttttatttagtgattgttcgacaattagctgcttcaaaacataatgtgcattgcttatgaatgccttcatatactaatacagatactctgataatattacactctaataaggataatgctgaattttgaaaggacacaaaacatctaatgccaatatatacatggttagccaacatctttgctatcaagaccacttgttttaaataaagatgcaagtgtcagttgtagattattgggatgaagctaaatccccagaatgcagcagcagctgagcatgttaaaatggggaaggatgatagctacatgtatgccggtcctactcacgcgacacccgtgtgctcaaaaaagttacttgtttttgttacgtgtgattttcctatttctctagcccaaagtgcattacagaagatacacctatagaaccattaccttctgctatgtgtgccagggctcatctactcctgtacattaatggattactttagatgcaaatgcagattacaatggagtggggaagtactttcattacccaagcctcagaaaaacacacaagaacaataacacagcaaacagattgagggattgttgtggtttttgactaaggtgtatgttagtttcatcagaaacttaaaacatagactgatcactcagaaattaaagtccgttttactgtgaatatagcaatatagtactggacacagtactggtgaaactgaggagagcattgcttgtaaaatcctgagtttccataaggaaaatgaaaactccttttaaaaataaaatctgaggagtgtacaataagcatatgctttgactttcctttgctgtggaggtttttggtttttcattgatgataaacgactacagacttagtagtggagaaatggtgtcctctagtggaagaaatagtagctccgctattcagatgcagagcactgcagcatccagcctttcaaagctgactcttctcaatcatctgtgggtcatttgacttgattttttaagctaccctgaatttccagaatgcaggttctaaagaaatctagatgagagaaagtatttgaaaatgatttttaaatgttttttaaaagacacatctgacatttttaacaacttagtaaaagttgaaatgaccattctgtgtagtcataaaagaaacacaatgaagtgtatggcctctggagttagtcttagtaaaacttattgctctgtgtcaatgttaacctgtctcagatcaagtaattccttcactaggttgggtttggggaggggggaaaagaggggcttttcctaggagaacgataagaaatggaaagactccttgaagtgttgcaagggaacctcctagcactgtgaaagtcagaatcgcctcagcatttccatgacgcacattatgcaaatctctttagcactattttaaggttgaaaactttaacaatgaaggggaaggggaagatttccaccaactgaatcatttgtgcacgtgtatagctcaaagagcttagacttcaaatatatctggtgaatg

SEQ ID NO: 24802 - DNA, 4697 bp, Homo Sapiens
aactgggctggccatagggggaagcggcgcgttaaatccgccccctctccataccctactttcaaggggtgggcggtagaggggaggttggggttggagcagcggcgagggggcccctcccttgcacctccccccaccggacttggtcgcgcccgaagtgtaacactttctctttgtcggaggagctcctctgtttcctgtgcagtagctcccgttgcggcggcacccgtggcagccctggcggacgcaggagcgatggcagcgaccgatatagctcgccaggtgggtgaaggttgccgaactgtccccctggctggacatgtggggtttgacagcttgcctgaccagctggtgaataagtccgtcagccagggcttctgcttcaacatcctgtgcgtgggagagacaggtttgggcaagtccaccctcatggacaccctgttcaacaccaaattcgaaggggagccagccacccacacacagccgggtgtccagctccagtctaatacctatgacctccaagagagcaacgtgaggctaaagctcacgatcgttagcacagttggctttggggaccagatcaacaaagaggacagctacaagcctatcgtggaattcatcgatgcacaattcgaggcctacctgcaggaagagctaaagatccgaagagtgctacacacctaccatgactcccgaatccatgtctgcttgtatttcattgcccccacgggtcattccctgaagtctctggacctagtgactatgaagaagctggacagtaaggtgaacatcatccccatcattgccaaagcagatgccatttcgaagagtgagctaacaaagttcaaaatcaaaatcaccagcgagcttgtcagcaacggagtccagatctatcagtttcctacagatgatgagtcggtggcagagatcaatggaaccatgaacgcccacctgccgtttgctgtcattggcagcacagaagaactgaagataggcaacaagatgatgagggcgcggcagtatccttggggcactgtgcaggttgaaaacgaggcccactgcgactttgtgaagctgcgggagatgctgattcgggtcaacatggaggatctgcgggagcagacccacacccggcactatgagctgtatcgccgctgtaagctggaggagatgggcttcaaggacaccgaccctgacagcaaacccttcagtttacaggagacatatgaggccaaaaggaacgagttcctaggggaactccagaaaaaagaagaggagatgagacagatgttcgtccagcgagtcaaagagaaagaagcggagctcaaagaggcagagaaagagctgcacgagaagtttgaccgtctgaagaaactgcaccaggacgagaagaagaaactggaggataagaagaaatccctggatgatgaagtgaatgctttcaagcaaagaaagacggcggctgagctgctccagtcccagggctcccaggctggaggctcacagactctgaagagagacaaagagaagaaaaattaactctgctgtttgctgcatgctgcatgagacccagggtcctgtttgggcttcctgtagacacccttttcctgcgcaacagagctgggcctccctttctctaatttcccccttaacatgcctggggggcatacaatccaacccgcgccctctcctctcttcctgccaaggtttatagaaacctgagaatctgagggtgatgtctggccgctggtcaagaagccaacagtcatgtggctcgcagatgcatcctgcatcccagtccccctcccagcacccccagccatcccccctgtcttcccccacatctttgccagaggtgtgacatggtcagggggcccatctgctactctttcccaccagctcccctgttccagttctggttgctgttagtttccctgaggtatttgcaaccaccatggctgggtaaccaccgatcagcacagctgtccccttggtctcctgtatcccagtcactagtcctccctggtccaccccaccctcatcctcaggagccacagccatttcttagagggtttcaaaaggacagcctttggcgccttttccttctaacctttgagtccagccctttccagttttcattcactcgaagtaactgcactcaagctgtgctcaaaatcggcaacgcatttatttacaccaagcccttcccataaaacacaactgctgaagaaaatagcagacgtttcccctctctctaactctgggtatcccacagatgcaaaagggagaataaacctgaatattattaccagcctagagtcttgaatgatagccttaccgaattcttcttgtgaggtatttcagcatctcggggggtaatttccggaagggctccatactgtcccaataaggtgaggccagtagcaggaataataaatcccactttgtaggctggaaaactgagctgtcaaaagaatcaagtgtttgggggtttgctctgatgagtcttctagttcatttggtgaatgtcatgatgatttttaacatgcattttgcatgcatcccccaataagaagagatgagactcggctggagagaagaaaaggcccttaactttctttccaatttaaggagttgagagtttaaaaatattccagccctaagtttttatcatgggtcccatctgatagtggctttgggaacctctgtgaagtagagagccctcccttgtcagggttatgaggcacagtggcctttggtgtttggccagtgacagtgtgagagatggagttgacctggcaatgatctgtggctaacatgccgtctctctgcccttcctttgcagtaatccatggctgtgtactgaatagtattccccgctacagctggactggactccatttagccttttaagccgaggttcctattttaactgacagctttcctttggggtgccaggcagcgaggccccccacccctatcctgccatgtacttcaagctcacttcttctttttgagttccgcaacttgctcctgcctcccagccccactggcactgaccatgaccacctacttctattttttttttagagtttctttttttgatcacttactttcaaagcacacagtcaaacaaggttatgccaaatttccaggcctttttgaagtattgagaaggggaaggggatttctcacttcaattatagatcataataggaagcaaaaagaaaaaaatgaaaagcaaacatatgcacgcacttttcttgttgacaaagcaagaatataggtttgctgtgtaggtttggtgctctattgattggtgagtgaccagagcaagtatgaaggtgatgctgccaaagcacaagccagtttcttgggaaaattcaagttacagtggagtatttttttgaagaccatatgcttggaggtagaaacaaaccaacgaccaaaaaaaaaaaaaaaaaatctgctcagatactcagccagtagctcagagagatgctgagttaggcctgtcaggtctccttgggaaaggcttcatatttgcaactttgatgattctatgtccagcttcagagctgctttcccagaaattcacgcttaaacaaccaaccggtaaccaccacttccccacaccgccgcccggtaattatttgcattacaaaccggaggcgccctcatttgcatttgtgtacagattaactagttaaggcttgagaagctctgaataattcaaaagtattagacccacacagccttggagagaccttcagaaactaaggaggagttttatattaagggagacattttagtcagtaagacgatataacctacttactccgtaaggggaaatgaaggcccagagaagggaagggacttgaccgaggtcccacttctgtttcgaggcagaagccagactaattttcatgcctcctgactcccaatcagtttcacaaagggattcaatctgtttatatacgttacattcctggatacgaggtcttttgatgttcagagtaactgactagttagtattagaagaccctcgaggtttttttccacagaaaaacatctgaagatggattgggtgagggctggcaaaacgaaggcatgccgggccagctccttaacccaatgacccagtgatgctgcaaggctggaacggggtccaggagactgtgtgtaacaggtgccctaggtgacccttataatcagggaagtttggtgaacaaaaatcgaacccatgagtgaacataaattaaaaagttgatcaacctattaaaatgtgtatttcattgggtagcttttctcactgtagacagattttttccttcttcaatgaaaaggcttttaaattagtacaactgttactatttaaaaaaaaaataccctaagtactctgtttacttctggtgaaacaaaaccagtcattagaaatggtctgtgcttttattttcccagactggagtggcttttctgaaacacacacacacacacacacacacacacacacacacacacacgtacacacatccctcacttctcttaagccaagaagtttgctttccctagctgcagtgtagatggctcttgtttttgtttttttgttttaatcatttggcattcacatgtggctgttaatatgtgcttgtttttaattaaaacaagaagctttaaaaaaaaaaaaaaaaaaaaaa

SEQ ID NO: 24803 - DNA, 6607 bp, Homo Sapiens
caaacctatggatctgctgttaaggtgttaaacagccagtcagaaagcagtgctttaacaaatcaacagccacaaaataacggagaggtgcagaacagcaaaaaccagtcagtgaataagtagcagatcctggactcacatcaagatctgtctgactccaaagatatgcttgtaaccaccatgctgtgctttggcaacatacaggatgtgattggtaatgaggaagaggacacaaatatataaaccacagtacttcaggatcccattatgaaaattcccagcggggacctgtgtcttctacaagtgattctagcacaaactgtaagaatgctgttgtaagtgacttgtcggaaaaagaagcatggccctcagcccctggcagtgatccggagttggcttcagaatgtatggatgctgattctgcctccagttctgaatcagagagaaacatcactatcatggcttcagggaacacaggtggtgaaaaagatggccttcggaatagcactggacttggttcccaaaacaagtttgtagttggtagcagcagcaataatgtgggccatggaagtagtactgggccatggggtttttcccatggagccataataagcacatgtcaggtctctgtggatgctcctgaaagcaaatctgaaagtagcaacaatagaatgaatgcttggggcactgtaagttcttcatcaaatggagggttaaatccaagcactttgaattcagctagcaaccatggtgcctggccagtattagagaacaatggacttgccctaaaagggcctgtagggagtggtagttctggcattaatattcagtgcagtactataggccagatgcctaacaatcagagtattaactctaaagtgagtggtggttctacccatggtacctggggaagccttcaggaaacttgtgaatctgaagtaagtggtacacagaaggtttcattcagtggtcaacctcaaaatattaccactgaaatgactggaccaaataacactactaactttatgacctctagtttaccaaactccggttcagtgcagaataatgagctgcctagtagtaacacaggggcctggcgtgtgagcacaatgaatcatcctcagatgcaggctccatcaggtatgaatggcacttccctttctcaccttagcaatggagagtcaaaaagtggaggctcttatggtactacatggggtgcctatggttctaattactctggagacaaatgttcaggccctaatggccaagctaatggtgacactgtgaatgcaactctaatgcagcctggcgtaaatggtcctatgggcactaactttcaagttaacacaaacaaaggaggtggtgtgtgggaatctggtgcagcaaactcccagagtacatcatggggaagtggaaatggcgcaaattctggaggaagtcgaagaggatggggaacccctgcacaaaacactggcactaatttacccagcgttgagtggaacaaactgcctagcaatcagcattccaatgatagtgcaaatggcaatggtaagacgtttacaaatggatggaaatctactgaggaagaggatcagggttctgccacatctcagacaaatgagcaaagcagtgtgtgggccaaaacaggaggtacagtggagagcgatggtagtacagaaagcactggacgccttgaggaaaaaggaactggggaaagtcagagtagagacagaagaaaaattgatcagcacacattactccaaagcattgtaaacagaactgacttagatccacgtgtcctgtccaactctggttggggacagactcctattaagcagaatactgcctgggatacagaaacatcacctagaggggaacgaaagactgacaatgggacagaggcctggggaagctctgcaacacagacttttaactcaggggcatgtatagataagactagccctaatggtaatgatacctcatctgtatcagggtggggcgatcccaaacctgctctgaggtggggagattccaaaggctcaaactgccagggggggtgggaagatgattctgctgctacaggaatggtcaagagcaatcagtgggggaattgcaaagaggagaaggctgcatggaatgactcgcaaaagaataaacagggatggggtgatggacaaaaatcaagccaagggtggtctgtttctgccagtgataactggggagaaacttcaaggaataaccattggggtgaggccaataagaaatccagctcaggaggtagtgacagtgacaggtccgtttccggttggaacgaacttggtaaaactagttctttcacttggggaaacaacataaatccaaataattcatcaggatgggatgaatcttctaaacctactccttcccagggatggggagaccctccaaagtctaatcagtctctaggttggggagattcgtcaaagccagtcagctctccagactggaacaagcaacaagacattgttggatcttggggaatcccaccagctacaggcaaacctcctggtacaggctggctggggggacctataccagccccagcaaaagaagaagaacccacaggctgggaggaaccatccccagaatctatacgtcgcaaaatggagattgatgatggaacttcagcttggggagatccaagcaaatacaactacaaaaatgtgaacatgtggaacaaaaacgtcccaaatggcaacagccgttcagaccagcaagcacaggtacatcagctgctaacgcctgcaagtgccatctcaaacaaagaggcaagcagtggctctggctggggtgagccctggggggagccttctactccagccacaactgtggataatggtacttcagcatggggtaagcccatagacagtggtcccagctggggggaacccattgctgcggcatccagcacatccacgtggggctccagctctgttggtccacaagcattaagcaaatctgggccaaaatctatgcaagatggctggtgtggtgatgatatgccattgcctggaaatcgccccactggctgggaagaggaagaggatgtggagattggaatgtggaatagtaattcatctcaagagcttaactcatctttaaattggccaccatatacaaagaaaatgtcatcgaagggtctgagtggcaaaaaaaggagaagggaaaggggaatgatgaaaggtggaaacaaacaagaagaagcgtggataaatccatttgttaaacagttttcaaacatcagtttttcgagagactcaccagaggaaaatgtacaaagcaataagatggacctttctggaggaatgttacaagacaaacgaatggagatagataaacatagcctaaatattggtgattacaatcgaacggtcgggaaaggccctggttctcggcctcagatttccaaagagtcttccatggagcgcaatccttattttgataaggatggcattgtagcagatgaatcccaaaacatgcagtttatgtccagtcaaagcatgaagcttcccccttcaaatagtgcactacctaaccaggcccttggctccatagcagggctgggtatgcaaaacttgaattctgttagacagaatggcaatcccagtatgtttggtgttggaaacacagcagcacaaccccggggcatgcagcagcctccagcacaacctcttagttcatctcagcctaatctccgtgctcaagtgcctcctccattactctcccctcaggttccagtttcattgctgaagtatgcaccaaacaacggtggcctgaatccactctttggccctcaacaggtagccatgctgaaccagctatcccagctaaaccagctttctcagatctcccagttacagcgattgttagcgcagcagcaaagggcgcagagtcagagaagcgtgccttctgggaaccggccgcagcaagaccagcagggtcgacctcttagtgtgcagcagcaaatgatgcaacaatctcgtcaacttgatccaaacctgttggtgaagcagcagactccaccatctcagcagcagccactccatcagccagccatgaagtctttccttgacaatgtcatgccccacactacacctgagctgcaaaaagggccatcaccaataaatgctttcagcaacttccctataggcttgaactcaaacttgaatgtaaatatggatatgaacagtattaaagagccacagtcaagactaaggaagtggacgacagtggacagcatttctgtgaacacatctttggatcaaaactccagcaaacatggtgctatttcaagtggtttcaggctggaagagtctccatttgttccctatgactttatgaacagcagtacttcaccagccagtcctccaggttcaataggagatggctggccacgtgccaaatcgcctaacggctctagcagtgttaattggccaccagaatttcgtcctggtgagccatggaaaggttatccaaacattgaccctgaaactgacccttacgtcactcctggcagtgtcataaacaatctttcaattaatactgtgcgggaagttgaccacctcagggacaggaacagtgggtcatcctcatccttgaacaccacgctgccttcaactagtgcctggtcatccattcgtgcctccaactacaacgttcccctcagcagtacagcacaaagcacttcagccagaaatagtgattccaaattgacatggtctcctggttcagttacaaacacctctctggctcatgagctgtggaaggtccctttgccacctaaaaacatcactgctccgtcccgcccacctccgggactgactggtcagaagccacccttgtctacgtgggataattctccccttcgtataggtggaggatggggaaattctgacgccagatataccccaggttccagctggggtgagagcagctcagggagaataacaaattggcttgttctaaaaaaccttacacctcagatcgatggctcaactctgcgcactctgtgcatgcagcacggcccgctgatcacattccacctgaacctccctcacggaaatgctctggtccgctacagttcaaaagaagaggtagtgaaggcacaaaagtctctgcacatgtgtgtactggggaacactactattcttgctgagtttgccagtgaagaggagatcagtcgtttctttgcacaaagccagtctctgaccccttctcccggctggcagtctctcgggtccagccagagccggctgggctccctcgactgttcccactcattctccagccggaccgatctcaatcactggaatggtgctgggctgtcgggaactaactgtggagaccttcacggcacttcactctgggggaccccgcattattccacaagcctgtggggtcccccaagcagcagcgacccccgaggaattagcagcccatctcccattaacgcttttctttctgttgaccacctgggtgggggtggagagtccatgtaacagtgtagatgcagactcaccgaccgggacctcagacgcgagggaaaggagcactaagtggggctcgccgcctgcagccaggggccgcctgtgggaacagctattctctgcacattttccactttgttttccccaaaacatatcagtttgaatacttgaatcatgcaggccaatattataatgtgaaaaggtatctactctatttacactcccaaatagcgccatacatgctaaaccgtagagaatgagctcgcttgtgtctattcatcatgtttagcctttggattctttttttttttttccttctattcctccccaacccccccccccgcccctttttttctctcttgcaaaaccattttttgggctgataacgtatgagcttttccctttgcactgaatgatgttctctccgtctcatcggcagtatggggggcagctgtcccagtgtcaatgtttactcaagggtgttcttaggaggcgtgcgctctctactatgccttgatgttgcctaccttattgtggtatcgtggagttttaaaagatcaagttaggatgctgacttaggattattaatgaaagtgttgcaccagttttttcatgttgtaaaactaaagaatttcgctctgcagtttgaaaaactgtggccacagctgtgacttgcagcccacctgccacccaggacgggccctgcactttgaataggctttccattttgttttggaggttctcactttgaaccttcttgtttacagatttttttgtttgttttttcagaaaaaaaaatgtttactcttccatcatttaaaaaaaatgtaaaagacaaaaaaaaaatggaggatgatttaaaagatgctttctatctctgggaaaaaggagcagcatttggccatgttcttttgtttttctattcctgtcccaaatcaaagagcatggttctcaggaaaaccagttccccagtttaaaaaaaaaaaaaaaaaattccttgtagtttcttagaggaaaaaaagaaaaaccccaacttttagcactgatactacatattgctctgttaaagaattttctctgcc

SEQ ID NO: 24804 - DNA, 1766 bp, Homo Sapiens
ccacagggtaatgggtgtccgatgtcacgggggactctgtgatccgtgttcccctgaccctcctagtgcacaacttggccgggctcactgggctcctgcaccactgcctgtcaggtccgctgccagccccaagccccccaccagccatgagctcctccagaaaggaccacctcggcgccagcagctcagagcccctcccggtcatcattgtgggtaacggcccctctggtatctgcctgtcctacctgctctccggctacacaccctacacgaagccagatgccatccacccacaccccctgctgcagaggaagctcaccgaggccccgggggtctccatcctggaccaggacctggactacctgtccgaaggcctcgaaggccgatcccaaagccccgtggccctgctctttgatgcccttctacgcccagacacagactttgggggaaacatgaagtcggtcctcacctggaagcaccggaaggagcacgccatcccccacgtggttctgggccggaacctccccgggggagcctggcactccatcgaaggctccatggtgatcctgagccaaggccagtggatggggctcccggacctggaggtcaaggactggatgcagaagaagcgaagaggtcttcgcaacagccgggccactgccggggacatcgcccactactacagggactacgtggtcaagaagggtctggggcataactttgtgtccggtgctgtagtcacagccgtggagtgggggacccccgatcccagcagctgtggggcccaggactccagccccctcttccaggtgagcggcttcctgaccaggaaccaggcccagcagcccttctcgctgtgggcccgcaacgtggtcctcgccacaggcacgttcgacagcccggcccggctgggcatccccggggaggccctgcccttcatccaccatgagctgtctgccctggaggccgccacaagggtgggtgcggtgaccccggcctcagaccctgtcctcatcattggcgcggggctgtcagcggccgacgcggtcctctacgcccgccactacaacatcccggtgatccatgccttccgccgggccgtggacgaccctggcctggtgttcaaccagctgcccaagatgctgtaccccgagtaccacaaggtgcaccagatgatgcgggagcagtccatcctgtcgcccagcccctatgagggttaccgcagcctccccaggcaccagctgctgtgcttcaaggaagactgccaggccgtgttccaggacctcgagggtgtcgagaaggtgtttggggtctccctggtgctggtcctcatcggctcccaccccgacctctccttcctgcctggggcaggggctgactttgcagtggatcctgaccagccgctgagcgccaagaggaaccccattgacgtggaccccttcacctaccagagcacccgccaggagggcctgtacgccatggggccgctggccggggacaacttcgtgaggtttgtgcaggggggcgccttggctgtggccagctccctgctaaggaaggagaccaggaagccaccctaacactcggccagacccgctggctcccaggccctgagaggacagagatgaccacatccctgctggatgcaggacccgtccaaagatgccccggggaggggtgtcagcccacgttgctggcctttggggtcaagaggagtagggatcccaggctgccctggacttagaccagtgtctgaggtggtaaca

SEQ ID NO: 24805 - DNA, 6059 bp, Homo Sapiens
gggcgggcgggaggcgcggaggcagcggaggctgctcggccgcaaggaggcaggcgggaggccaggggtgcagaattggggcggggggctcccttcacccccgcagccctccgcccgggtccgtgtggccaggcctcacgtgcccgcaggcctggggaaggtggagacaggggcgggggtccgcgcagaggcctgcacggcgcggccaggtgatggtgggcctctgtgtttctccagacgaaaggggacccccggagcggccgtgcccctgggctgcccccgcgaggcgttttgacatcagccatagggaagtcggggagccctgagcctgcctgtttccgttaagtgtccttaggatgcagtgattaaggaattaggctctccctccgggaggggcactgcctgtgctagggaactcgggggcagagaaacaggacaggatgatgctgtccgagcaagcccaaaagtggtttccaacccacgtgcaggtcacagtgctccaagccaaagatctgaagccaaaaggcaaaagtggtaccaatgacacatacactataattcagctgggcaaggaaaagtactccacctctgtagctgagaaaacccttgagccagtttggaaggaggaggcctctttcgagctacctggattgctaattcagggaagtccagagaaatacattcttttccttatagttatgcacaggtccctggtgggtctggataaatttttagggcaggtggcaatcaatctcaatgacatctttgaggacaaacaaagaaggaaaacagagtggtttagattagaatccaaacaaggaaaacgaatcaaaaacaggggtgagataaaggtcaatattcagtttatgaggaacaatatgaccgcaagtatgtttgacttatcaatgaaggacaaaaccagatctccttttgcaaagttaaaagataagatgaagggtagaaaaaatgatggaacattttctgatacgtcttctgcaatcattccaagtactcacatgcccgatgccaatagtgaattttcaagtggtgaaatacagatgaaatccaaaccaaaaaagccttttctcttgggtcctcagcgactctcgtcagcgcattcaatgtctgatttatctgggtcccatatgtcttctgagaaactgaaggctggcaccataggtcaaacacatcttctcggacaccagttagattcctttggaacagttccagaaagtggaagtctcaaatctccacacagaagaacattaagctttgatacttctaaaatgaaccaacctgacagcattgtggatgaaggtgaattgtgtttcggaagacaaaatgacccatttacaaatgtgactgcttcattaccccaaaaatttgcaacactgccaaggaagaaaaatccatttgaagaaagcagcgaaacatgggacagcagcatgaatttattttcaaaaccaattgaaataagaaaagaaaataaaagagagaaaagggagaaagttagcctgtttgaaagagtgactggaaaaaaagatagcagaagatctgataaacttaacaatgggggatctgatagcccttgtgacttgaaatcacctaatgcatttagtgaaaatcgccaggactattttgattatgagtcaaccaatccatttacagcaaaattcagggcttcaaatataatgccatcttcaagttttcatatgagtccaacaagcaatgaagacctcaggaaaatcccggacagcaacccctttgatgccactgcagggtatcgtagtctgacctatgaagaggttctacaggagctggtgaaacacaaagaactccttaggaggaaagacacccacatccgggaactcgaggactacatcgacaacctccttgtaagggtaatggaagaaacgcccagtattctcagagtgccatatgaaccatccaggaaagctggcaaattctctaacagttaataaagccaattgtattgtattgataattggacaaagagagagaaagaaagaaggaaggaaggaaaaacttgttactgaaagagactacactatcaggtttcattacatattctcctttattgtgaagagtagttttacctgtaaatattagcagggactatcaagagtgacctttgaagcaagctaaatcatttaaatgtttaaattgaaaatgggccagattctcaatgaataagtggttccttaggactcactcaggtgctggtactgacccactaatctgccataggcccagaaatatcttcagaagtacgtgagttgttcctcaggaatagatttttcataaagcagaattgatcctgtggctggtttctcagaaatcagtttgtagaaatatttagcttcaggaatactgctcgttataaacactactaaaaaaacagtttatattttatatacacatatgtacatgaatatatatatattcatgtatcttgtatataaaatataggcatatacctcatatatacatgtgtttttagaacatttagaaacaattgattgcctctaaagttaggctaccaatttcttgatttgaaaatgtgtgtgctctattgatgcaagacaagtcatccttcctactgtcatggtttgttatagagaagctgcttcaaatcactcttgactacatggaccttggtttcaaagtgagctgctatatattattctagcatcaaagtttttctctttccccaaaagtgatgatctcaagtccttttttaaagaatgacaaattttaggagacttcattaacttcataacagcatgaatttatttgaattaattaacatttgagtttgtttaaggtataagcagaagataagctaatatagcttgttttgttgaaattctgcatgcctttaaatcactagcaaagcaaatattataaagttatatctgaaaataattgtgggaagtatgtgattgcctggtgtgtctgataacccaaagcagcgggcagattccaggaatgaagaattaggcttggtttcaggttacataaataatagagcagatggttgcctttgggtcttgaaccaaaataagacttactaaaggaagagtgagtttttagaagagaactttacgagcgtgacattatgcattactccacatccaccctttaagaattgatttattacaaaattatgttctattttaaagtccactcccccaaaatactgatttcttccatggattatttttatatgatttgtacaaattttttctgaaatttaagttgacaagcaatgttataaaaatattgctaatcttctgcttatttttcagcctttaaagtctgaaatactataaaacactgagagtatctatgtctttctgaatttaaaatgaaaattcatgtccatatggagacttacatattccccaatctttccatgaattgcatttttttctaatacttatctctgttaagactccattgaaagttaaacaaaaagccgatataatagtttgggttttttttttttgcttattttagtattttgaatcagagaatacttggccaagctcgtatttgtaaactaaaaccccttgttatttgtatcttctgcatttcagttttactgtaagaacatacattttgaaattatgaacatttttttcataaaaattaaatgctttaagaaatggagaaggaaaaatagcttttatcaatttttttctcctcaagattctgtaataaacctcaaagtctggtgtagaatggtattttcccgtttgaggtcttggtagttttttttttttttttaaacatggtgccacttttaattaactaaatgttacaaaattctcagcatttgtttttgtctggtagtattattgagtcttttcatacacttcttaaaatgtgaaaatctatgttttcagtattatgacagtatctgcagatactataataatatgctttggccaaatttgctgtttatagagtgaaccaagatgtcagttttgtattggggatatgttttacataaatagaactcatttaaaagtatggttcaagtactgctcttctttttatggggaaattgatttttaaggagcgattcttttcctatataaaagctattgaggcttagctttattcatacatgagtgatttggttataactcaatcaaaatttttatctttaaatctgagacaagtattatatttaaaactagatctattaatacattcatcactgcctgaaaatttgctgttctaatgtttgtgaattttcactcattacctagagtaaacttattgcatattttcataatcagtcaaaataataaaactaaaaacaaaaagtaaaaattagttcccaagtaaatatatcagtgtttcctgtgtttgggcagaagtgcaaagtagttttaatttctcacgttgtagaaaaagaggccaaaaaggtcaccttagtttatttttccaaaacataactttaggtattctaatgtattttgttagttgcttagaaatggaaataaaatatatgtgcttattaaataatgcacagtacactagattatagagtttatttttgcttttatgctttaaagaatgcatgcccaaaacactactaccaacaggaggattttttaaaatcacagaattgatatttatctcaagactatcttaagctaatgtacttctgttacataattaaactatttctgctattatttttaaagcagtattattttataaccaattctaaaattcagctttaaaaatattgaacataccttcctaccacttacgcttcaagtttcatttattgaataccagggtcatatcttagaattgtatataaaacaacatgtaacccattcatgaaaaacgtttttaagtattgctttttgctgctatgttctgcattgagcctagttttgccattgtcccctgaatgtagtattatctatagattatacataactacatctattgcttttggtggtaaatcaagatttagttgtaattttccagctgtgaaaatgttgccttgtatttaaaagggtttcatgaatggaaacctaagtaaaactaagctcattagtgacagacttgttttcttcttgttattcctccagcaactccctcaccaccacgcctccctgcctaccatccccggaagggtgcttattctttaacaaagagaatctaaaaaaaaaaacaaaaaactgttgtctaatatatctacagtaaatgttacactagagcttttattttcctctgtagcttttcagaagaagcaatttaccttggatttgtaaatcaagctgaaacttttttgatgttcatgtactcatatgtcttgtaggtggtaggtgtcacttgtgtgtatgtgtaagtgaagtatgatgcatgctcattcacttggtccctttgaaataagggaaaggatcacagtgctgctgggccatgatggtatgtagaagggtctgtcagcacacatggaaagcccccatttgcacagatgtagaactttaataatccagatgcaatcattggaagtatttaatatgcaattggtagcaccttagctaattaatctgcatatgaagcattttctgatatatttaataagaggtatagaagctcttcaagcattaaaatagagttgatgtttcattccatttgttttatccatcaaaaaatgcactctcacagtggagttgaagtctaatacatgatacatgtgggcctgttagtcttcgaagcttccagatggtttgtgttttgaggtacaaaaaaatgctgcagatctagaaatgcatatatttagcgggtatttgaaagatagaagcattatttataactgaagagtataacacttatcttcttaagtaaatgctctcataacttgtatacatttttgcaggtacaaattcaaaagtatgtaagcattgtataatgtgacaattgtataatttatgtaatctgatgcatgaatcagaatttttatataatatatgattattgacttatagttgattaaagtgtttaaactt

SEQ ID NO: 24806 - DNA, 1313 bp, Homo Sapiens
ggctacgcaagaccttcagttccggattaggaggccccgccccccggcccgagggaggggcggagagacccgctcctgcgacttagggcgatgccaccttaaagggcttgacctcctcgaagccagaactgcggaagaggatggagaaagaaacgctagatagacccaggattcgaacccacaacagcttggatgcaaagctcattttgaattctgaagagctgggagtttagcagtggacgaccaaacaaaaaaataccagaagacggtgaaagcagcagctggaaatgagagaaaaattaagaaatagaaaatgctgtttcatgtattagggagtgcacatctttaaagagaagtgaagaacctttttggctaggcgctttctggggaccttggcagttatcaacaagtcactctgaaactaacagaaggtgaggagggagtaatccagaaaggaaactgccatttttgctagggcaagaaagtagacctagcaatgcaatgccatcaaggagttagctggctctagcgttctccgaactttgcaactcattttatattacattgtctgcgtcaagaaatttcaagtaaatgccttgagattttatatgtataaaatgtagtctctggccaggcggggtggctcacgcctgtaatcccagcactttgggaggctgaggcgagtagatcacgatgtcaggagatcaagaccatcctggctaacatggtgaaaccccgtctctactaaaaaatacaaaaaattagccgggcatgatggtgggcgcctgtagtcccagctactcgggaggctgagacaggagaatggtgtgaacccgggaggcagagcttgcagtgagccgagatcgcgccactgcactccagcctgggcgacagagcgagactccgtctcaaaaaaaaaaaaaaaaaaaaaagtctcagaagaagtgtcaagttgactaaatgatttttaagtcccttccactctactatatcacaataatttcccctattttaccttatttaattttcacaacaaccctgcagcctgtaagtaggtgactcctccatggtcagcaggtggtcagtggtcgaactatttaggactatctgatgctctttcctctgctcaccattgcaatacaatgagaaaaatgcaaatgaatctaagtacagtgttctctgggaatatgaagatagaactaaaaactgcctgagagatcagggcaggcttctagaaagttgtgtctaactagtcttgaggtttacataaaccacaccaggctgatgggactgggaagggcccactaagcagt

SEQ ID NO: 24807 - DNA, 3084 bp, Homo Sapiens
aaatttttggctgcctctgtcggtctgttcagttaccacgtgaaccgccgacggagacccgtagtgggggaggcggcggcagcgttaagtgagaaaggaaaaaagacaacgaggaaaaaggaggtgtccgggtagggcaacgcggcgacacccgaggcctggtggtggcggcggatcgagatattcaaggctgaagcagctacggaacggcagcggcggcggtcggacaaactgactgaccgagccgggtggtggcgggagcagcgggagcagccggaacgatgccggccgtgagcctcccgcccaaggagaatgcgctcttcaagcggatcttgaggtgttatgaacataaacagtatagaaatggattgaaattctgtaaacaaatactttctaatcccaaatttgcagagcatggagaaaccttggctatgaaaggattaacattgaactgtttggggaaaaaggaagaagcttatgaattggttcgtagaggtttgagaaatgacttgaagagtcatgtgtgttggcacgtttatggccttcttcagaggtcagacaagaagtatgatgaagccattaagtgttacagaaatgcactaaaatgggataaagacaatcttcaaatcttaagggacctttccttactacagattcaaatgcgagatcttgagggttacagggaaacgaggtatcagttacttcagcttcgacctgcgcagagagcatcatggattggttatgctattgcttaccatttattagaagattatgaaatggcagcaaagattttagaagaatttaggaaaacacaacagacatcccctgacaaggtggattatgaatatagtgaactactcttatatcagaatcaagttcttcgggaagcaggtctctatagagaagctttggaacatctttgtacctatgaaaagcagatttgtgataaacttgctgtagaagaaaccaaaggggaacttctgttgcaactatgtcgtttggaagatgctgcagatgtttatagaggattgcaagagagaaatcctgaaaactgggcctattacaaaggcttggaaaaagcactcaagccagctaatatgttagaacggctaaaaatttatgaggaagcctggactaaatatcccaggggactggtgccaagaaggctgccgttaaactttttatctggtgagaagtttaaagaatgtttggataagttcctaaggatgaatttcagcaagggttgcccaccagtcttcaatactttaagatcattatacaaagacaaagaaaaggtggcaatcatagaagagttagtagtaggttatgaaacctctctaaaaagctgccggttatttaaccccaatgatgatggaaaggaggaaccaccaaccacattactttgggtccagtactacttggcacaacattatgacaaaattggtcagccatctattgctttggagtacataaatactgctattgaaagtacacctacattaatagaactctttctcgtgaaagctaaaatctataagcatgctggaaatattaaagaagctgcaaggtggatggatgaggcccaggccttggacacagcagacagatttatcaactccaaatgtgcaaaatacatgctaaaagccaacctgattaaagaagctgaagaaatgtgctcaaagtttacaagggaaggaacatcagcggtagagaatttgaatgaaatgcagtgcatgtggttccaaacagaatgtgcccaggcttataaagcaatgaataaatttggtgaagcacttaagaaatgtcatgagattgagagacattttatagaaatcactgatgaccagtttgactttcatacatactgtatgaggaagattacccttagatcatatgtggacttattaaaactagaagatgtacttcgacagcatccattttacttcaaggcagcaagaattgctatagagatctatttgaagcttcatgacaacccccttacagatgagaataaagaacacgaagctgatacagcaaacatgtctgacaaagagctaaagaagctacgtaataaacaaagaagagctcaaaagaaagcccagatagaagaagagaaaaaaaatgcagaaaaagaaaagcagcagagaaatcagaaaaagaagaaggatgatgatgatgaggagataggaggtccaaaagaagaacttattccagagaaactggccaaggttgaaactccattggaagaagctattaaatttttaacaccgttgaagaacttggtgaagaacaagatagagactcatctttttgcctttgagatttactttaggaaagaaaagtttcttttgatgctacaatcagtaaagagggcatttgctattgattctagtcatccctggcttcatgagtgtatgattcgtctcttcaatactgcagtgtgtgaaagtaaagatttatctgatacagttagaacagtattaaaacaagaaatgaatcgtctttttggagcaacgaatccaaagaattttaatgaaacttttctgaaaaggaattctgattcattgccacacagattatcagctgccaaaatggtatattacttagatccttctagtcagaagcgagctatagagttggcaacaacacttgatgaatctctcactaacagaaacctccagacatgtatggaggtattggaagccttgtatgatggtagcctaggagactgtaaagaagctgctgaaatttatagagcaaattgtcataagcttttcccttatgctttggctttcatgcctcctggatatgaagaggatatgaagatcacagttaatggagatagttctgcagaagctgaagaactggccaatgaaatttgaacatcactaaacaagcaaatggaatgactttggaccatatctagtatataatatttttgtcacgcacctgctgcattgctctaacttacacagaatgagaggagtaaatgttcttgccttcaaatagtgttttacgttttttatcctgctgaaaaagtatatataaaatatctaacattacaggatagaggttcagtttctt

SEQ ID NO: 24808 - DNA, 1129 bp, Homo Sapiens
atgcttctgccgggacgcgcacgccaaccgccgacgccccagcccgtgcagcatcccggcctccgccggcaggtagagccgccggggcagctcctgcgcctcttctactgcactgtcctggtctgctccaaagagatctcagcgctcaccgacttctctgaaggtgctggacgaatgccagaaccagcgggcctgccacctcctggtcaatagccgtgtttttggacctgacctttgtccaggaagcagtaaatacctcctagtctcctttaaatgccaacctaatgaattaaaaaacaaaaccgtgtgtgaagaccaggagctgaaactgcactgccatgaatccaagttcctcaacatctactctgcgacctacggcaggaggacccaggaaagggacatctgctcctccaaggcagagcggctcccccctttcgattgcttgtcttactcagctttgcaagtcctatcccgaaggtgctatgggaagcagagatgcaaaatcatcgtcaacaatcaccattttggaagcccctgtttgccaggcgtgaaaaaatacctcactgtgacctacgcatgtgttcccaagaacatactcacagcgattgatccagccattgctaatctaaaaccttctttgaagcagaaagatggtgaatatggtataaacttcgacccaagcggatcgaaggttctgaggaaagatggaattcttgttagcaactctctggcagcctttgcttacattagagcccacccggagagagctgccctgctgttcgtgtccagtgtctgcatcggcctggccctcacactgtgcgccctggtcatcagagagtcctgtgccaaggacttccgcgacttgcagctggggagggagcagctggtgccaggaagtgacaaggtcgaggaggacagcgaggatgaagaagaggaggaggacccctctgagtctgatttcccaggggaactgtcggggttctgtaggacttcatatcctatatacagttccatagaagctgcagagctcgcagaaaggattgagcgcagggagcaaatcattcaggaaatatggatgaacagtggtttggacacctcgctcccaagaaacatgggccagttctactga

SEQ ID NO: 24809 - DNA, 5419 bp, Homo Sapiens
ctccctctcctatcggagcacaatgaaagcctgtgtatcgccgtgactccgggcgggagccagtgtcagcaaagcggctaacaacagacgagaaagagaaaggaaaatacaagctactttttttttccatctataaagcggagcaaatacaggagatagaaccagattgcttattgcgagtccagaccctcagatccactggccggggatggaatgtacaaaagtggacagaaaagtggctggacatgactcggtgcaatttgctggaagtttgtaagtttgaccatcgtttgtaaattactctcggaagagtttgtctctcttgatactgtattagaatagagccgggggtgaggaatagaaacgtaagcgggaaagaaaaaaatgtgttgaaggatctctctcagtggctagcgacttaagattgcttttcatttaaggctaggaaaccttagagggagtgaggattttaccggtgattggattagctgaagaaaaaagcatggtccaaaagtccaattactgacattgttaacagttgaaaagctgtctccctcttttgggagaagacaacatcctacagtaccccaaagaggagaaaacaccggagcgaaaggaaagggaggaaaaattaaaagccaaaagacagtctcccttgatttttgcacattttgaacagtgacttaaacatcttctgaaacagcactgttttgttttgttttggttttttatttaacctgaggaaaagtcaaggctgctggttacatagacatggtagaaatgtgtttctctgcagaaacatccccataaagaattgtcggaaacaactaggtgagggggagtcctctctattaatacctctctcaataccttttgctgtgtgtttctgtctcttgctggacaatccctgaattcttgatctaacccccagatcgtgtgtttacaaagtacctagtggctcttgtcagcttggtggaggaaaaaaaatccaccaactctgtccaacttctccagagctgtcaaatgcaattagagtaagttaatcagggtttgtttccaacttatcctccccccagttggtttctattctttctccccaccctctttttactaactcccctcccccacaacttctccacggctcccccacaacctctgaagacctctattcatgtggccctgaacactgagctcacattgtcaaaaacagacttgcctgcaatagccagcagtagcctctttccacctcaccatcccagaggcagcaatcattgtgtccggtaagatgggggacacagcgcccccgcaggcccccgcaggagggctagggggggcctctggggcggggctccttggagggggctcagtcaccccgagagtgcacagtgctatcgtggagcgcctccgggctcggatcgctgtctgccgccaacaccacctgagctgtgaaggacgatatgaacgaggtagggccgagagctcagaccgggaaagagaaagcaccttgcagctcctgagccttgtacagcatggccagggggcaaggaaagctggcaaacacaccaaggccaccgccactgctgccaccactacagcccctccaccgccccctgctgcccctcctgcggcctcccaagcagcagcaacagcagccccaccgcccccaccagactatcaccatcaccaccagcagcacctgctgaacagtagcaataatggtggcagtggtgggataaacggagagcagcagccgcccgcttcaaccccaggggaccagaggaactcagccctgattgcgctccagggttccttgaaaagaaaacaggtagttaacctatctcctgccaacagcaagcgacccaatggctttgtggacaactcatttcttgatatcaaaagaattcgtgttggggagaatctctctgcaggacaaggtggcctccaaataaacaatggacaaagtcagattatgtcagggaccttgcctatgagccaagcacccctgcgaaagactaacactctgccatcccatacacattctcctggcaatggcctgtttaacatgggcttaaaggaggtaaagaaggagccaggagagactctgtcttgcagtaagcacatggatggccaaatgacccaagagaatatttttcctaataggtacggagacgaccctggagaacaactgatggatcctgagctgcaggaactgttcaatgaactgaccaacatatctgtgcctcccatgagtgaccttgaactggagaacatgatcaatgccaccataaagcaggatgacccatttaacattgacttgggtcagcaaagccagaggagcacacctaggccctccttacccatggagaaaatagtgatcaaaagtgaatactcaccgggcttgactcagggcccctcaggctctcctcagctgaggcccccatcagctggccccgcattctccatggccaactctgccctctccacttcgtctccaatcccttcagtccctcagagccaggctcagcctcagacaggctccggagcaagccgggccttgccaagctggcaggaagtatcccatgcccagcagctcaaacagatagctgctaatcgtcagcagcatgcccggatgcagcagcaccagcagcagcaccagcctaccaactggtcagccttgccctcctctgctggaccatcaccaggtccatttgggcaggagaaaatccccagcccttcttttggtcagcagacattcagcccacagagctcccccatgcctggggtagctggcggcagcggccagtcgaaagtaatggctaactacatgtacaaggccggcccctcagcccagggtgggcacctagatgtcctcatgcagcaaaagcctcaggatctcagtcgaagttttattaacaacccgcacccagccatggagccccgtcagggcaacaccaagcctttgtttcattttaactcagatcaagcgaaccagcagatgccttctgttttgccttcccagaacaagccttctctcctacactacacccaacagcaacagcagcaacagcagcagcagcagcagcagcagcagcagcaacagcagcagcagcagcaacagcaacagcaacagcaacagcagagttcaatttcagctcaacaacagcaacagcagcagagctcaatttcagcccaacagcagcagcagcagcaacaacagcagcagcagcagcaacaacaacagcaacaacagcagcagcagcagcagcaacaaccatcttctcagcctgcccaatctctaccaagccagcctttgctaaggtcacctttgccacttcagcaaaagctcctacttcagcaaatgcagaatcagcccattgcaggaatgggataccaagtctcccaacaacagagacaggatcaacactctgtggtaggccagaacacaggccccagtccaagtcctaacccctgctcaaatccaaacactggaagtggttacatgaactcccagcaatcactgttgaatcagcaattgatgggaaagaagcagactctacagaggcagatcatggagcagaaacagcaacttcttctccagcagcagatgctggctgacgcggagaaaattgctccacaagatcagataaaccgacatttgtcaaggccacctccagattataaagaccaaagaagaaatgtgggcaatatgcaaccaactgctcagtattctggtggctcatccacaataagcttaaactctaaccaggctttggcaaacccagtttcaacacacaccattttaactcccaattccagcctcctgtctacttctcacgggacaagaatgccatcattatctacagcagttcagaatatggggatgtatggaaatctgccttgtaatcaacctaacacatacagtgtcacttcaggaatgaatcaattgacccaacagagaaacccaaagcaattgttagcaaatcaaaacaaccctatgatgccacggccacctaccttagggccaagtaataataacaatgtagccacttttggagctggatctgttggtaattcacaacaattgagaccaaatttaacccatagtatggcaagcatgccaccacagagaacatcaaacgtaatgatcacatccaacacaactgcaccaaactgggcctctcaagaaggaacaagcaaacagcaagaagccctgacgtctgcaggagtccgcttccccacaggtacacctgcagcctataccccaaatcagtcactgcaacaggcagtaggtagccagcaattttcccagagggcagtggctcctcctaaccagttaacaccagcagtgcaaatgagacccatgaaccaaatgagccaaacactaaatgggcaaaccatgggtcccctcaggggtctgaatctcagacccaatcagctaagcacacagattttgcctaatttgaatcagtcaggaacagggttgaatcagtcgaggacgggcatcaaccagccaccatccctgacgcccagcaattttccttcacccaaccaaagttccagggcttttcaaggaactgaccacagcagtgacttagcttttgacttcctcagccaacaaaatgataacatgggccctgccctaaacagtgatgctgatttcattgattctttattgaagacagagcctggtaatgatgactggatgaaagacatcaatcttgatgaaatcttggggaacaattcctaaagaagaaagggaagacaatttacaaactccaagcactaaaaggcagtatattacagaaactctgtagaggctgaactgttgatgttcaggtggactacatgaagataacatgcttaaaaatggaaagcagaaagtaactgcagtgatgaacattttggtccaaattcttgttttaaatcttacacctgaaagtaaaatattgggatcacttttccctgtctaaactccaggatacagtatccaatttatccaaacagaactgtggtgtcaatgtgtaattaattgtgtaaaatagccttcccaagtttctttttccctggaaaataaaaaaggtaatagaacttgtagtttatttaaaccccatgtcatgaggaggtactagttccaagcaacaaactccttaatttgctctaatagataggtatggtttaatctttccattgtgtcttttcatttaattttcctgaagcttgcaggatagattgaaatgttataggtttgtttggagtaaccaaacagtatgcaaattaagaaaaagccagagaacctagaaaacatccagtggattacagaatttcttccccatattcactcctcacttttacaattttcccacaatcctctacttcagtgggatgctgtgtctagtgattaaacaaaaatatagagctg

SEQ ID NO: 24810 - DNA, 1958 bp, Homo Sapiens
ctgagcgtgggcctcagaaagaagttaaggcacccgcgagccgggcaactgccctccttccgcgccggcggagcgattaaagtgaagaaacaatggccagcaatcacaaatcttcagcagctcgccctgtttcaagaggtggagttgggttaacaggaaggcctccttctgggatacgacccctatcaggaaatattcgagtggcaactgcaatgccacctgggacagcaagaccaggttctcgtggttgtcccatagggactggtggagttctgtcttctcaaatcaaagttgcccatcgccctgtaacacaacaaggtttgactggaatgaaaactgggacgaaaggtccccagaggcaaattttagacaaatcttactatcttgggcttcttagaagtaaaataagtgaacttacaactgaagttaataaacttcagaagggaatagaaatgtacaatcaagagaattcagtatatttgtcatatgaaaagagggctgagactttagctgttgagataaaagagcttcaaggacaactagcagactacaacatgttggtagataaacttaataccaacactgaaatggaagaagtaatgaatgattacaatatgcttaaagctcaaaatgatcgagaaacacaaagtttggatgtcatatttactgaaagacaagcgaaagaaaaacaaatcagaagtgtcgaagaagaaattgaacaggaaaaacaagcaacagatgacattatcaaaaatatgtcttttgaaaaccaagtcaagtacctagagatgaaaaccacaaatgagaaactgttacaggaattagatacacttcaacaacaattggattcacagaacatgaaaaaagagagcctggaagcagaaatagctcactcccaggtgaaacaggaggcggtattgctgcatgaaaaactttatgagttggagtcccatcgagatcaaatgattgcagaagacaaaagcataggatctccaatggaagagagagagaaattacttaagcagattaaagatgataatcaggaaatagccagcatggaaagacagttaacagatacaaaagaaaagataaatcagtttattgaagaaattagacaacttgacatggatttagaggaacaccaaggtgaaatgaaccagaaatacaaggagctaaagaaaagggaggaacatatggacacttttattgagacttttgaggaaacaaagaatcaggaactgaaacgaaaggcacagatagaagccaacattgttgcactcttggagcactgcagtcgaaatataaatcgtatagaacagatatcctctatcaccaatcaagagctaaagatgatgcaggatgacctcaattttaaatctactgaagtgcagaaatcacaaagtacagctcagaatttgacttcagacattcaacgtctgcagttggatctgcagaaaatggagcttctagaaagtaagatgactgaagaacagcattctctaaaaagcaaaattaagcaaatgacaactgatctggagatatataatgatttgccagctttaaaatcatcaggtgaagaaaagataaagaaattacatcaggagagaatgatattatcaacccacagaaatgcctttaagaaaataatggagaagcaaaacatagagtatgaggcactaaaaacacaattgcaagaaaatgagacacattctcagcttacaaatttggagagaaagtggcaacaccttgagcaaaataattttgcgatgaaagaattcatagcaaccaagagtcaagagagtgattaccagccaattaagaaaaatgtgaccaagcagattgcagagtacaataaaaccatcgtggatgctttacatagcaccagcggaaactgagtttaagtccactgaaagtctctaaggaagtatcctcttgctgctaaacttggtacaagttga

SEQ ID NO: 24811 - DNA, 1198 bp, Homo Sapiens
ctgcctgcagaccttcccgttggaggccatcactgccttcatggaccacaagaagctgggctgtcagctcttcagaggccccagccgcggccagggctcagaacgagaggagctgaaggccttgagctgcctgcgctgtggcaaacagttcacagtggcctggaagctgctgcgtcacgcccagtgggaccacggactgtccatctaccagacagaatcagaggccccggaggccccgctcctgggcctggccgaggtggctgcagccgtgtcggcagtggtggggccagcagctgaggccaagagcccccgtgcaagtggcagcggcctcacccggcggagccccacctgtcctgtgtgcaagaagaccctcagctccttcagcaacctcaaagtgcacatgcgctcacacacaggcgagcggccctatgcttgcgaccagtgtccctacgcctgcgcccagagcagcaagctcaaccgccacaagaagacccaccggcaggtgccgccccagagccccctcatggccgacaccagccaggagcaggcctctgcagcccctccggagccggctgtccatgctgctgcccccaccagcacccttccatgcagcggtggtgagggggctggagccgccgccacagcaggtgtccaggaacccggggctcctggcagtggggctcaagccggccctggtggagacacttggggagccatcaccacggaacaaagaactgaccctgcaaacagccagaaggcatcacccaaaaagatgcccaagtcagggggcaagagccgcgggcccgggggcagctgtgagttctgcgggaagcattttaccaacagcagcaacctgacggtgcaccggcgctcacacaccggggagcgcccctacacctgtgagttctgcaactacgcctgcgcccagagcagtaagctcaaccgccaccgccgcatgcacggcatgacgcctggcagcacccgcttcgagtgcccccactgccatgtgcccttcggcctgcgagccaccctggacaaacacctgcggcagaagcaccctgaggcggccggcgaggcctgagcccaggaaagcccccctcactgtccctggtaccgctgccaacacccattgacctcctcgtttttgcccgccttctccaagtaaattttcccttttatttaaaaaaaaaaaaaaaaa

SEQ ID NO: 24812 - DNA, 2117 bp, Homo Sapiens
ggattcagccagttgacagaactaagggagatgggaaaagcgaaaatgccaacaaacggcccgcatgttccccagcatcctcggctcctgcctcactagctgcggagcctctcccgctcggtccacgctgccgggcggccacgaccgtgacccttcccctcgggccgcccagatccatgcctcgtcccacgggacaccagttccctggcgtgtgcagaccccccggcgcctaccatgctgtacgtcggtgaccccgcacggcacctcgccacggcccagttcaatctgctgagcagcaccatggaccagatgagcagccgcgcggcctcggccagcccctacaccccagagcacgccgccagcgtgcccacccactcgccctacgcacaacccagctccaccttcgacaccatgtcgccggcgcctgtcatcccctccaacaccgactaccccggaccccaccactttgaggtcactttccagcagtccagcacggccaagtcagccacctggacgtactccccgctcttgaagaaactctactgccagatcgccaagacatgccccatccagatcaaggtgtccaccccgccacccccaggcactgccatccgggccatgcctgtttacaagaaagcggagcacgtgaccgacgtcgtgaaacgctgccccaaccacgagctcgggagggacttcaacgaaggacagtctgctccagccagccacctcatccgcgtggaaggcaataatctctcgcagtatgtggatgaccctgtcaccggcaggcagagcgtcgtggtgccctatgagccaccacaggtggggacggaattcaccaccatcctgtacaacttcatgtgtaacagcagctgtgtagggggcatgaaccggcggcccatcctcatcatcatcaccctggagatgcgggatgggcaggtgctgggccgccggtcctttgagggccgcatctgcgcctgtcctggccgcgaccgaaaagctgatgaggaccactaccgggagcagcaggccctgaacgagagctccgccaagaacggggccgccagcaagcgtgccttcaagcagagcccccctgccgtccccgcccttggtgccggtgtgaagaagcggcggcatggagacgaggacacgtactaccttcaggtgcgaggccgggagaactttgagatcctgatgaagctgaaagagagcctggagctgatggagttggtgccgcagccactggtggactcctatcggcagcagcagcagctcctacagaggccgagtcacctacagcccccgtcctacgggccggtcctctcgcccatgaacaaggtgcacgggggcatgaacaagctgccctccgtcaaccagctggtgggccagcctcccccgcacagttcggcagctacacccaacctggggcccgtgggccccgggatgctcaacaaccatggccacgcagtgccagccaacggcgagatgagcagcagccacagcgcccagtccatggtctcggggtcccactgcactccgccacccccctaccacgccgaccccagcctcgtcaggacctgggggccctgaagatccccgagcagtaccgcatgaccatctggcggggcctgcaggacctgaagcagggccacgactacagcaccgcgcagcagctgctccgctctagcaacgcggccaccatctccatcggcggctcaggggaactgcagcgccagcgggtcatggaggccgtgcacttccgcgtgcgccacaccatcaccatccccaaccgcggcggcccaggcggcggccctgacgagtgggcggacttcggcttcgacctgcccgactgcaaggcccgcaagcagcccatcaaggaggagttcacggaggccgagatccactgagggcctcgcctggctgcagcctgcgccaccgcccagagacccaagctgcctcccctctccttcctgtgtgtccaaaactgcctcaggaggcaggaccttcgggctgtgcccggggaaaggcaaggtccggcccatccccaggcacctcacaggccccaggaaaggcccagccaccgaagccgcctgtggacagcctgagtcacctgcagaacc

SEQ ID NO: 24813 - DNA, 2867 bp, Homo Sapiens
cgaggtggtgaggagagctggttgcgtgagtctcctcagctctgcttaccggtgcgactagcggcagcgacgcggctaaaagcgaaggggcgagtgcgagtcccctgagctgtacgaacgcggtcgccatggaccgcccagatgaggggcctccggccaagacccgccgcctgagcagctccgagtctccacagcgcgacccgcccccgccgccgccgccgccgccgctcctccgactgccgctgcctccaccccagcagcgcccgaggctccaggaggaaacggaggcggcacaggtgctggccgatatgaggggggtgggactgggccccgcgctgcccccgccgcctccctatgtcattctcgaggagggggggatccgcgcatacttcacgctcggtgctgagtgtcccggctgggattctaccatcgagtcggggtatggggaggcgcccccgcccacggagagcctggaagcactccccactcctgaggcctcgggggggagcctggaaatcgattttcaggttgtacagtcgagcagttttggtggagagggggccctagaaacctgtagcgcagtggggtgggcgccccagaggttagttgacccgaagagcaaggaagaggcgatcatcatagtggaggatgaggatgaggatgagcgggagagtatgaggagcagcaggaggcggcggcggcggcggaggaggaagcagaggaaggtgaagagggaaagcagagagagaaatgccgagaggatggagagcatcctgcaggcactggaggatattcagctggatctggaggcagtgaacatcaaggcaggcaaagccttcctgcgtctcaagcgcaagttcatccagatgcgaagacccttcctggagcgcagagacctcatcatccagcatatcccaggcttctgggtcaaagcattcctcaaccaccccagaatttcaattttgatcaaccgacgtgatgaagacattttccgctacttgaccaatctgcaggtacaggatctcagacatatctccatgggctacaaaatgaagctgtacttccagactaacccctacttcacaaacatggtgattgtcaaggagttccagcgcaaccgctcaggccggctggtgtctcactcaaccccaatccgctggcaccggggccaggaaccccaggcccgtcgtcacgggaaccaggatgcgagccacagctttttcagctggttctcaaaccatagcctcccagaggctgacaggattgctgagattatcaagaatgatctgtgggttaaccctctacgctactacctgagagaaaggggctccaggataaagagaaagaagcaagaaatgaagaaacgtaaaaccaggggcagatgtgaggtggtgatcatggaagacgcccctgactattatgcagtggaagacattttcagcgagatctcagacattgatgagacaattcatgacatcaagatctctgacttcatggagaccaccgactacttcgagaccactgacaatgagataactgacatcaatgagaacatctgcgacagcgagaatcctgaccacaatgaggtccccaacaacgagaccactgataacaacgagagcgctgatgaccacgaaaccactgacaacaatgagagtgcagatgacaacaacgagaatcctgaagacaataacaagaacactgatgacaacgaagagaaccctaacaacaacgagaacacttacggcaacaacttcttcaaaggtggcttctggggcagccatggcaacaaccaggacagcagcgacagtgacaatgaagcagatgaggccagtgatgatgaagataatgatggcaacgaaggtgacaatgagggcagtgatgatgatggcaatgaaggtgacaatgaaggcagcgatgatgacgacagagacattgagtactatgagaaagttattgaagactttgacaaggatcaggctgactacgaggacgtgatagagatcatctcagacgaatcagtggaagaagagggcattgaggaaggcatccagcaagatgaggacatctatgaggaaggaaactatgaggaggaaggaagtgaagatgtctgggaagaaggggaagattcggacgactctgacctagaggatgtgcttcaggtcccaaacggttgggccaatccggggaagagggggaaaaccggataagggttttccccttttggggatcacctctctgtatcccccacccactatcccatttgccctcctcctcagctagggccacgcggccccacattgcacttctggggggtgaccgacttcgtacacgggtttaaagtttatttttatggtttagtcattgcagagttcttattttggggggagggaaagggggctagtccccttcttttggccctccgcccccgcaggcttctgtgtgctgctaactgtatttattgtgatgccttggtcagggcccctctacccacttctcccagtcagttgtggccccagcccctctccctgtgctgtgtggagtggacaccctgacccccgaagcggggagggccgctgtggccttcgtcacagccgcgcagtgcccatggaggcgctgctgccaccttcctctcccaagttctttctccatccctctcctcttcccgccgcgccgctagcccgcctcggtgtctatgcaaggccgcttcgccattgcggtattctttgcggtattcttgtccccgtcccccagaaggctcgcctctccccgtggaccctgttaatcccaataaaattctgagcaagttcaaaaaaaaaaaaaaaaaaaaaaaaaaaaaaaaaaaaaaaaaaaaaaaaaaaaaaaaa

SEQ ID NO: 24814 - DNA, 4281 bp, Homo Sapiens
ggctcctttattgagaatcaatgtcttctcctaggtaattgatcaccctagacccagggacacccaattcatcgtaatcatcatgaataatcaaaaagtggtagctgtgctactgcaagagtgcaagcaagtgctggatcagctcttgttggaagcgccagatgtgtcggaagaggacaagagcgaggaccagcgctgcagagctttactccccagcgagttaaggaccctgatccaggaggcaaaggaaatgaagtggcccttcgtgcctgaaaagtggcagtacaaacaagccgtgggcccagaggacaaaacaaacctgaaggatgtgattggcgccgggttgcagcagttactggcgtccctgagggcctccatcctcgctcgggactgtgcggctgcggcggctattgtgttcttggtggaccggttcctgtatgggctcgacgtctctggaaaacttctgcaggtcgccaaaggtctccacaagttgcagccagccacgccaattgccccgcaggtggttattcgccaagcccgaatctccgtgaactcaggaaaacttttaaaagcagagtatattctgagcagtctaataagcaacaatggagcaacgggtacctggctgtacagaaatgaaagtgacaaggtcctggtgcagtcggtctgtatacagatcagagggcagattctgcaaaagctgggtatgtggtacgaagcagcagagttaatatgggcctccattgtaggatatttggcacttcctcagccggataaaaagggcctctccacgtcgctaggtatactggcagacatctttgtttccatgagcaagaacgattatgaaaagtttaaaaacaatccacaaattaatttgagcctgctgaaggagtttgaccaccatttgctgtccgctgcagaagcctgcaagctggcagctgccttcagtgcctatacgccgctcttcgtgctcacagctgtgaatatccgtggcacgtgtttattgtcctacagtagttcaaatgactgtcctccagaattgaaaaacttacatctgtgtgaagccaaagaggcctttgagattggcctcctcaccaagagagatgatgagcctgttactggaaaacaggagcttcacagctttgtcaaagctgctttcggtctcaccacagtgcacagaaggctccatggggagacagggacggtccatgcagcaagtcagctctgtaaggaagcaatggggaagctgtacaatttcagcacttcctccagaagtcaggacagagaagctctgtctcaagaagttatgtctgtgattgcccaggtgaaggaacatttacaagttcaaagcttctcaaatgtagatgacagatcttatgttcccgagagtttcgagtgcaggttggataaacttatcttgcatgggcaaggggatttccaaaaaatccttgacacctattcacagcaccatacttcggtgtgtgaagtatttgaaagtgattgtggaaacaacaaaaatgaacagaaagatgcaaaaacaggagtctgcatcactgctctaaaaacagaaataaaaaacatagatactgtgagtactactcaagaaaagccacattgtcaaagagacacaggaatatcttcctccctaatgggtaagaatgttcagagggaactcagaaggggaggaaggagaaactggacccattctgatgcatttcgagtctccttggatcaagatgtggagactgagactgagccatcggactacagcaatgatgagggagctgttttcaacaagtctctgagtggcagccagacttccagtgcttggagcaacttatcagggtttagttcctctgcaagctgggaggaagtgaattatcacgttgacgacaggtcagccagaaaagagcctggcaaagaacatctggtggacactcagtgttccactgccttgtctgaggagctagagaatgacagggaaggcagagctatgcattcattgcgttcacagcttcatgatctctctcttcaggaacccaacaatgacaatttggagccttctcaaaatcagccacagcaacagatgcccttgacacccttctcgcctcataataccccaggcattttcttggcccctggtgcagggcttctagaaggagctccagaaggtatccaggaagtcagaaatatgggacccagaaatacttctgctcactccagaccctcatatcgttctgcttcttggtcttctgattctggtaggcccaagaatataggcacacatccttcagtccaaaaagaagaagcctttgaaataattgttgagtttccagaaaccaactgcgatgtcaaagacaggcaggggaaagagcagggagaagaaattagtgaaagaggcgcaggccctacatttaaagctagtccctcctgggttgacccagaaggagaaacagcagaaagcactgaagatgcacccttagactttcacagggtcctgcacaattctctgggaaacatttccatgctgccatgtagctccttcacccctaattggcctgttcaaaatcctgactccagaaaaagtggtggcccagtcgcagagcagggcatcgaccctgatgcctccacagtggatgaggaggggcaactgctcgacagcacggatgttccctgcacaaatgggcacggctctcatagactgtgcattctgagacagccgcctggtcagagggcggagacccccaattcctctgtaagcggtaacatcctcttccctgtcctcagcgaggactgcactaccacagaggaaggaaatcagcctggaaacatgctaaactgcagccagaactccagctcatcctcagtgtggtggctgaaatcacctgcattttccagtggttcttctgagggggacagcccttggtcctatctgaattccagtgggagttcttgggtttcattgccgggaaagatgaggaaagagatccttgaggctcgcaccttgcaacctgatgactttgaaaagctgttggcaggagtgaggcatgattggctgtttcagagactagagaatacgggggtttttaagcccagtcaactccaccgagcacatagtgctcttttgttaaaatattcaaaaaaatctgaactgtggacggcccaggaaactattgtctatttgggggactacttgactgtgaagaaaaaaggcagacaaagaaatgctttttgggttcatcatcttcatcaagaagaaattctggggaggtatgttgggaaagactataaggagcagaaggggctctggcaccacttcactgatgtggagcggcagatgaccgcacagcactatgtgacagaatttaacaagagactctatgaacaaaacattcccacccagatattctacatcccatccacaatactactgattttagaggacaagacaataaagggatgtatcagtgtggagccttacatactgggagaatttgtaaaattgtcaaataacacgaaagtggtgaaaacagaatacaaagccacagaatatggcttggcctatggccatttttcttatgagttttctaatcatagagatgttgtggtcgatttacaaggttgggtaaccggtaatggaaaaggactcatctacctcacagatccccagattcactccgttgatcagaaagttttcactaccaattttggaaagagaggaattttttacttctttaataaccagcatgtggaatgtaatgaaatctgccatcgtctttctttgactagaccttcaatggagaaaccatgcacatagaatacggcacagtctggtcctttggggcttgggcagggccgtgacacaggttctggccaatgatttgcaagaggaattgatcagtatcactttaagtcctgcatttaattggcagcacaagatcctgcagagcctctttccctctgccacagttatcaagaatgggtcaggagaccgctgcttctgggcataagtcctgcaaggaaagcaacatggaaaacagccccaactcacccatgagggatgaaaagcactcttgagaaaggcatgtgttgtttaagccattgagattttagagctttttgtcactatctgtcaagactgatactactggggcttttcctattgatttgggagttctttacatattaaaaaaatgtgagcctttgtgatacgaattcaatttgttttcctgtcttttgacatttgactttgcataaaagtttatctgtgcataattttaa

SEQ ID NO: 24815 - DNA, 2402 bp, Homo Sapiens
  misc_feature (2095)..(2095): n is a, c, g, or t
actataacggtcctaaggtagcgaggcctgggtggcgaattcggcacgaggcaacctcctgctgggacttttctatgtctttggcatcattctggcaccagcaggcagtctgcccaaaatttaaggggacaagtagctccccccacgacatgtctccctttcttagaatatattaaagtcagagtctctgaggaaggaatgtgatttggcagtcagggtactaagcatgggtgggaactcctgccttataaaaattgtttttgtgttcttaaagataatatgttgtttttctgttttttgttttttccattttatggggaatttaaaaaccattcttgtatcagaaggtgaattaggcgcatggtctttgttttattaataatttccactagagggtgttctcaggtcactttgcagtgaagtggacttagttcctccttgttctgtacaaaatgtctccagactttgtaaaggagctgcccagtttggcctcctgtcccgaaaagaccctaataactaggcagagtgttgtcctgctttcttcgtctcgtaggatgtgctatgattggtgccaggcctcactaacacaggggctacctgtctcttattctcagcacctgtgtcctgagatacgctgcctgagacagagagagtccctcattaacagcctgtgtggctgtcagctttttgcctaaattgtgattcagatgcttttgttctctctcctttcacttattgccacagttgaggaaaagtgtcagattaccctgcagcaagacaagccaaggactgggagggaaaaaaaaaccactctggaggcaactgagaaaatcactgcttttggataggaatcagtagggtggctgttttccctttgttgaatctactagagtgacaggaaggactcccagccctttcagtaactatcaggagccctgaaacggtagaggcactgccatccttgtgggatactcaaagcccacagggcttttccctccctattgcatcttctgatgctccccacacctaccctccacctctccacctctgtggtgttcccatttgtgtgtttcccatctgtggagccagactgagcaatagcttagcagcgagtcagggacagctgccactttccacagagccacaggatgggcagagcagggacccagggaatgaatagccagtggacaaacagtcttgagctctgttcagccagagtgatgggccctgccagttaaggggctgtgtcttcatccttgaagacagatcacactcagagtggggcaattccagcatttatcctggctgcgtttcattgcattgtctgtgaagtataatttctgggccagaattgctcagttgcatttgatccaggactatagattggaaatgggtcatcattgttttctgttgtgattatagccattctagtaggcgtttaaggtcatggcctgcagaaaatgatgtaagaactagttcttaatctttcagatcaagctaatgatgatatggaaccttgagttcgaattgattggtttacttggaaaaaaacatgtttgaaaattgcaaaagttccgccgggcgcggtggctcatgcctgtaatcccagcactttgggaggccgagacgggcggatcacgaggtcaggagatcgagaccatcttggctaacacggtgaaaccccgtttctactaaaaatacaaaaaattagccaggcgtgttggcgggcgcctgtagtcccagctacctgggcggctgaggcaggagcatggcgtgaacccaggaggcggagcttgcagtgagctgagatcatgccactgcactccaacctgggggacacagcaagactccgtctcaaaaaaaaaaaaaaaaaaaaaaaaaacccaacatgccatccagactgaggaagacccggaaacttaggggccacgtgagccacggccacggccgcataggcaagcaccggaagcaccccggcggccgcggtaatgctggtggtctgcatcaccaccggatcaacttcgacaaataccacccaggctactttgggaaagttggtatgaagcattaccacttaaagaggaaccagagcttntgcccaactgtcaaccttgacaaattgtggactttggtcagtgaacagacacgggtgaatgctgctaaaaacaagactggggctgctcccatcattgatgtggtgcgatcgggctactacaaagttctgggaaagggaaagctcccaaagcagcctgtcatcgtgaaggccaaattcttcagcagaagagctgaggagaagattaagagtgttgggggggcctgtgtcctggtggcttgaagccacatggagggagtttcattaaatgctaactacttttaaaaaaaaaaaaaaaaaaaaaaaaaaa

SEQ ID NO: 24816 - DNA, 1617 bp, Homo Sapiens
atgtacatggaaaggatggacaaaagagctctgattagtttttgggaatctgtggaacatttaaagaatgctaacaagaatgaaattccacaattagttggtgaaatttatcagaatttctttgtggagagcaaagaaatatctgtggaaaaatcactttacaaagaaattcagcagtgtcttgtaggaaataaaggtattgaagtattctacaaaatccaggaagatgtttatgagaccctaaaggataggtattacccttcatttattgtcagtgacctgtatgagaaattgttgataaaagaggaagaaaaacatgcctcacagatgatttccaacaaggatgagatgggcccaagagatgaggctggtgaggaagccgtggatgatggtaccaatcagatcaatgaacaagccagttttgctgtaaacaaactgcgagaactaaatgagaaacttgaatataaaaggcaagctctaaattctattcaaaatgcaccaaaacctgacaagaagattgtttccaagttgaaggatgaaataatcctaatagagaaagaacgcacagaccttcagctgcacatggcaagaacggattggtggtgtgaaaaccttggcatgtggaaagcctccatcaccagtggagaggttacagaagagaatggtgagcaattgccatgttactttgtcatggtaagcctacaagaagttggaggagttgaaactaagaactggacggtccccagaaggctcagcgagtttcagaatttacaccggaaactcagtgagtgcgtcccttctttaaaaaaagtccagttgccttctcttagcaagctgcctttcaaatctatagatcaaaagtttatggaaaagtcgaagaatcaattaaataagtttttacagaatctgctttcagatgaaagactgtgtcagagtgaagcactttatgccttcttgagcccttctcctgactacctcaaggttatcgacgtgcaggggaaaaaaaattctttttcattatcctcatttttggaaagacttcctcgcgacttcttctcccaccaggaggaggagacagaggaggacagtgacctgtcagattatggtgatgatgtggatgggaggaaagacgccttggctgaaccatgtttcatgttgattggggagatttttgaacttcgaggaatgtttaaatgggtgagaagaacattaattgccctcgttcaggtcacttttggaagaaccatcaacaaacaaatccgggacacagtcagctggattttcagtgagcaaatgttggtttactacatcaatattttccgggatgctttttggccaaatgggaagttggcaccaccgaccacaatcagaagcaaagagcaaagtcaggaaacaaaacagagagcacagcaaaagctgcttgaaaacattccagatatgcttcagagccttgttggacagcaaaatgcccgccacggtataataaaaatattcaatgcactgcaagaaacaagagccaacaagcatctgttatatgcgctgatggaactgctgctaattgaactgtgtcctgagctgagagttcatttagatcaacttaaagctggccaagtttga

SEQ ID NO: 24817 - DNA, 10017 bp, Homo Sapiens
  misc_feature (630)..(630): n is a, c, g, or t
  misc_feature (8886)..(8886): n is a, c, g, or t
ggagaacgacacattggatacagaagggaggtgatcatgcaccatggcactggcccccagaacgtccagcatcagctgcagaggtccagggcctgccctggcagcgagggtgaggagcagccggcccaccccaacccacccccgtcccccgcagctcccttcgctccctcagcaagcccgtcggcaccccagtctcccagttatcaaatacagcagctgatgaataggagccctgcaaccgggcagaacgtgaacatcaccctgcagagcgtgggccctgtcgtcgggggaaaccagcagatcacactggccccactgccgctccccagccccacctctccaggcttccagttcagcgctcagcctcggcggtttgagcatgggtctccatcatacattcaggtcacgtcccccttgtcccagcaggtccagacccagagtcccacgcagcccagtccggggccggggcaggccttgcagaatgtgcgtgcaggtgcccctggccctgggctgggcctctgcagcagcagccctacagggggcttcgtggatgccagcgtgctggtgaggcagatcagcttgagcccctccagtggtggacactttgtgtttcaggatgggtcagggctnacccagatcgcccagggagcccaggttcagctccagcacccgggtacgcccatcacagtccgagagcggagaccctcccagccccacacacagtcagggggcaccatccaccacctgggaccccagagccctgcagccgcgggtggggccggcctgcagcccctggccagcccaagccacatcaccacggctaacttgccaccgcagatcagcagcatcatccagggccagctggttcagcagcagcaggtgctgcaggggccgccgctgccccggcccctgggcttcgagaggacacccggcgtgctgctccccggggctgggggcgcagcggggtttgggatgacgtccccacccccgcccaccagcccttccaggactgccgtgcccccaggcctttccagcctcccactcacgtctgtggggaacacgggaatgaagaaggttcccaagaagttagaggagattcccccagcctctccggagatggcacagatgaggaagcagtgcctggactatcattaccaggagatgcaggctctgaaggaggtcttcaaggagtatttgattgaactgtttttcttgcaacactttcaagggaacatgatggatttcttagctttcaagaagaaacattatgccccattacaagcatatcttaggcagaatgatttggacattgaagaagaggaggaggaggaggaagaggaggaagaaaaatctgaggttatcaatgacgagcagcaagccctcgcagggagcctggtagcaggggccggaagcacagtagagacggacctgtttaagaggcagcaggcgatgccctccacaggtatggcagagcagtctaagaggcctcgccttgaagtgggtcaccaaggggtagttttccagcacccaggggcggacgcaggcgttcctctccagcaactaatgccgaccgcacaaggaggaatgccccccacgccgcaggccgcgcagctcgctggacagaggcagagtcagcagcagtatgacccctccacggggcctcccgtgcagaacgctgccagcttgcacaccccactgccgcagctgcccgggaggctgcccccagccggtgttcccactgcagccctctcctctgcgctgcagtttgcacagcagccgcaagtggtagaggcccagacacagctccaaatcccggtgaagactcagcagcccaatgttcccatccctgcaccgcccagcagccaactccccatccctccctcgcagcctgcacagctggccctccacgttcccacacctggaaaggtgcaggtgcaggcctctcagctttcctccctgccacagatggtagcatcgacaaggctccctgtggaccctgccccgccctgcccacggcctctgcccacctcttctacctcgtccctcgcgcctgtgagtggctccggcccaggaccctcccctgctcgatcctctccagtaaatagaccttcctcagccaccaataaggcactatctccagtcacttcccggaccccaggggtggtggcatctgcccccaccaaaccacagagtcctgctcagaatgccacctcgtcccaagacagttctcaggatacgctgacagaacaaataactctggagaaccaggtgcatcagcgcattgcggagctgaggaaagcaggtctgtggtcccagaggcgtctgccaaagctgcaggaggccccacgccccaagtcccactgggactatctgctggaggagatgcagtggatggccacagactttgcccaggagaggaggtggaaggtggctgctgcgaagaagctcgttagaactgtggtgcgccatcacgaggagaagcagctccgtgaagaaagggggaagaaggaagagcagagcagactgaggcggatagccgcctccacggcccgggagatagagtgcttttggtcgaatattgaacaggttgtggaaataaaactacgagtagaattagaagaaaaaaggaagaaggccttaaatttacagaaagtttccaggagagggaaagaattgagacctaaaggatttgacgcattacaggaaagttctctggattcaggaatgtctggaagaaaaagaaaagctagcatatctttgactgatgacgaagtggacgatgaagaggaaacaattgaagaggaggaagcaaatgaaggcgttgtggaccaccaaacagaactttctaatttagccaaggaagctgagctgcccctcctggacctgatgaagctgtacgaaggcgccttcctgccgagttctcagtggccccggccgaagcctgatggggaggacacaagcggagaggaagatgcagatgactgtccaggcgacagggagagtcgcaaggacttggttctcatcgactcgcttttcatcatggatcagttcaaagctgccgagaggatgaatatcgggaagccaaacgccaaggacattgcggacgtcactgcggtggctgaagccatcctgccgaagggcagtgctcgggtcacaacctcggtcaagtttaatgctccatctttgttgtatggggctctcagagattatcagaagattggcctggactggctggccaaactttacaggaagaatctcaatggcatattggcagatgaagctgggctgggtaaaacagtgcagatcattgctttttttgcccacctagcttgtaacgaaggtaattggggcccccatcttgttgttgtgagaagttgtaacatactcaagtgggagcttgaattgaaacgttggtgtcccggactcaaaatcctctcatatattggcagccacagagaactcaaagcaaagagacaggagtgggccgaacccaacagcttccacgtctgcatcacgtcctacactcagttcttccggggcctcaccgccttcacacgagtgcgctggaagtgcctggtcattgatgagatgcagcgcgtgaagggcatgaccgagaggcactgggaagcggttttcaccctgcagagccaacaacgtctgcttctgatcgactcgccgctgcacaataccttcctggagctctggaccatggtgcacttcctggtcccagggatctccaggccctacctgagctcccctctgagggcccccagtgaagagagccaggattactaccataaagtggtcataaggttacacagggtgacacagccatttattttgaggagaactaagagagatgtggaaaagcaactaacaaagaaatatgagcatgttttgaagtgtcgcctttctaaccgacaaaaagccttatacgaggacgttatcctgcaacctggcactcaggaggccttgaagagcgggcactttgtcaacgtcctgagcatccttgtgcggctgcagcgcatctgcaaccaccctgggctcgtcgagccccggcacccaggctcttcctacgtggcggggccactggagtatccgtccgcatctctaatcctgaaggcactggagagagatttctggaaggaagcagatctttctatgtttgatctcatcggcttagaaaataaaatcactcgtcacgaggcagagttgctgtctaagaaaaagataccgcggaaactcatggaggaaatctccacttcagcagccccagcagcccgaccagcagcagcaaagctgaaggccagcaggttgtttcagcctgtgcagtatggccagaagcccgagggtcgcaccgtggctttccccagcactcacccgccccggacggcagcccccaccacggcctctgctgctccacagggcccgcttcgaggacggccgcccatcgccacgttctctgccaatccggaggcaaaagcagcagcagccccgtttcagacctctcaggcttccgccagtgctccacgacaccagcccgcctcggcctccagcacagccgctagcccggcccatcctgcgaaactgcgggcccagaccacagcacaggccttcaccccaggccagcccccgccccagccccaggccccctcgcacgcggccgggcagagcgcgctgcctcagaggctggtgctcccctcgcaggcccaggcccgcttgcccagtggagaggtagtgaaaatagctcagctggcatccatcacaggaccacagagccgcgtggctcagccagagacgccggtgacactgcagttccagggcagcaagttcaccctgtcacacagccagttccggcagttcacagcgggccagccgctgcagttgcaaggaagcgtcctccagatcgtgtccgcccccgggcagccctaccttcgagcccctggccctgtggtgatgcagaccgtgtctcaggcgggcgctgtgcacggcgccctgggaagcaagcccccggccggcggtcccagccctgcacccttgaccccacaagttggcgttccgggccgcgtggcggtgaatgccttggctgtaggagaacccggaacggcctccaaaccagcttctcccattggagggccgacccaggaggaaaagaccagactcttgaaagagcgcctggatcagatttatttagtcaacgagcggcgctgttctcaagctccagtctatggcagagacttgctaaggatttgtgccctgcctagccatggaagggtacagtggcgtgggtccctggatggccgtcgtgggaaggaggccgggccagcgcacagttacacttcatcctcagaaagtccaagtgagctgatgttgacgctttgtcggtgtggagagtctctgcaggatgttattgacagggtggcctttgtgattcctccggtggtggcagcacccccgtccctacgggtgccgcggccgccacccctgtacagccacagaatgaggatcttgaggcagggcctgagagagcacgctgcgccgtacttccagcagctgcggcagaccacggctccacgcctgctgcagttccctgagctgaggctggtgcagttcgactcagggaagttggaagctttagctatcttgcttcagaaattgaaatctgaaggacgtcgggtgctgattttatcacagatgattcttatgttggacattttagagatgttcttgaacttccattacctcacctatgtaagaatcgatgaaaatgccagcagtgagcaacggcaggaactgatgaggagtttcaacagagacaggcggattttttgtgccattctctccactcacagccgtaccacaggtataaaccttgtagaggcggacaccgtcgtgttttatgacaatgacctgaatccagtgatggatgccaaagctcaggagtggtgcgataggatcgggagatgcaaagacatccacatatacaggcttgtgagtggcaattccattgaagagaaattgttgaaaaatggaactaaagatctgatccgagaagtggctgctcagggaaatgactactccatggctttcttaactcagcgaaccatccaggagctgtttgaagtttattctcccatggatgatgctggcttcccggtcaaagctgaggagtttgtggtgctttctcaggaaccttctgtcacggaaaccattgcacccaaaattgcaagacctttcatagaggccctcaagagtattgagtatctggaggaggatgcccagaagtccgcacaggagggggtgctgggaccacacactgatgctctgtcatcagactctgagaacatgccgtgtgatgaagaaccatcccaattagaggagctagctgacttcatggagcagcttacaccaattgaaaaatatgctttaaattacctggaattattccatacttctattgagcaagaaaaggagagaaacagtgaggacgcagtgatgactgcagtgagggcatgggagttctggaacctgaagaccctgcaggagagggaggcccggctgcggctggagcaggaggaggcggagctcctgacctacacgcgagaggatgcctacagcatggagtatgtctacgaagatgtcgatgggcagacagaagtcatgccgctctggaccccacccaccccgccgcaggacgacagcgacatctacctcgactcggtcatgtgtctcatgtatgaagccactcccatcccagaggctaagctgccccctgtgtacgtgaggaaggagcggaagcgacacaaaacagacccctcagctgcaggcaggaagaagaagcagcgtcacggggaggcggtcgtccctcctcggtccctgtttgaccgcgcaacaccaggacttctgaaaattcgcagagagggcaaggagcagaagaagaatattctgctgaagcagcaggtgccattcgccaagcccctgccaacttttgccaaacccacagctgagcctggtcaagacaaccccgagtggctcatcagtgaggactgggcgctgctgcaggctgtaaagcagttactggagctgcctttgaacctcacaatcgtgtcacctgctcacacacctaattgggatcttgtcagtgacgttgttaactcctgtagccgaatctaccgctcttccaaacagtgccggaatcgctacgagaatgtcatcattccacgagaggaggggaagagtaaaaacaaccgtcctctccgtacgagccagatctatgcccaggatgagaatgccacacacacccagctgtacacgagccactttgacttaatgaaaatgactgctggcaagaggagtcccccaatcaaacctctgcttggcatgaatccctttcagaagaaccccaagcacgcgtctgtgttggcagaaagtggaatcaactatgacaagccgctgcctcccatccaggtggcatctctccgtgcagagcgaatcgcaaaagagaaaaaggctctggctgatcagcagaaggcacagcagccggccgtggcccagccacccccgccccagccgcagcccccaccacccccgcagcagccaccgccaccgctgccacaaccacaggcagcgggcagccagccgccagcagggccaccagctgtccagccccaaccccagccacagccccagacccagccacagcctgtgcaggccccagcgaaggcgcagcccgcaatcacgacggggggcagtgcagccgtactggcaggaaccattaaaacatcagttactgggacgagcatgcccactggtgccgtgagtggaaatgtgatcgtgaacaccatcgcaggggtcccagctgccaccttccagtccatcaacaagcgcctggcgtcgccagtggctcctggggccttgactacgccgggaggctctgctcccgcccaggtggtgcacacccagcccccgccacgggcagtcggctccccagccacggcgacccctgacctggtgtccatggcaacgactcagggtgttcgagcggtcacttctgtgacagcctcggccgtggtcactaccaacctgaccccagtgcagaccccggcacggtctttggtgccccaagtgtcccaagccacaggagttcagctccctggaaaaaccatcacacctgcacatttccagcttctcaggcagcagcagcagcagcagcagcaacagcagcagcagcagcagcagcagcagcagcagcagcagcagcagcaacagcagcagcagcaacagacgacgacgacctctcaggtgcaagttccacagatccagggccaggcccagtccccagcacagatcaaagctgtgggcaagctgacgccggaacacctcatcaaaatgcagaagcagaaactgcagatgcccccgcagcccccaccgccacaggcccagtctgcgcccccgcagccagcagcccaagtgcaagtgcagacctcgcagccgccgcagcagcagagcccccagctcacgacggtcacggccccaaggcctggtgccctgctgacgggcaccaccgtggccaacctccaggtggcccggctcacccgggttcccacttctcaactgcagtcgcaagggcagatgcagacccaggcaccccagccagcccaggtgcccttgccgaagcctccggtggtgtccgtcccggcagctgtggtctcctcaccgggagtcaccaccctgcccatgaacgtcgcggggatcagcgtggcgatcggtcagccacagaaggcagcaggacagaccgtggtggcccagcccgtgcacatgcagcagctgctgaagctgaagcagcaggccgtccagcagcagaaggccatccagccccaggctgcncagggcccggcaaccgtccagcagaagatcaccgcacagcagatcaccacccctggcgcgcagcagaaggttgcctacgccgcgcagccggcccttaagacccagtttcttaccacacccatctcccaggcccagaaactggccggggcccagcaagtgcagacccagatccaggttgcaaaacttcctcaagttgttcaacagcaaacacccgtggccagcatccagcaagttgcctctgcttcccagcaggcttctccacagactgtggcgctcacgcaggcgacggcggccgggcaacaggtgcagatgatccctgcagtgaccgcgactgcccaggtggttcagcagaaactcattcagcagcaggtggtgaccacggcgtcggccccgctccagactccaggcgctcccaacccagcccaggtgcccgccagctccgacagcccaagccagcagcccaagttacagatgagggtccctgctgtcaggctaaagacacctactaagcctccgtgccagtagtcagggcagcagggctgcctctcatctaaagcaaaactaccttcctcacagaaaacgctttattagtgaaccttgggaccatgtcacgcaagagattcagcactgggaaagatataattgaaacaaaatagtgtaatcattttattaaaatgcatcccacactgcaggacaaatggtccttatggagtgccgcgttctctgtactacgtggctcatggaaaaagtgacaacatggcttcctctaaatcatttcacctttcagtccccacccgcacccgtcccctagagccatagtactgtgttctgaaagccatttagaatttctttgtgagcatgtagtgctttgcacgccacagaagccgtctgccgtgtgtgaggagcatacaatggactttctaaagataaggcgtgggcttccacagtgtctgccagagtttagttctttataccttactgaaaaatgcctcgtggtcttcgcagaggggaaggcctgtctaaagtcaatcatccgagatgggttttccattccaaagaaaggcaatatggttccttccttccctcctaaaatatgacttaacttttaagagaaatgttctgacacccacc

SEQ ID NO: 24818 - DNA, 692 bp, Homo Sapiens
cagtggtgcggccggcggccgagcgttctgagtcacccgggactggagggtgagtgacggcgaggccggggtcgccgggagggagatcctggagccggcaaacaacctcccgggggcaaggacgtgcttgtgggcggggagcgctggaggccggcctgcctctcttcttggggggggctgccgcctcccttgcgcacccttcgcgggattagtgtaactcccaatggctaccacttccagcgaccgccaaccctcaagcgaagactgactttggctccctgcctggacggaggggcccctgagccaggggtgacgatcccgcccctctgaccggcccaggcccgtgtcctcgcccccatcggtgactcagtgacctggtgactggattctcggccacctgggcgccgagacggcttccggctcctgccttttaaacctgcctccccggcgatcacctggagaagagcgctgggcccggggcactgcggtccctggcgcccactgcgtcccgctgcgcacgggggtccgccgggacctttctgggagtcgtaggcttagtatcccagtgcttggcgcagactagttgttcataggaacccagccatggtgaacgaagccagaggaaacagcagcctcaacccctgcttggagggcagtgccagcagtggcagtgagagctccaaagatagttc

SEQ ID NO: 24819 - DNA, 3285 bp, Homo Sapiens
  misc_feature (72)..(72): n is a, c, g, or t
  misc_feature (3245)..(3245): n is a, c, g, or t
  misc_feature (3263)..(3263): n is a, c, g, or t
  misc_feature (3278)..(3278): n is a, c, g, or t
caacggatttcatttcatacagatgaaccaaggatcgggatagcagtataaaattagaatcaagacagctgnctgccaagcaggatgccatcaactaacagagcaggcagcctgaaggaccctgaaattgcagagctcttcttcaaagaagatccagagaagctcttcacagatctcagagaaattggccatggaagctttggagcagtgtattttgcacgagatgtgcgtaccaatgaagtggtggccatcaagaaaatgtcttatagtggaaagcagtctactgagaaatggcaggatattattaaggaagtcaagtttctacaaagaataaaacatcccaacagtatagaatacaaaggctgttatttacgtgaacacacagcatggcttgtaatggaatattgtttaggatctgcttcggatttactagaagttcacaaaaagccattacaagaagtggaaatagcagcaattacacatggtgctcttcagggattagcctacttacattctcatactatgattcatagagatatcaaagcaggaaatatccttctgacagaaccaggccaggtgaaacttgctgactttggctctgcttccatggcatcacctgccaattcctttgtgggaacgccgtattggatggccccagaagtaattttagccatggatgaaggacaatatgatggcaaagtagatgtgtggtctcttggaataacatgtattgaactagcggaaaggaagcctcctttatttaatatgaatgcaatgagtgccttatatcacatagcccaaaatgaatcccctacactacagtctaatgaatggtctgattattttcgcaactttgtagattcttgcctccagaaaatccctcaagatcgacctacatcagaggaacttttaaagcacatatttgttcttcgggagcgccctgaaaccgtgttaatagatctcattcagaggacaaaggatgcagtaagagagctggacaatctgcagtatcgaaagatgaagaaactccttttccaggaggcacataatggaccagcagtagaagcacaggaagaagaagaggaacaagatcatggtgttggccggacaggaacagttaatagtgttggaagtaatcaatccattcccagcatgtccatcagtgccagcagccaaagcagtagtgttaacagtcttccagatgtctcagatgacaagagtgagctagacatgatggagggagaccacacagtgatgtctaacagttctgttatccatttaaaaccagaggaagaaaattacagagaagagggagatcctagaacaagagcatcagatccacaatctccaccccaagtatctcgtcacaaatcacactatcgtaatcgagaacactttgctactatacggacagcatcactggttacgaggcaaatgcaagaacatgagcaggactctgagcttagagaacaaatgtctggctataagcgaatgaggcgacaacatcaaaagcaactgatgactctggaaaacaagctaaaggctgagatggatgaacatcgcctcagattagacaaagatcttgaaactcagcgtaacaattttgctgcagaaatggagaaacttatcaagaaacaccaggctgctatggagaaagaggctaaagtgatgtccaatgaagagaaaaaatttcagcaacatattcaggcccaacagaagaaagaactgaatagttttctcgagtcccagaaaagagagtataaacttcgaaaagagcagcttaaagaggagctaaatgaaaaccagagtacccccaaaaaagaaaaacaggagtggctttcaaagcagaaggagaatatacagcatttccaagcagaagaagaagctaaccttcttcgacgtcaaagacaatacctagagctggaatgccgtcgcttcaagagaagaatgttacttgggcgtcataacttagagcaggaccttgtcagggaggagttaaacaaaagacagactcagaaggacttagagcatgccatgctactccgacagcatgaatctatgcaagaactggagttccgccacctcaacacaattcagaagatgcgctgtgagttgatcagattacagcatcaaactgagctcactaaccagctggaatataataagcgaagagaacgagaactaagacgaaagcatgtcatggaagttcgacaacagcctaagagtttgaagtctaaagaactccaaataaaaaagcagtttcaggatacctgcaaaatccaaaccagacagtacaaagcattaagaaatcacctgctggagactacaccaaagagtgagcacaaagctgttctgaaacggctcaaggaggaacagacccggaaattagctatcttggctgagcagtatgatcacagcattaatgaaatgctctccacacaagccctgcgtttggatgaagcacaggaagcagagtgccaggttttgaagatgcagctgcagcaggaactggagctgttgaatgcgtatcagagcaaaatcaagatgcaagctgaggcacaacatgatcgagagcttcgcgagcttgaacagagggtctccctccggagggcactcttagaacaaaagattgaagaagagatgttggctttgcagaatgagcgcacagaacgaatacgaagcctgttggaacgtcaagccagagagattgaagcttttgactctgaaagcatgagactaggttttagtaatatggtgctttctaatctctcccctgaggcattcagccacagctacccgggagcttctggttggtcacacaaccctactgggggtccaggacctcactggggtcatcccatgggtggcccaccacaagcttggggccatccaatgcaaggtggaccccagccatggggtcacccttcagggccaatgcaaggggtacctcgaggtagcagtatgggagtccgcaatagcccccaagctctgaggcggacagcttctgggggacggacggagcagggcatgagcagaagcacgagtgtcacttcacaaatatccaatgggtcacacatgtcttatacataacttaataattgagagtggcaattccgctggagctgtctgccaaaagaaactgcctacagacatcatcacagcagcctcctcacttgggtactacagtgtggaagctgagtgcatatggtatattttattcatttttgtaaagcgttctgttttgngtttactaattgggatgncatagtacttggctncccgggt

SEQ ID NO: 24820 - DNA, 5604 bp, Homo Sapiens
aggattttgaaggcaaaggctctggtttctccttccccatgtctgaaaaccgcccttagcctgcacaaggtgaacagtggaaatcattggtgaggaatggccacccactgccctctttactgtgtaggagcagatctgatgatgaacagagcaggtgagcacgtgtggagtgagagcgaggactgcctgcctttcttgcagctagcacaggattacatctcctcctgcggcaagaagacgctccacgaagtcctggaaaaagtcttcaagtctttcagacctttactggggcttccggatgcagatgacgatgcgtttgaagagtacagtgctgacgtggaagaagaggagccagaggcggaccacccccagatgggggtcagccagcagtaaatctgggggctcccctgagaaggagagtgagccccacagtaacctaggtggggtcactgcccctcctgggttagcattttgcattagcacttcgaaataggacatctggctcccagcatccaaattaaaatgaaatacctttttaacgaccacaaaatatctgtgatgagctttgctcagaagtgacctgaatttcactcccgcttcagtggggtttctatggagttgtcttggtagcctttgccattttgaatttagagtccattttgtggctgactattctcttaagtttatgttggagaattaacattcgctgactcgaatgtagagaactctgaatgtattaaggataggttttgagtcctcacaggtgaccttactgagggaaagcatggcagagaagaaatgcagtctgcactttttatgtactttttaagtgtccgtaagtgaaaggttttgcttataaagcatgaattttaatatctagtcattaaactgcacaagtgcaaatacaagggcaggaaaggataatcacttagctttggactaagagggtaagagaggcccagaagcctttaagtgttttgccattactgagttacctgggtatgtagcgactggttcgtggttaggtgtaaatgttacttgcttgttcgactgtttcaaaacatgctaattccaaagccacttttgaagtctatagtggaaaatatagatggggtgaaagatataatgtattgatttttaaagctgtttataagccgtcccacgtataaaatgaaacattttaccttctctctttctaatgagatggccgcttgttaaatcatgaaaacatccagaattcaagtgccgcttaaactttgaagccatagataaatttgttagaaaagtaaaccaggattaaaagtttttaaaaatatggtagaatccttctttactttttaagtcttttatttaaaaaaaaaaagtcaaaaaagggattccattgtgtaatttatttaaaaatttaatcacatgtttcgagggacttaattgtggtgtatttgtaaagggacacgaaggtaggaatcttttaatcgtgggttagcttggttaacagggaacgttttaataatcaagatactcagacaactcacagaaacaacttctgaaataactggaaatactgctgttatcgtttagccaacaattacttactggggacatcctttgtaatgctaacatggaattattcctggacccttctgcatccctggttttagttaacctaggatgcggaatgcctcctttacaacactagattaaacctagcatctggggtgggtacgtttaaacagtcacacatgtgcctgttaggttgtgaaagttttgaattaaaaacaagcagtagcagcagaggccacagaacttatgggagtcttgtatatcttccaggcatgtcggtgtaaacctgattgtctcgacattttctgtttaattgattggtgctgtgaggagttcggctgctcgtggtaaaacagcgtactccagttttaagtcatcgggtaaaataataggacagtgatttccatctgtgcttcagtacccactttgtgttcttttcttgaaaagtcatactaaaggttaatttcaagtaaaatgaatttccttccaagtagcctattagtaaaacacaacttagtgtttcatccattggggtgagcatatactgccctttgcagccctgcctgtattctgattggctccattcatgagcaaaggtgattgtgagctgtatattacacaggtgtcgcccaggtttcgtaacctccactttaatgcagtaagccgcaagaatgacttctgcaagtgaaatgaggaagcttcactagcttgctccattggaaggtaaactgaaattttatacgttgaagcttaaaatctaaatttatgtatgtttggaaatggaatggacattaacataaaatgtattttatcaaaaaggtgtttagactttgaccaaatacatgttggtattatcatgttaatgttctctgtttataaaaattgagtggagatagatagactcggccattctgtgggctgatgagaattctgggctttgttttgcaccaggggtaggaaacagagaacatgtctgtatgttacttaatctccatagcaaaatcccaaacagcattagcagatcgaattgtttcttctaagacttcctttttctgaatgtgtgcacatcccttctcgtgctcacacacttgcccacacactcacttcttcctgcgctgtggctgctctaagcagggctgtgcatggtgcaaagctgcagtcagtgagcctggcagcctgtggtttctgttatggaaatggttccatggtgaaacacatccctgacccttcacagacttacacatttactcaccaggaggtggcagcggtgtgggaggaggagtgttgaccttggacgcaggagagacacctgggttctagttcaagtcggccaaggactgtgtgaccttgacaagtctaactggtctgtgaacaaggggcatttgcccttccagctgtaaacactgcccttctgtgcctgccttatgtgtgtgtgtgagtaaggagcaacagtcaaggaaacttttagggattcgagaagaaaatacatgtgggatcttgccaaggtgctgcctttaggatgctgacccctgcactaccttagaacatgttgatctgtgagtgcccaagcccctgagggctcgatctcatggggcagatgaaattctcttccttagaggaaagggaaaggtgaggccccagaggacttatctcagctgtacatgctctgcctgtggagacatggcttttctttgtgctgtggcagactggggctttggaagtggtgtatgtttaacttacctgagagtgagagatgtgtaggaagaatagctggaagaaagtgaaagatgagtgccagtacttttggcctgttatccagtagagagaaagtgacagtgaaagtaacgtgagagagaaagagtgtgtgtgtatatgtgagagagagaaagaaagagaaaggaatgcttgattgcttgttgttcactgggccagctctgaaatccaaaatcatgccttgataacattacaaaaccgtgatcctgggtttgagtgaatcctagagacattgttcttatggccgcctggtttccgcagcctgatcaccatatcgagcagacgtcaaggaatcagagtgaagtacggagccagggagggaggtgaggccccgtgtagtgcctgtcaccactgtggattcacctgcactcaggtgtccactcctgtctcccaggcccaaagcagcacatggtgcaatggaaaagtctcttatgtagggatcctccttgtgtcctggtgccagaattagatttccagtgtacttcaacgaaaacttctctcctttatagttgctgtcatctttcatgtataaacagaaaccgtctctagcacaatatatttctgaatattgtttctgtttcataagagcacaatgtacatggacctaggggagctgtggtcccaagtgtcattggaatttatattttaggaataggctttgcatgttaaaattcacaagttgggaaactggtatgaacagatctgatttcttacagagaggcatgaaggaataggcaggacttaacttggggtgggaggagatgaataagggagaatgggagagttggggtctgacagttaccacctgagccccaggaaaactgttttcattttcacggctgtctcactgggggcctgctttcctcaaaggaactgactgtatgttgagaggcaatgccttgtgttggcatggctttgccactttaaaagtgccccccagccaaggagaccaacaggaaccctgctcatctggtagggctctttccttcagtaaaaccagctgccagcctgagaagcctgtctttcccaaatgcaggcagatctgagaggggctccaggcacccggcaggtaaatcacaaagcaaacttgggtgtccttggcagcagggaggaagcaggagtgccccctcaggccagagggcagggccaacctcctcactgtgcttcaaggttgtagaaagagcacaattaatgcttaagcgatcacagacccctctcccctgcagtgggtgttagctccaaagagatgccattgctgatcacccagtcttcggagaagcctaaaatttctttgaattaaaaactgatcctttttcataaagacccagtcacttctcccagtttagtgataacaggtatgcacaagaagctgaagtcttttagattttatagagagtaattctgaaacctgccagaatgctggtagcctgtggtctccatggcaatgggtgtccatggtaaaatatctatagcttctgctcactgggcaaatataaaagacaacatattatttaacataatatgttgtcttttatatttttatttaaatctggattatgaaaatatagtacccatgagcatttcatgttagaaaccccatttaaagcactataaggctgaataggcacaagcgattaaaagtagatgccaggccacataaaaataaatgttttaatttacttagagctgtattcaagttgtttgataccagacagaaagctgacagtctgttctttgtaaactgcctttccctgtttttctgttttgttttgtttctcaagtttcattttttactaagccccttctgacacctaggcagataaagataagagtagtgcgcagtacaaatgtcagctctgaagaggaggaagtaaatcttcaatgctagggcagatcttcactatccgtgatccagtcttaatttgagcatgagagcaaaatttagtcatctacacaagaagcaaaagcaaggaatagttgttgggtttttgttttttggttgttgttttttttttttttaggcaaagaagtgttgccggtagggtatgtgtgctttctttgccttcctatttcctttcaaagaaatctcttgtaaattacaaaactgtgaattgggttgccaaaaactgttgcccttcgttagatgcttcaaacagtgtaaatcctatactgcaccctgtccacctctgctccctcctccctcccctgagagtgaggacctcatccgaccatgtaattaccattcgcttgctattaaagagcctttcaaac

SEQ ID NO: 24821 - DNA, 1554 bp, Homo Sapiens
atcgcgagatcaggaaggtggccgagtgtgtcgccgcggccatcaggcacttctccttcctgcccttgtatgaagaaggatgtgtttgcttccccttgtgccatgattgtagatttcctgaggcctcctcagccctgcggaactggctagagcaatgtatcttaggctcacttaaggaagctgtagagatgagcccaaggagggaaaccagaagagccccccaggctcaccagttgtttgttggctccctacaaacatgtcattcaagtggctaatcttacaacagcacaaattcatctaaccagaaagagaagaggaggctccaaaggcacttgactactgagcatcaccctggacgtgtacaagtctgcgtccttattgttttcttcattgggccgaactttctggtcctcatccaacagctcttctatcatgtgttcgaaagtgtcagccaatgatgtcaagcctcttgaacctgccttgggcccattcacgctctccagagtcccatgggtccgcacacctggagatactctattatagcaaagaagaaagataatttcattgagccatcctgttttacaggtttcagtgacccactctgtaataaagaacttggaaagggaggttccaagatggccaaatatgaacagctccagtctacagcccccagcgtgagtgatgcagaagacgggtgatttctgcatttccaactgaggaaattctgcaagtggcaacgtgggtccattccgtgtgtgtcactagagctggcgcaagcccatggccatggtgaggcagcgtttccactggaactaatctgatacctgcaccaactcttgcaactgtgcagtgttcccactgcaaactacggatggggtaaaagactgctcacctcctatttctcatctaatctcacacactctgtttgatgaggctatggagaaacaggtcttctcatacactaaaggtgggagtacaaacaattcaagccctgtgcaggacaattaggcaatacctatcaaaattatacatgatttttcctgctgacccagcaattccacttctgggaataattgacagatataggtgcatatgtacaaaatgatggaaagctctctggtatatattagtaagtgataaaacaaggtgtaaaatagtgtatatatggctactaccttttgttttaaaaatgggggaaaatggtggagcttgcggtgagccgagatcgtgccactgcactccagcctgggcgacagagcgagactccgtctcaaaaaaaaaacagggtggggtgggggggaaataatagtacatactcatatttacctgtatctatataaaacacactatcaaggattcacaagaaactaatacaaatgatccccttatagatggtatgtattgggggatactgaggtgagcagggtataagtggggcaagacttttcagtgtaaacttcttttaaattttattttgatttttgaataatgtaaattaactgtcaaataattaaattaaaaataaccaatttattaacaaaaaaaaaaaaaaaa

SEQ ID NO: 24822 - DNA, 1520 bp, Homo Sapiens
gtcatcgctgtctggaacagcgatgactcgatcgcgagatcaggaaggtggccgagtgtgtcgccgcggccatcaggcacttctccttcctgcccttgtatgaagaaggatgtgtttgcttccccttgtgccatgattgtaaatttcctgaggcctcctcagccctgcagaactggggttatagccatgtgactgatcttcgtccaagaatatgtaaagaaaaagtgttgagttggcttttagggctagagcaatgtatcttaggctcacttaaggaagctgtagagatgagcccaaggagggaaaccagaagagccccccaggctcaccagttgtttgttggctccctacaaacatgtcattcaagtggctaatcttacaacagcacaaattcatctaaccagaaagagaagaggaggctccaaaggcacttgactactgagcatcaccctggacgtgtacaagtctgcgtccttattgttttcttcattgggccgaactttctggtcctcatccaacagctcttctatcacgtgttcgaaagtgtcagccaatgatgtcaagcatcttgaacctgccttgggcccattcacgctctccagagtcccatgggtccgcacacctggagatactctattatagcaaagaagaaagataatttcattgagccatcctgttttacaggaaattctgcaagtggcaacgtgggtccattccgtgtgtgtcactagagctggcgcaagcccatggccatggtgaggcagcgtttccactggaactaatctgatacctgcaccaactcttgcaactgtgcagtgttcccactgcaaactacggatggggtaaaagactgctcacctcctatttctcatctaatctcacacactctgtttgatgaggctatggagaaacaggtcttctcatacactaaaggtgggagtacaaacaattcaagccctgtgcaggacaattaggcaatacctatcaaaattatacatgatttttcctgctgacccagcaattccacttttgggaataattgacagatataggtgcatatgtacaaaatgatggaaagctctctggtatatattagtaagtgataaaacaaggtgtaaaatagtgtatatatggctactaccttttgttttaaaaatgggggaaaatggtggagcttgcggtgagccgagatcgtgccactgcactccagcctgggcgacagagcgagactccgtctcaaaaaaaaaacagggtggggtgggggggaaataatagtacatactcatatttacctgtatctatataaaacacactatcaaggattcacaagaaactaatacaaatgatccccttatagatggtatgtattgggggatactgaggtgagcagggtataagtggggcaagacttttcagtgtaaacttcttttaaattttattttgatttttgaataatgtaaattaactgtcaaataattaaattaaaaataaccaatttattaacaaaaaaaaaaaaaaaa

SEQ ID NO: 24823 - DNA, 1884 bp, Homo Sapiens
ggcacgagcggtctggtcggtgaggtcttggccgcgcgcggcaatgctgaggctgctggcgtccgggtgcgcccggggcccggggcccggcgtgggcgcgcgtcctgccgcagggctctttcatccggggcgccgccagagccgccaggcttccgacgcgccccggaaccagccccccagccccgagttcgtggcccggccggtgggcgtctgctccatgatgcgcctgccggtgcagacctcccccgaggggctggacgctgccttcatcggggtgcccctggatactgggacctccaaccggcctggggcgagattcggacctcgccgcatccgggaagaatcagtgatgcttcggacagtcaatcctagcacgggggccctccccttccagtccctcatggttgcagacctaggcgatgtgaatgtcaatctttacaaccttcaggacagctgccggcaaattcaagaggcctatgagaaaattgtagcagctggctgtattcctctgaccttgggtggagatcacacaatcacatatcccatattgcaagcgatggcaaaaaagcatggcccagtggggctgctgcacgtggatgcgcacacggacacgaccgacaaggccctaggagagaagctctaccacggggcgcccttccgccggtgtgtggatgagggtctcctggactgtaagcgtgtggtgcagattggcatccggggctcttccacgaccttggatccctacagatacaaccggagccagggcttccgggtagtcctggctgaagactgctggatgaagtcgctggttcctctgatgggggaagtcaggcagcagatgggaggcaaacccatttatatcagctttgatattgacgctctggatcctgcctatgcgccagggacagggacacctgaaattgctggtctcactcctagtcaggctctggagatcatcaggggttgtcaaggcctgaacgtgatgggctgtgatcttgtcgaagtttcaccaccgtatgatctttctgggaacacagccctgctggcggctaacctgctgtttgagatgctatgtgctctccccaaagtgacaaccgtctgagtcttgtgctcttcaagacaaaacagattgcgtcgctgacaagttctcaagaagaacttatgagtaagcagtctgagaactaaagagtttatgccaagaaaactttctgctgaaagtgtcattgctggctgtgaagtcgggataatcagtagaattctcacccaaacagcaacatttctaaggaacttggattaattgggggaaaaaaaaaggagtacttgtactgctttgattttttttcctttgatgaaagatggaggataaaggggaagtgaggagaatttctttcaagattatctaaacattagaaacatgacatttaaaaaaactatgaaataatactgtataagcattccatatttctatatcttccttttaaacattttttttttttgggatggagttttgcttgtcacccaggctggagtgcaatggcatgatctcggttcattgcaacctccgcctcccgagttcaatcgattctcctgcctcatgcctgtagtcccagcactttggggggcggaggtgggcagatcgcttgaggtcaggagttcgagaccagcctggccaacatggtgaaaacccatctctgctgaaggtgcggaagttagctgggcgtggtggcgcgtgcctgtggtcccggctgctcgggaggctgaggcaggggcattgcttgggcccgggaggtggaggttgcagtgagctgaggtcgtgccactgcgctccagcctgggtgacagagtgagactccgtctccaaaaaaggaaaaaaaaaaaaaaaaa

SEQ ID NO: 24824 - DNA, 1426 bp, Homo Sapiens
ggaaggggaaggaactgcgggtgtgtgtgtgtatgtgtgtgtgtatgtgtgtgcgcgcgtgcgtgcgtgtgtgtgcgcgcgctagtgtgtggacaaggaggtgggggcagctgagttagagtcccaactcttggactccatttgctattctcttctttctcccccacacctatctggtggtggtagtgggcgtttatatttgcgttccttttcattcatttctaaatctcttaaaaattttgggttgggggtattggggaaggcaggaaagggaaaaggagagtagtagctgaagagcaagaggaggacatggagatgaagaagaagattaacctggagttaaggaacagatccccggaggaggtgacagagttagtccttgataattgcctgtgtgtcaatggggaaattgaaggcctgaatgatactttcaaagaactagaatttctgagtatggctaatgtggaactaagttcgctggcccggcttcccagcttaaataaacttcgaaaattggagcttagtgataatataatttctggaggcttggaagtcctggcagagaaatgtccaaatcttacctacctcaatctgagtggaaacaaaataaaagatctcagtacagtagaagctctgcaaaatcttaaaaatttgaaaagtcttgacctgtttaactgtgagatcacaaacctggaagattatagagaaagtatttttgaactactgcagcaaatcacatacttagatggatttgatcaggaggataatgaagcgccggactctgaagaggaggatgatgaggatggagatgaagatgatgaagaggaagaggaaaatgaagctggtccaccggaaggatatgaggaagaggaggaggaagaggaggatgaggatgaggatgaagatgaagatgaagcaggttcagagttgggagagggagaagaggaagtgggcctctcatacttaatgaaagaagaaattcaggatgaagaagatgatgatgactatgttgaagaaggggaagaagaggaagaagaggaagaaggaggtcttcgaggggagaagaggaaacgagatgctgaagacgatggagaggaagaagatgactagatcattctaagaccagattctctaatgtttctgggtgtgcaatagagtgatcacatctttgtttcttcatgtacgatagctatccctacagaagataatgtgtaactttttataggaaaagtgtggttttactatttttgccttatcattccaaataagaactagtctgttaatgatcatattgtatgtagagaaaaattttcattgactcccattgtggaattccctagcaatttatttagacttaattttttaaattcaagcttactgtattagtcatttttagcccataattaaaacatgatcacttttacac

SEQ ID NO: 24825 - DNA, 3226 bp, Homo Sapiens
gacccggagaagatgtcttcgcggacggtgctggccccgggcaacgatcggaactcggacacgcatggcaccttgggcagtggccgctcctcggacaaaggcccgtcctggtccagccgctcactgggtgcccgttgccggaactccatcgcctcctgtcccgaggagcagccccacgtgggcaactaccgcctgctgaggaccattgggaagggcaactttgccaaagtcaagctggctcggcacatcctcactggtcgggaggttgccatcaagattatcgacaaaacccagctgaatcccagcagcctgcagaagctgttccgagaagtccgcatcatgaagggcctaaaccaccccaacatcgtgaagctctttgaggtgattgagactgagaagacgctgtacctggtgatggagtacgcaagtgctggagaagtgtttgactacctcgtgtcgcatggccgcatgaaggagaaggaagctcgagccaagttccgacagattgtttcggctgtgcactattgtcaccagaaaaatattgtacacagggacctgaaggctgagaacctcttgctggatgccgaggccaacatcaagattgctgactttggcttcagcaacgagttcacgctgggatcgaagctggacacgttctgcgggagccccccatatgccgccccggagctgtttcagggcaagaagtacgacgggccggaggtggacatctggagcctgggagtcatcctgtacaccctcgtcagcggctccctgcccttcgacgggcacaacctcaaggagctgcgggagcgagtactcagagggaagtaccgggtccctttctacatgtcaacagactgtgagagcatcctgcggagatttttggtgctgaacccagctaaacgctgtactctcgagcaaatcatgaaagacaaatggatcaacatcggctatgagggtgaggagttgaagccatacacagagcccgaggaggacttcggggacaccaagagaattgaggtgatggtgggtatgggctacacacgggaagaaatcaaagagtccttgaccagccagaagtacaacgaagtgaccgccacctacctcctgctgggcaggaagactgaggagggtggggaccggggcgccccagggctggccctggcacgggtgcgggcgcccagcgacaccaccaacggaacaagttccagcaaaggcaccagccacagcaaagggcagcggagttcctcttccacctaccaccgccagcgcaggcatagcgatttctgtggcccatcccctgcacccctgcaccccaaacgcagcccgacgagcacgggggaggcggagctgaaggaggagcggctgccaggccggaaggcgagctgcagcaccgcggggagtgggagtcgagggctgcccccctccagccccatggtcagcagcgcccacaaccccaacaaggcagagatcccagagcggcggaaggacagcacgagcacccccaacaacctccctcctagcatgatgacccgcagaaacacctacgtttgcacagaacgcccgggggctgagcgcccgtcactgttgccaaatgggaaagaaaacagctcaggcaccccacgggtgccccctgcctccccctccagtcacagcctggcacccccatcaggggagcggagccgcctggcacgcggttccaccatccgcagcaccttccatggtggccaggtccgggaccggcgggcagggggtgggggtggtgggggtgtgcagaatgggccccctgcctctcccacactggcccatgaggctgcacccctgcccgccgggcggccccgccccaccaccaacctcttcaccaagctgacctccaaactgacccgaagggtcgcagacgaacctgagagaatcgggggacctgaggtcacaagttgccatctaccttgggatcaaacggaaaccgccccccggctgctccgattcccctggagtgtgaagctgaccagctcgcgccctcctgaggccctgatggcagctctgcgccaggccacagcagccgcccgctgccgctgccgccagccacagccgttcctgctggcctgcctgcacgggggtgcgggcgggcccgagcccctgtcccacttcgaagtggaggtctgccagctgccccggccaggcttgcggggagttctcttccgccgtgtggcgggcaccgccctggccttccgcaccctcgtcacccgcatctccaacgacctcgagctctgagccaccacggtcccaggcccttatcttctctcccttgtcgcttcacttctacaggaggggaaggggccagggaggggattctccctttatcatcacctcagtttccctgaattatatttgggggcaaagattgtcccctctgctgttctctggggccgctcagcacagaagaaggatgagggggctcagcggggggagctggcaccttcctggagcctccagccagtcctgtcctccctcgccctaccaagagggcacctgaggagactttggggacagggcaggggcagggagggaaactgaggaaatcttccattcctcccaacagctcaaaattaggccttgggcaggggcagggagagctgctgagcctaaagactggagaatctgggggactgggagtgggggtcagagaggcagattccttcccctcccgtcccctcacgctcaaacccccacttcctgccccaggctggcgcggggcactttgtacaaatccttgtaaataccccacaccttcccttctgcaaaggtctcttgaggagctgccgctgtcacctacggtttttaagttattacaccccgaccctcctcctgtcagccccctcacgtgcagcctgttgcccaataaatttaggagagtccccccctccccaatgctgaccctaggattttccttccctgccctcacctgcaaatgagttaaagaagaggcgtgggaatccaggcagtggtttttcctttcggagcctcggttttctcatctgcagaatgggagcggtgggggtgggaaggtaaggatggtcgtccaagaaggcaggatggaactcggcctcatccccgaggccccagttcctatatcgggccccccattcatccactcacactcccagccaccatgttacactggactttaagccatttcttactccagtagtaaatttattcaataaac

SEQ ID NO: 24826 - DNA, 4731 bp, Homo Sapiens
cccagctggaggaagcggcggcggcggccacgatgagtgcgggcgacgcagtgtgcaccggctggctcgttaagtcgccccccgagaggaagctacagcgctacgcctggcgcaagcgctggtttgtcctccggcgaggccgcatgagcggcaaccccgatgtcttggagtactacaggaacaagcactccagcaagcccatccgggtgatagacctcagcgagtgtgcagtgtggaagcatgtgggccccagctttgttcggaaggaatttcagaataatttcgtgttcattgtcaagactacttcccgtacattctacctggtggccaaaactgagcaagaaatgcaggtgtgggtgcacagcatcagtcaggtctgcaaccttggccacctggaggatggtgcagattccatggagagcctctcttacacgccctcctccctgcagccatcctctgccagctcccttcttaccgcccatgctgccagctcctctttgccaagagatgacccaaacactaatgccgtagccactgaggaaaccagaagtgagtcagagcttctcttccttccagattatctggttttgtccaactgcgagactggaagactgcaccataccagtctacccaccagatgtgatagctggtcaaactcagaccgttcattggaacaggcttcatttgatgatgtttttgttgactgcctgcagccgctcccctccagtcatttggtccacccctcatgccatggcagtggagctcaggaggtgccatcctcgaggcctcaggctgccctgatctggagtagagaaatcaatgggccacccagggaccacttgtcttcttcaccattgctggaaagttccttaagttccaccattcaggtagataaaaatcaaggttccttaccctgtggagcaaaagaactagacattatgtccaacactccacctccccgcccccctaagccaagccatctgtctgaacggcgccaagaggagtggagtacacacagtggtagcaagaagccagaatgcactctggttccaagaagaatctccctctctggtttagacaacatgagaacctggaaagctgatgtagaaggccaatccttaagacaccgagacaagcggcttagtttgaatttgccatgcaggttctccccgatgtaccccacagcttcagccagtatcgaagacagctatgtgcccatgagcccccaggctggtgcctctggtcttggaccccactgcagccctgatgactacattccaatgaactcaggaagcatctcaagcccgttgcctgagctgcctgcaaacctggaacctcccccagtgaatagagatctcaagcctcagaggaaatcacggccacctcctctggacctgagaaacctctcgatcatccgggaacatgcatctcttaccaggacccgcactgtgccttgcagtcgaaccagctttctctctccagaaagaaatggtattaattctgcaagattttttgctaatcctgtttccagagaagacgaagaaagctacatcgaaatggaggagcaccgaacagccagttccctgagcagtggtgcccttacgtggacaaagaaattcagcctagattatttggccctggacttcaattcagcatcaccagcccccatgcagcagaaacttctcctttcagaagaacaaagagtagactatgtccaagtggatgagcagaagacacaggctctccagagcacaaaacaggagtggacggatgaaaggcaatccaaagtatgagaggtgcgggcttgtgccatgtgtgaaacagggaagcttggggctcagtttgagttttttcttttttttttttttttgtccactaaaaacacactgatggtcaacacaggtcaaaaccaagagagaatgtgtagttttcaaggtcttggccagaacctttaggaaagaagacctgtttatacattgaaggaagaaaagaaggaagcagttgccttccggagggggctctgagagaatctagcctcccctctgtcctattggagcaaagattggagtgagtgttgccaccaacaggattttatcgtttgactccaatacctgaaattctgacttctctcctgtgcttcaatgagaatgataaattatcctagcaaaggggcctctggagaccatcttgttccagcctctgaagacagttgaggagatcaagcccagcaatggtggcagaatcttactccacagacttcagcagactagtcatttcaatacccaaagaaagacaagtgacaggggcaatggatctcaggctctgagataagtatatcagatgacactggtggctctaaggatattgcaattaagcagctacctgtagccaggtattctgctgctcttggccttttcccacgcatcgtctcgtgtcttctccgaaagaccttggaagataggcctggaagagactgttgatgccactttgaagaaaagaacactgagaactagaggagggaacactttgcccaagattactcacaaagccaagacccagagtccagcttagagaatagagttgttcaggctgccaattgcaagctcattcctctacctcatacttcctctgaggattttgacaaaatggattaattgggtgagccttggagacatgtgggaaacacctgcagacacaaaatgagtagtcatcctgtctccctttcaatagggatctgaacaggtgttttgatacttgaaagatgtgcatgtcaagtgagggtttctttctgcgatgttcaactggaactctcccatcagtagttacaattagaaatacctactgatggttagtctgaaggccattctcatggtcacctatacagtgtgtttccctgtgagctagcagacacaatgaccaggaaaaaacctatgaattccattcttaggtttcccagccaattgctcccttctgctttagaagtgactaggtactgagagtacaaacactcccactttataatgaaggcgtcatgtcaccccttcctttacaggtcctggggtccaggagacccagaatgaaggtgtcagttgggcatgaagtgttatttagtgtccattcttgatccttctgagcacctacagctggaaactaagcagatactggtcctgcattctgactgagattgtgtcttctttatgaggatagatcaaattggcagtcaggcccatgatagtcagtgcagttggggcagttgtagactttgctacaggatttcagggtttccaatcaccccacaggtaagtgaatgccaaagtcttcttttttcagaccatacaagaagtcattttgattttcaaagaagccgttttgattttcaaagaagcaggttctggtgacattattttcttccttggacaaagtggggggaaatttctaagtattttaactgagttcagggtccttagtgagcctggacagagcaaggagagggctccccactccctaagccccacagccagttctgcatcaccacacacagccagagcctgtgaggagctgccttcttccccatgtgacttgcaaagagtctcaggcaagaaaccagggcttcaaactgctagttcccatggagggtagttccctcgtgtggagcacttgtgttaggatcactgattatctgacaaaggctggtgcagaaaaaaaattgtaggcccaagtgtcaagaaccacaccagattggagatagaaaagaatagctgaaattatgtcagtggtgaaatgtcactccattgacccaccgaaaaaagaaaagaaatctgtttctaccaaacatttccagaaacgtatttatagcatgaagaaacacacatgggtagtgtgacctgtttggatgtgattacttaaaaatggaatgctctgaataggcactctctacattaaaggtatggaaggcgataggggtcagaattttaaaaatttaattttgaaaaaggtgactcacccctcatttccagagtgtaggcaattatgtcctgctttgataaaactgctagaggatggctatgcaaaagcataacgattcaaggaaacaaagtacaggtagtttttgagctgacagcagcaaaggcaccataagtcaaaatattggttttggtggagatgatcgatgtgtgtgtgtgagagagagctatgtttctaaccaagggcctaatgtttgttacagaaatgatcccagagacctacaagatgtgggaatcagcataacagggcaatgcagcaattaaccccacatcgttttctgtagttcctttttgtttcattttcttctgtctcacctcgttagaaaattcctcccagtcaggggtcgtccagtgcaggacgggggacccaagggtctcaagcctgcaagtccagaaggtgacaaacccaggagcactgggagttaagctttccttggggagggaagagccttgatgtccagcacacagcctggctataaagacacgaagcgacctacccactgtacagtccacttcacaggatcagctgaatcatgacctttaaaagttccgagttgaaactgaaggctctcctcagacctggctttttcctcagtccctgttcataccatctctgcacccacaatcacactgatttttcaaattcattttgtttttgctgtttcatttctggcattaataaaagtcttataaggaaaaaaaaaaaaaa

SEQ ID NO: 24827 - DNA, 11115 bp, Homo Sapiens
tgctgcttgcagctttttagatcaggactgcaatggagatacaattaaatcctaaaggtactttagaagcagggggtgttgtaatgtcttttctagataatggtgtgacactatgaagagatatcaagtttaattcttacaaattagaaagcatcatctgactaaactgagtgtctctggggcttaatcagcttgtatcactagtggggttttgtcatgcaaactgcactcctttaaatcataaggatgtgctggaaggctgctttcactttttagaattaaacttttcccccagtctcgtgagtattgcaactctcttaatgctttgaggagcttcaaagcatccttaagaaagggaaactaacttttgagaatattatggaaaaactgcgaatcaagtattccgaaatgtacaccatagtccctgcagagattgaatcccaggtggaagaatgcagaaaagctttagaagacatagatgagaagattagcaatgaagtcttaaaaagctcaccatcatatgcaatgaggagaaaaatagaagaaattaacaatgggcttcataatgttgaaaagatgttgcagcagaaaagcaaaaatattgagaaagctcaagaaattcaaaagaaaatgtgggacgagttagatctatggcattccaaactaaatgagctggattctgaagttcaggacattgttgaacaggacccaggacaggctcaagaatggatggataacttgatgattcctttccagcagtatcagcaagtatcacagagagcagagtgtagaacctcacagttgaataaggccacagttaagatggaggaatatagtgaccttctgaagagcactgaggcttggatagaaaataccagtcatttgctggccaatcctgctgactatgactctttgaggacactgagtcaccatgctagcactgtgcaggattccaagtgttttagaagtggaccaagaccaaatatttatgtttcttattatgttacagttatacagatggctttggaagattcagaacagaagcacaatcttttacattcaatctttatggatctagaagacctgtcaataatttttgaaacagatgaattaacccaatccatacaagagttaagtaatcaagtaacagctttacaacaaaaaataatggaaagccttccacagattcagcgaatggctgatgatgtggttgctattgaatctgaagtaaaatcaatggaaaaaagagtttcaaaaatcaaaactatcctattatcaaaagaaatatttgatttttcacctgaagaacatctcaaacatggggaggtcatacttgaaaatatacgtcccatgaagaaaaccattgctgagatagtgtcttacctagtggaactgaggttgccccaaacaggaatgaaacctctgcctgtgtttcagcggacaaatcagcttttacaagatataaaactattggaaaatgtgactcaagaacaaaatgagttattaaaggtagtcataaaacagaccaatgaatgggatgaagaaatagaaaatttgaaacagatcttaaataattattcagctcagttctcccttgaacatatgtcaccagaccaagctgacaagctgccacaactacagggagaaatcgaacgtatggagaaacagattctgagtttgaaccagagaaaagaagacctgttggtggacttgaaggccaccgtactaaaccttcaccagcatttgaagcaagaacaagaaggagtagaaagagataggctgccagctgtaacatcagaggaaggtggagtggcagagagggatgcttctgagcggaagttgaacagaagaggctccatgtcttacctggcagcagtcgaggaagaggtggaagaaagttccgtgaagagcgataatggagatgagaaggcagagccatcgcctcagtcttggtcttcactttggaagcatgacaaggacatggaagaagacagagcttcctcattctctggaacaattgttcaggaagcatatgggaaaataagcacctctgataattccatggcacaaatcctcacaccagactcactaaacactgagcaaggcccagaatgttccctaaggcccaaccaaacagaagagggcaccacacctcctactgaggctgacactctggactcttctgacgcgcaaggaggtttggagcccagggtggagaaaactaggccggagcccacagaagtcctgcatgcctgcaagacccaggtggccgagctggagctgtggctgcaacaagccaacgtggcagttgagccggaaacattaaacgcagacatgcagcaggtgctggaacagcagctggtagggtgccaggccatgctaacagagattgagcacaaggttgcctttctgttagagacttgcaaagatcagggcctgggagataatggagccactcaacatgaggctgaagcgctttccctgaaactgaaaacagtgaagtgcaatttacaaaaagtccagatgatgcttcaggagaagcacagtgaagatcagcatcctaccattctaaagaaatcctcagagccagagcatcaagaagctctccaaccagttaacctttctgaattggaatccattgtaactgaaaggccacaattcagcagacaaaaagatttccagcagcaacaggttctggagttaaaaccaatggaacagaaagatttcatcaaattcatagaatttaatgctaagaaaatgtggccccagtattgccaacatgataaagatacaactcaagaatcatctgcaagcaaccaggcatccagccctgaaaatgacgttccagactcgatcttgtcaccccagggccaaaatggagataagtggcaatatctgcatcatgaactctcatcaaaaataaagctcccactccctcagcttgtggagcctcaggtttccacaaatatgggtattctacccagcgtgactatgtataactttagatacccaacaactgaagaactgaaaacctataccacccaacttgaagacctgcgccaagaagcaagtaaccttcagacacaggaaaatatgacagaagaagcatatatcaatttggataaaaaattgtttgaactattcctgaccctcagtcagtgcctcagcagtgtggaggagatgctggagatgcccagactttacagggaggatggttctggccagcaggtgcactacgagacgctggctcttgagttgaagaaactttatttagcgctaagtgacaagaagggtgatcttttgaaagccatgacttggcctggcgagaacaccaacttgctccttgaatgttttgacaaccttcaagtctgcctggagcacactcaggctgcagctgtctgtagaagcaagtccctgaaagctggcctcgattacaaccgcagttaccagaatgaaataaagagattatatcatcagctcattaagagtaagacatctttacaacagtctttgaatgaaatcagtgggcagagtgttgctgaacagcttcagaaagcagacgcatatacagtggagctggagaacgccgagagccgagtggccaaactaagagatgaaggggagaggcttcatttaccgtatgctttactccaggaggtttacaaattagaggatgtacttgacagtatgtggggaatgctaagagccaggtacacagaactcagcagctctttcgtcactgagagccagcaagatgctttgttgcaaggcatggtggaactggtgaagattgggaaggaaaagcttgctcatggccacttaaaacaaaccaaaagtaaagtggcgttacaggctcaaatagaaaatcacaaggtttttttccagaagcttgttgctgacatgttgttgatccaagcatactctgccaaaatacttccttctttattgcaaatcagagagacattttgggcagaacaagtaacagaagttaaaatactagaagaaaagccacgccaatgtggtatgaagctgcagagtttgttgcagaaatgggaagaatttgatgaaaactatgcatctcttgaaaaggacctggaaattcttatatctacattgccctctgtgagtttggtggaagaaacagaggaaagattagtggaaaggatttcattttaccagcaaataaaaagaaacattggtggaaaacacgcccggctttaccaaactctgaacgaaggcaaacagttggtggcgtctgtgagctgtcctgaattagagggccagatcgcaaaactggaagagcagtggttgtccctgaacaagaaaattgaccatgagctccacaggctgcaagctcttctcaagcatctgctcagttataacagagattcggatcagttaaccaagtggttggaatcttcccagcatactctgaattactggaaagaacagtccctcaatgtgtctcaggacttggatacaatcagaagcaacatcaacaatttttttgagttttcaaaagaagttgatgaaaaatcctccttgaagactgccgttatcagtatcgggaaccagcttcttcacctgaaagaaactgatacagctacactgagagcttctttagcacagtttgaacaaaaatggacaatgctcataactcaacttccagatattcaagaaaaacttcaccagcttcaaatggagaaattgccgtctcgtaaagcaatcacagaaatgattagctggatgaacaatgtggagcatcaaacttcagatgaagactccgtgcattcaccaagttctgcatctcaagttaaacatcttcttcagaagcacaaggagtttagaatggaaatggactataaacagtggatagttgacttcgttaaccagtcattacttcagctaagcacctgtgatgtagaaagcaagcgctatgaaagaacggagtttgcagagcacctgggggagatgaaccgccagtggcaccgtgtacatggaatgctgaatagaaagatacaacatttagaccaacttctagaaagtatcactgagagtgaaaataaaatacagatcttgaacaactggctggaagcacaagaagagagactgaaaactttacaaaaacctgaaagtgtgatctcagtgcagaagctgctcctggactgtcaggatatagaaaatcaacttgcaattaaatccaaagcactagatgagttgaaacaaagttatctgactttggagagtggggcagtgccattgttagaagatacagcatcccgaattgatgagttatttcaaaagagaagcagtgttctcactcaggtcaatcagctcaaaacctccatgcagtcagttttacaggagtggaagatttatgatcaactctatgatgaagtgaatatgatgacaatccgattctggtactgcatggaacacagcaagcctgtggtgttatcattggagaccttgagatgccaggtggagaaccttcagtctctgcaagatgaagctgagagcagtgaagggagttgggagaaactccaggaggttatcggcaaactcaaaggtctctgcccctctgttgctgaaataatcgaagagaaatgccaaaatactcataaaaggtggactcaggtgaaccaagccattgcagaccagttgcagaaggcccagagtctgctccagctctggaaggcctatagcaatgctcatggtgaagctgccgcaaggctgaagcagcaggaagcaaagtttcaacagctcgcaaacatcagcatgtctggaaacaacctggcagagatcctgcccccagccctgcaggacataaaggagctgcagcatgatgtgcagaaaacaaaagaagcctttctccaaaattccagtgtcctggatcgactcccacaacccgcagagtccagcacccacatgctcctcccgggccccctgcactctctccagagggctgcttatttggaaaagatgctgcttgtgaaagcaaatgaatttgagtttgttctctcacagtttaaggattttggagtccggctggaatctttaaaaggtcttattatgcatgaagaagagaatttggatagacttcaccaacaggaaaaagaaaatcctgactcattcctgaatcatgtgctggcactgacagcccaatcacctgatattgaacatttgaatgaagtgagcctcaagctcccacttagtgacgtagctgtgaagacgttacaaaatatgaaccggcaatggattcgggccacggccacggcactggagcgctgcagtgagcttcagggaattggattgaatgaaaagtttctttattgctgtgaaaagtggatccaacttttggagaagatagaagaagcactcaaagtggatgtggctaacagccttcctgagctcctggagcagcagaaaacctataagatgttagaagctgaagtttctataaaccaggcaattgctgattcctatgtcacccagtccttacaactcctggacacaacagaaatagagaacagaccagaatttattacagaattctcaaagctgacggatcggtggcagaatgctgtccagggtgttcggcagaggaagggtgacgttgatgggctggtgaggcagtggcaagatttcactacttctgtggagaacttgtttcgcttcctcactgacaccagccacctgctatctgcagtgaggggccaggagcgcttcagcctctaccaaaccagaagtctgatccatgagctgaagaataaagaaattcattttcaaaggaggcgaactacctgtgccctaaccttggaagctggagaaaagttactgctcacaactgacctgaaaactaaagagtctgtgggtaggagaatcagtcaacttcaggacagctggaaagacatggagccccagctggcagagatgattaagcagttccagagcactgtagagacctgggaccagtgtgaaaagaaaatcaaggagttgaaaagcaggctgcaagttttaaaggcacaaagtgaagatcctcttccagagcttcacgaggacctccataacgaaaaagagctgattaaggaactagaacagtctttggctagctggactcagaacttgaaagaacttcaaactatgaaggcggacttaacccggcacgttctcgtggaagatgtgatggttttgaaggagcaaatagagcatttgcacagacaatgggaggacctctgcttaagggtggccatacgtaaacaggagattgaagacagactcaatacatgggttgtattcaatgaaaaaaataaagagttgtgtgcctggctggtgcagatggaaaacaaagttctacagacagcggacattagtattgaagaaatgattgaaaagttacagaaggactgcatggaagaaataaacttgtttagtgaaaacaagttacagttaaagcagatgggtgaccagttgatcaaggccagcaacaaatcaagagcagctgagatcgatgacaagctcaacaaaattaacgatcgttggcaacatctttttgatgtcatcggatcaagggtgaagaagctgaaggagacctttgcttttattcagcagttggacaaaaacatgagcaaccttcgcacctggttggctcgaattgagtctgagctttccaagcctgttgtttatgatgtctgcgatgatcaagagatccagaagaggctcgctgagcagcaggatctacagcgagatattgaacaacacagcgcaggggtggagtccgtgtttaacatctgtgacgtcctactgcacgactccgatgcctgtgcaaatgagaccgagtgtgactcgatccagcagaccaccaggagcctggacagacgctggaggaacatttgtgccatgtccatggagcggcgcatgaaaatcgaggagacgtggcgcctgtggcagaagtttttagacgactattctcgctttgaggactggctcaagtcagctgagaggacggcagcctgcccaaattcctcagaggtgttgtacacgagtgccaaagaggaactgaagaggtttgaggcctttcagcggcagattcatgagcggctcactcagctggagctcatcaacaagcagtaccggcggctggcccgggagaaccgcacagacacggccagcaggctgaagcagatggtccacgagggcaaccagcgctgggacaaccttcagaggcgggtcacagccgtcctgcggagactcaggcatttcaccaaccagagggaagaatttgagggcaccagggagagcattctggtgtggctcacagagatggacctgcagctgaccaacgtggagcacttctcagagagtgacgccgatgacaagatgcgccaactgaatggcttccaacaggaaattacattaaataccaacaagattgatcagctcattgtgtttggggagcagctgattcagaagagcgagcccctggatgctgtgctgattgaggatgagctggaggaactccaccgctactgccaggaggtgtttggaagggtctcccggttccaccggcggctcacctcctgcactccgggcttggaagatgaaaaggaggcctctgagaatgaaacagacatggaagaccccagagaaatccagactgattcttggcgtaaacggggagagagcgaggaaccgtcatctcctcagtccctgtgtcatctagtggccccagggcacgagcggtctggctgcgagacccctgtcagcgtggactccatccccctggagtgggaccacacaggcgacgtggggggctcctcctctcacgaagaggacgaggagggcccatactacagcgcactgtcaggtaaatccatttcggatggccactcgtggcatgttcccgacagcccttcctgtcccgagcatcactacaagcaaatggaaggtgacaggaatgttccacctgttccccctgcgtccagcaccccttataaaccaccctatggaaagctactattacctccaggcacggatggtggcaaagaaggcccgcgagtcctgaatggcaacccacagcaggaagacgggggactggccggtatcacagagcagcagtcaggtgccttcgacagatgggagatgattcaagcacaggagcttcacaataagctcaaaataaaacaaaatttgcaacagctgaactctgatatcagcgccatcactacttggctgaaaaaaactgaagcagagctggaaatgttaaagatggcaaagcctccctctgatatccaggaaatagaactgagagtgaagagactgcaggagatactgaaagcctttgacacttacaaggcattagtggtctctgtcaacgtgagcagcaaggaatttctgcaaaccgagagccccgaatccacagagctccaaagtagactccgccagctgagcctgctctgggaagcagcacagggcgcagtggacagctggagagggggcttacgacagtcgctcatgcagtgccaggacttccaccagttgagtcaaaatctgctgctgtggttagcgagtgccaagaaccggaggcagaaggctcatgtcaccgatccaaaggcagacccccgggctctcctagagtgtcggagggaactaatgcaactggaaaaggagctggtagaacgtcaacctcaagtggacatgttacaggagatttcaaacagccttctcattaagggacatggagaagactgtattgaagctgaagaaaaggtgcatgttattgagaagaaactcaaacagttacgggagcaagtgtcccaagatttaatggccttgcagggaacccagaacccagcctcacccctgcccagcttcgacgaggtagactcgggggaccagcctcctgcaacatccgtgccagctccccgagcaaagcagttcagagcagtgagaactacagaaggcgaggaggagacagagagcagggtccccggcagcacacggccacagcgctccttcctctcaagggtggtccgggcagccctacccctgcagctgctcctcctgctgctgctgctcctggcctgcctgctgccctcctccgaagaagactacagctgcactcaggccaacaactttgcccggtccttttaccccatgctgaggtacaccaatgggccaccccccacatagagggcatagctggccacagtgctacaccacctgcctgattgccaagggtgcccagcacgtggccccagaccaatctgagtgacttagtgttggcaaggtcccgggacctgtgcagacttcttctgggcttacacagcacgggctccctggagcccagggcagctttcagattgtgttcctccccaggagcagggaacctgtgtggcaggtgccccgggtactttggcagaactagttgattagtttagggatctctggaaatgtcagtttcctgaagagccaagcactttgtgaattctggtttgtttgtaaaacagcattattataatgtaggtatggtcaatgagcagtggtgtccatcacatatattatagaagcaagcgagcacattccaccctagaaatggttcagaaactcataggcacccttagctgatggaaacaatcaatcatatttaatacgcttagaatcagttttactccaatcagctggcaattttgagctgccggttatacaccaaaatgttctgttcagtacctagctctgctcttttatattgctttaaatttttaaagaaattatattgcatggatgtggttatttgtgcatattttttaacaatgcccaatctgtatgaataatgtaaacttcgatttttttttaaaaaaattagattttagctggagcttttgactaatgtaaagtaaatgccaaactaccgacttgatagggatgtttttgtaagttaattttctaagactttttcacatccaaagtgatgctttgctttgggttttaactgtttggccacggcgggggtgggggcggggggttggtacagaaacttgaagctgtttgtgatatgtacaactcagatgtttctcattaaaaaacaaaattagccagaaaaaaaaaaaaaaaaaa

SEQ ID NO: 24828 - DNA, 1786 bp, Homo Sapiens
agtcgggccgcggcgacggcggcaggagcgcgtcccggcgccgcctcgggctccgctcggctcgggggctgcttcgggaggaggagagccaagggaggcgccaggcccgcgggccgggcgcatggcttagggacgctcccggccgccgcagccccagcatggggaaacttcactccaagccggccgccgtgtgcaagcgcagggagagcccggaaggtgacagcttcgccgtgagcgctgcctgggctcggaagggcatcgaggagtggatcgggagacagcgctgcccgggcggtgtctcgggaccccgacagctgcggttggcgggcaccataggccgaagcacccgggagctcgtgggcgacgtgttgagagacacgctcagcgaggaagaggaggacgactttcggctggaagtggccctgcctcctgagaagactgacgggctgggcagcggagatgagaagaagatggagagagtgagcgaaccctgcccaggctccaagaagcagctgaagtttgaagagctccagtgcgacgtgtccatggaggaggacagccggcaggagtggaccttcaccctgtatgactttgacaacaacggcaaggtcacccgagaggacatcaccagcttgctgcacaccatctatgaggtggtggactcctctgtcaaccactccccaacatccagcaagatgctgcgggtaaagctcaccgtggcccccgatggcagccagagcaagaggagcgtccttgtcaatcaggctgacctgcagagcgcaaggccccgagcagagaccaagcccactgaggacctgcggagctgggagaagaagcagcgagccccgctcaggttccagggtgacagccgcctggagcagtctggctgctaccaccattgcgtagatgagaacatcgagaggagaaaccactacttagatctcgccgggatagaaaactacacgtcccaatttgggcctggctccccttccgtggcccagaagtcagaactgcccccccgcacctccaatcccactcgatctcgctcccatgagccggaagccatccacatcccacaccgaaagccccaaggcgtggacccggcctccttccacttccttgacaccccaatcgccaaggtctcagagctccagcaacggctccggggcacccaggacgggagcaagcactttgtgaggtcccccaaggcccagggcaagagtgtgggtgtgggccacgtggccagaggggcaagaaacaagccccctctgggacccgccatccctgcggtgtccccctccgcccacctggctgccagcccggccctcctcccctccctagcccccctcgggcacaagaagcacaagcaccgagccaaggagagccagcagggctgccggggcctgcaggcaccactggcctcaggtggccctgtcctggggcgggagcacctgcgggagctgcccgccttggtggtgtatgagagccaggccgggcagccggtccagagacatgagcaccaccaccaccatgaacatcaccaccattaccaccacttctaccagacatagagcccctccccagggccccaccctgccatatgaaggaccccacccccgacaccacaaggcattattattctattaattattgttattatgatgattattgttattaataattattgttactccactaatatttagctagcctacatgtagaagatctatggaaacacagaactaaacttttatttatatgttaaaaaaaaaaaaaaaaaaaaaaa

SEQ ID NO: 24829 - DNA, 5250 bp, Homo Sapiens
atggcggacgaggaggctggaggtactgagaggatggaaatcagcgcggagttaccccagacccctcagcgtctggcatcttggtgggatcagcaagttgatttttatactgctttcttgcatcatttggcacaattggtgccagaaatttactttgctgaaatggacccagacttggaaaagcaggaggaaagtgtacaaatgtcaatattcactccactggaatggtacttatttggagaagatccagatatttgcttagagaaattgaagcacagtggagcatttcagctttgtgggagggttttcaaaagtggagagacaacctattcttgcagggattgtgcaattgatccaacatgtgtactctgtatggactgcttccaggacagtgttcataaaaatcatcgttacaagatgcatacttctactggaggagggttctgtgactgtggagacacagaggcatggaaaactggccctttttgtgtaaatcatgaacctggaagagcaggtactataaaagagaattcacgctgtccgttgaatgaagaggtaattgtccaagccaggaaaatatttccttcagtgataaaatatgtcgtagaaatgactatatgggaagaggaaaaagaactgcctcctgaactccagataagggagaaaaatgaaagatactattgtgtccttttcaatgatgaacaccattcatatgaccacgtcatatacagcctacaaagagctcttgactgtgagctcgcagaggcccagttgcataccactgccattgacaaagagggtcgtcgggctgttaaagcgggagcttatgctgcttgccaggaagcaaaggaagatataaagagtcattcagaaaatgtctctcaacatccacttcatgtagaagtattacactcagagattatggctcatcagaaatttgctttgcgtcttggttcctggatgaacaaaattatgagctattcaagtgactttaggcagatcttttgccaagcatgccttagagaagaacctgactcggagaatccctgtctcataagcaggttaatgctttgggatgcaaagctttataaaggtgcccgtaagatccttcatgaattgatcttcagcagtttttttatggagatggaatacaaaaaactctttgctatggaatttgtgaagtattataaacaactgcagaaagaatatatcagtgatgatcatgacagaagtatctctataactgcactttcagttcagatgtttactgttcctactctggctcgacatcttattgaagagcagaatgttatctctgtcattactgaaactctgctagaagttttacctgagtacttggacaggaacaataaattcaacttccagggttatagccaggacaaattgggaagagtatatgcagtaatatgtgacctaaagtatatcctgatcagcaaacccacaatatggacagaaagattaagaatgcagttccttgaaggttttcgatcttttttgaagattcttacctgtatgcagggaatggaagaaatccgaagacaggttgggcaacacattgaagtggatcctgattgggaggctgccattgctatacagatgcaattgaagaatattttactcatgttccaagagtggtgtgcttgtgatgaagaactcttacttgtggcttataaagaatgtcacaaagctgtgatgaggtgcagtaccagtttcatatctagtagcaagacagtagtacaatcgtgtggacatagtttggaaacaaagtcctacagagtatctgaggatcttgtaagcatacatctgccactctctaggacccttgctggtcttcatgtacgtttaagcaggctgggtgctgtttcaagactgcatgaatttgtgtcttttgaggactttcaagtagaggtactagtggaatatcctttacgttgtctggtgttggttgcccaggttgttgctgagatgtggcgaagaaatggactgtctcttattagccaggtgttttattaccaagatgttaagtgcagagaagaaatgtatgataaagatatcatcatgcttcagattggtgcatctttaatggatcccaataagttcttgttactggtacttcagaggtatgaacttgccgaggcttttaacaagaccatatctacaaaagaccaggatttgattaaacaatataatacactaatagaagaaatgcttcaggtcctcatctatattgtgggtgagcgttatgtacctggagtgggaaatgtgaccaaagaagaggtcacaatgagagaaatcattcacttgctttgcattgaacccatgccacacagtgccattgccaaaaatttacctgagaatgaaaataatgaaactggcttagagaatgtcataaacaaagtggccacatttaagaaaccaggtgtatcaggccatggagtttatgaactaaaagatgaatcactgaaagacttcaatatgtacttttatcattactccaaaacccagcatagcaaggctgaacatatgcagaagaaaaggagaaaacaagaaaacaaagatgaagcattgccgccaccaccacctcctgaattctgccctgctttcagcaaagtgattaaccttctcaactgtgatatcatgatgtacattctcaggaccgtatttgagcgggcaatagacacagattctaacttgtggaccgaagggatgctccaaatggcttttcatattctggcattgggtttactagaagagaagcaacagcttcaaaaagctcctgaagaagaagtaacatttgacttttatcataaggcttcaagattgggaagttcagccatgaatatacaaatgcttttggaaaaactcaaaggaattccccagttagaaggccagaaggacatgataacgtggatacttcagatgtttgacacagtgaagcgattaagagaaaaatcttgtttaattgtagcaaccacatcaggatcggaatctattaagaatgatgagattactcatgataaagaaaaagcagaacgaaaaagaaaagctgaagctgctaggctacatcgccagaagatcatggctcagatgtctgccttacagaaaaacttcattgaaactcataaactcatgtatgacaatacatcagaaatgcctgggaaagaagattccattatggaggaagagagcaccccagcagtcagtgactactctagaattgctttgggtcctaaacggggtccatctgttactgaaaaggaggtgctgacgtgcatcctttgccaagaagaacaggaggtgaaaatagaaaataatgccatggtattatcggcctgtgtccagaaatctactgccttaacccagcacaggggaaaacccatagaactctcaggagaagccctagacccacttttcatggatccagacttggcatatggaacttatacaggaagctgtggtcatgtaatgcacgcagtgtgctggcagaagtattttgaagctgtacagctgagctctcagcagcgcattcatgttgacctttttgacttggaaagtggagaatatctttgccctctttgcaaatctctgtgcaatactgtgatccccattattcctttgcaacctcaaaagataaacagtgagaatgcagatgctcttgctcaacttttgaccctggcacggtggatacagactgttctggccagaatatcaggttataatataagacatgctaaaggagaaaacccaattcctattttctttaatcaaggaatgggagattctactttggagttccattccatcctgagttttggcgttgagtcttcgattaaatattcaaatagcatcaaggaaatggttattctctttgccacaacaatttatagaattggattgaaagtgccacctgatgaaagggatcctcgagtccccatgctgacctggagcacctgcgctttcactatccaggcaattgaaaatctattgggagatgaaggaaaacctctgtttggagcacttcaaaataggcagcataatggtctgaaagcattaatgcagtttgcagttgcacagaggattacctgtcctcaggtcctgatacagaaacatctggttcgtcttctatcagttgttcttcctaacataaaatcagaagatacaccatgccttctgtctatagatctgtttcatgttttggtgggtgctgtgttagcattcccatccttgtattgggatgaccctgttgatctgcagccttcttcagttagttcttcctataaccacctttatctcttccatttgatcaccatggcacacatgcttcagatactacttacagtagacacaggcctaccccttgctcaggttcaagaagacagtgaagaggctcattccgcatcttctttctttgcagaaatttctcaatatacaagtggctccattgggtgtgatattcctggctggtatttgtgggtctcactgaagaatggcatcaccccttatcttcgctgtgctgcattgtttttccactatttacttggggtaactccgcctgaggaactgcataccaattctgcagaaggagagtacagtgcactctgtagctatctatctttacctacaaatttgttcctgctcttccaggaatattgggatactgtaaggcccttgctccagaggtggtgtgcagatcctgccttactaaactgtttgaagcaaaaaaacaccgtggtcaggtaccctagaaaaagaaatagtttgatagagcttcctgatgactatagctgcctcctgaatcaagcttctcatttcaggtgcccacggtctgcagatgatgagcgaaagcatcctgtcctctgccttttctgtggggctatactatgttctcagaacatttgctgccaggaaattgtgaacggggaagaggttggagcttgcatttttcacgcacttcactgtggagccggagtctgcattttcctaaaaatcagagaatgccgagtggtcctggttgaaggtaaagccagaggctgtgcctatccagctccttacttggatgaatatggagaaacagaccctggcctgaagaggggcaacccccttcatttatctcgtgagcggtatcggaagctccatttggtctggcaacaacactgcattatagaagagattgctaggagccaagagactaatcagatgttatttggattcaactggcagttactgtga

SEQ ID NO: 24830 - DNA, 2102 bp, Homo Sapiens
gtcgaccgtagctgcagctttggaggagtaagcggcgtggtagcgaaggtcgccgaacccgcctggctagccggcgagttgagtggcgactcttttgaaacagatggtcaccatgtttagatattagcagtcccgtatgtgcatgtctgcatttgaaaatggaagagggaaacaacaatgaagaggtaattcacttgaacaactttcactgccatcggggacaagactttgtaattttcttctggaaaacccagattatccaaagagagaagacagaatcattataaatcccagtagcagtctgctggccagccaagatgagacaaagttgcctaaaataagacttttttgactattctaaattgactcctcttgaccagcactgcttcatccaagctgctgacctcctcatggccgacttcaaagtgctcagtagtcaggacatcaagtgggccctgcacgagctcaaaggacactatgcaatcacccgaaaggccttttctgatgccattaaaaaatggcaggagctgtcaccagaaaccagtggaaaaaggaaaaagagaaaacaaatgaaccagtattcttacattgatttcaagtttgaacaaggtgacataaaaatagaaaagaggatgttctttcttgaaaataagcgacgacattgtaggtcctatgaccgacgtgctctccttccagctgtgcaacaagagcaggagttctatgagcagaaaatcaaagagatggcagagcatgaagactttttgcttgccctacagatgaatgaagaacagtatcaaaaggatggccagctgattgagtgtcgctgctgctatggggaatttccattcgaggagctgacgcagtgcgcagatgctcacttgttctgcaaagagtgtctcatcagatatgcccaagaggcagtctttggatctggaaagttggagctcagctgcatggaaggcagctgcacgtgttcgttcccaaccagtgagctggagaaggtgctcccccagaccatcctgtataagtactatgagcgaaaagccgaggaggaggttgcggcagcctacgccgacgagcttgtcaggtgcccgtcctgtagctttccggctctgttggacagtgatgtgaagaggttcagctgtcctaatcctcactgccgaaaggaaacctgtaggaagtgtcagggactctggaaagaacataatggcctcacctgtgaagagctggctgaaaaagacgacatcaagtaccgtacctctattgaagaaaaaatgactgctgcccgcattagaaaatgccacaagtgtgggactggcctcatcaaatctgaaggctgcaaccgcatgtcttgccgctgtggtgcccagatgtgctacctctgtcgagtttctattaatggatatgaccatttctgccaacatccccgctcaccaggagccccttgccaggagtgttcaagatgctctctctggaccgatcccactgaagatgatgagaagcttattgaggaaatccagaaggaggctgaagaggaacagaaaagaaagaatggagagaacaccttcaaacgcattggacccccgctggagaagcctgtggagaaggtgcagagggtggaggccctcccgaggcccgttccgcagaacctgccacagccacagatgccaccctatgccttcgcgcacccacccttccccctgcctcccgtgcggcctgtgttcaacaacttcccactcaacatggggcctatcccagccccgtacgtgccccctctgcccaacgtgcgggtcaactatgacttcggtcccatccacatgcccctggagcacaacctgcccatgcactttggcccccagccgcggcatcgcttctgatggccccgaatccccattgagcagcacaaagcccgtttggggtaggagtgtggatggagaaccctcccccaaggctggtgtctgtaccattgcatcctaagtcagcttgaagggtaggctggttttcttcccacccctttcctagaagggctactgctcctggaagagtggacggatccataataaagacgtcccaaatggtggaaaaaaaaaaaaaaaaaaaaa

SEQ ID NO: 24831 - DNA, 11114 bp, Homo Sapiens
gtagtctaggatttcagctgccctgggggctcattttccctctcagcttcctgctttagctgtctcctgcctcccactcacctattactccagcactctcacctggtcttcttttctgtctcatcactgcctcttgacatctttatctcatagtagttagttaggggttcttggtaatgccctaaatccacatggtgggaaggggggagtgggggaagagagtgcgctgtggggctgtgcctacttctggagggtaagactcgggccctccaggaacaaaggattcaggctggtggcagctatagccaagcagactgctggccagggattgcaaaggagtattttgtttgcttaagaaaataaacaacactgagtatgagatggagggagggggtgttggtgccagagagattgggaagagtctgccaagggtgtgttctactcactctcctcttttctttcatctccactgagctggaggcagttatcctgtcccccacgtcacattcctactcccgtttcccatgcctggacccaggttgggcaaactcttcctgtaaagaaccagacaggaactattttaggctctgtgtgccatatggtctcagtcacaactactcatctctgcctctgtagcacgaaagcaattagcaacaatatgtcaacaaacatatgtgaccccatgaaaactttatttattatggatacggaaacctgaaaataatgtctttcttttgattttttccccaatcattaaaaaacgtaaaaactactcttaggtcgcaaggttaagccattctcagcttagcagtggcaggctggatttggcttgtgacctacagttggccaatccctgattcccaaaatgtattcctcagggatgtgggcaaatacttatgggaaatgctggattaaacagagttaagaagcatcagacatttccaggacgggctagcacatgccagggctctctaactgacctcattaggattcatctgtttcatggaggatcttgcaagacaagaattcctcaaacctagagtctgaggactgtgctttgggaaacactgctctgcttgatgccctcactgggcacatggtagaatctagagctgagtgccttgctagctggagatagggtcagagctcttgactgccctggcagtcttgacacatcacgctgtctgtgtcccctgagtggttcagagccacacaggccaagactagcccaccagagcaccaggcctcccagctttctgggcttgtccatgcgtacatttccttattcttcctggtttccagaacctaaggagaggcacattttggttgagtgattataaccctagggaccatgggtagctgcatgtcaggaaacactcctcaacttcctggccctgatggattaaaggagaggtacttacaggttatttcttcgctgtggactactgtcccagcatgaatagggcatcattattgaattattttgacaggaaggagactggtgtatgctgcacagtaataatgtatttacatgtgtacagagtttaccaagcacctctgtgttgtttttgcctctgtttattacacttgcccttggggggaggtgggacaaattttttaaaaatttatacatgcagagactgcagcgcagagaagctaagagacttgcccctgcccacacagccagtggtagagcctgaactcaaacccaggtctcatctcacctcaggggctgctttccccatcgctgtattgtccttaaagtgatgggtgactaggcaatgaagtaattctctaggaaagcatgaccaatttccctttctccacctccctctttttcctccacccctcccccatcagcccccatatatatgcccaaatctccacaaagccttgcttgcctgcaaacctttacttctgaaatgacttccacggctgggacgggaaccttccacccacagctatgcctctgattggtgaatggtgaaggtgcctgtctaacttttctgtaaaaagaaccagctgcctccaggcagccagccctcaagcatcacttacaggaccagaggtgagcatgggggattcttggttacttttttttgaaggactagacctctgctttatttgtgaaaaggggtcaaggtggggacagcagaagtcaatttttttgagtgttgatgtagggacaagacatgactgtgatgaggagctgctttcgccaatttaacaccaagaagaattgaggctgcttgggaggaaggccaggaggaacacgagactgagagatgaattttcaacagaggctgcaaagcctgtggactttagccaggtgcggtggctcacacctgtaatcccagaactttgggaggctgaggtgggcagatcatttaaggtcaggagttcgagaccagcctggccaacatggtgaaaccctgtctctactaaaaatacaaaaaaaaaattagttgggcatgtgtttttgatattttcagatacaaaaatcccagctacttgggcgactgaggcatgagcatcacttgaacctggtaggcagaggttgcagtgagccgagatcatgccactgcactccagcctgggtgacagactgaaattctgtcaaaaaaaaaaaaaaaaaaaaaagcctgtggagtttgaaagaacagaatgaaaagacattgagggagatgctaaagcatagcccccgtcccccgtgacccataacccaggggtcgccgcctccctagcccaggtaccagcagaaccgggtcttctctggtcttcctcccggtgtaggggtgggaggcagtttctttaggtgtcagaccagtgcctgcagtaagaaaggttcttaaatgattgtgtaaagaagtacgaaagaaagggagaaagtaagaaagggagggagcgagagaggaaagaaggaagaaagaaaggtaaggagggagggagggagagagggagggaaaggacaaagggcaaagaaggcagggggaaagaaattctctgcatcagttataataaatacataatggcgttaggttccccagcttggaggctcttcactcagtccttcccaactggcacttcagaggaaggctttagagatgattcatctggaaatctgatgcctctctctcatttggttactaaaaaaagtgaatttttagactcaagagtgagtggttagtggaggtggcatagtctgtgtgtgaccctgacctgccctctgtgcccctccctgggaccaggattaacccctcgctcccttgtgatgaggagtgagggacagccgtctcctggggaggagaaaaagacctgccagcctatgtgtgcctagtggcttcagggcagaacttggataagcacatgtctagttcagctctttgttttcctgggtttgggctccccagacgtggcacattagaacctcccatttctccactcttctgggtcaaattctgactcgcaggttgtaggctagagagaactgcgatggagaaggaggaggtgcagggcgtgtgggtgtggacgggcaaggtggggaagagcagggtggacagatggcaagacgagcggccttaagtttgaggggcagaaagacccctgcttcacccccactgcaccttagcaaggctgccggtttgcaatagtctcaacttgcccattggagagtgctcgagattggcccggggagaccctcggagcattttcccagggcatgtaactctgggtcagagggccggcctcacaggctgcctccctttctttcagcagacccttctgccctcctttgctggcgacagcctctcaaatgcagatggttgtgctcccttgcctgggttttaccctgcttctctggagccaggtatcaggggcccagggccaagaattccactttgggccctgccaagtgaagggggttgttccccagaaactgtgggaagccttctgggctgtgaaagacactatggtgagtaaagtgctgttctggacccagtcgtgggggttcctgggggcagtgggccagtggggcgaggggatgctattttatgattctggagtccttcacagcttgctaatcagtttccagtttcccatataataactctgtgaggtcagaaggcaccacaagccccatttacacatgaggaaattggggctcagaaaaaatgtgggcagcctcgagtgaaataagcagtgcccaagggaaaccatgaagagagctagattcatccaggcttcgtcccgaatagagtcttcggctctaaatctgagaactggaatgagtggctgggctgtggaggaagctccaagggcaagaggcagctctaggggtgcaggctgtcctccctcacatcctgcttcctcaccacatggaatatggagccaaaatcctgcccatagtggttcttaaagcagataggcttatttcctcccatctcaaatgaccagaggcatcaaactgcttccttatcaaatctatgttcatgctctaagaataagaagaactcctgggactccatttgctcctggggggccaagcttagtcattttcgtggctgcaaccttgtctcccctccccatgggccagctcagcccagcccttcctgggtcctcttttggtccctctggcctttgagatctcacagactagatagatttaggggtctagggaagcagcacatatttgcagagttggtttctatgctgacccctaacctggagacgtcttttctttctgtttgccaagcaagctcaggataacatcacgagtgcccggctgctgcagcaggaggttctgcagaacgtctcggtaatcagacctcggggacaccaccctctgtgggacgggtctactgtgggtgggagtgcaaggctttcttaggggaggttgatgaaagcccttcacttcttccctggactgaccttacacaggacagggccagactgtgagccagggaagtcagtgtctggggttattgctatgtggtatgtgtgtgcagtggtactgggagatggggaaggtggaggcttgtaaacatctttctccatttagccagagaattatatatttctcttttacttgtgtaggcccaataggcatctacttaggttcatgtcctctcttccattttcatccttttctctgggtcctttttcctgggtcctcctttggtccatctggcctttgatgtctcatagactggatagatttagggggtccagggaagcagcacatatttgcagagctggtttctatgctgaaccctaacctggagacatcttttctttctgtcatgtgagctcatgtgaagtgagctcatgacttaaaataatacctaacaaaaggattcatcctttctttcaccacaatcaggtagagtatgttatcaaggatgggtcaccatcttctcatcatccatctagtgggcacaaacctactgagccctgagccctgaaagatgtggcacttcaggagcttgagggggctagagtgcaattgctgtgtccaaagatattagtttctcctcatttcttctgttctcagtcattttccagcaaactctatatcaccaagtccaagttcaagcccttttcagggtccatcacatccccatagctgttaaagaggccatgtggcatagaagaaagagaatattaagcagatgggcagtcaggaatcctgggagctaggctgtgtctgccactgattgactatgtgaatcgggccaggtcatttctctccctgggtcttggttcctcctctcaaacaaagacctgctctccatggcccctgaaggctcctacagatctaaggttcatcatcaccttctagaagatccctatctctgctgtgcttatcttgccttgggtggcatgtgggttgttccttcagggggtcagggtgggcagaggccttggctcagcagtgacccagaccttccccaggatgctgagagctgttaccttgtccacaccctgctggagttctacttgaaaactgttttcaaaaactaccacaatagaacagttgaagtcaggactctgaagtcattctctactctggccaacaactttgttctcatcgtgtcacaactgcaacccagtgtgagtagcacacgctctggatactggcagctctgggttcaagtctaggtctgcttccaatctgctgggtgaccctctgcaaagtcctccacctccctgggcttcagtttgttatctgtaaaatggggatgatcactcctgcctggcaggattgctgcgagaattaaaggaggcagcccctttcacaaggtgggagtttggtattggttaccttggggaatgcaggattcagccctgggctctcaggctttgggagaccctgtggcatcagcaggaaaactgagagggagtttgcatctgctcctatctaaaaattggcacaacttcttttcccatgttatgtagcaagaaaatgagatgttttccatcagagacagtgcacacaggcggtttctgctattccggagagcattcaaacaggtaaggccaagagctgagagcttgcccatccagcagaatagactagtctgcaccatcacacgagggcgcctcagagacccaatgcagaatgtaatgcaggggacaccatcagctttgctccaaagccccctgacttagcaggagcacagttatatttgcagaagcatcgtaaactaagtggtcttttttcttccagttttcaagttaaagtgcttctatatttccctacaagatgattttacgaaaggaactttccctgtgttttgtaggtacttgggctgggcaactgaagtcagaagagagggagaaagaagggagacaccccacccccacccccaccccatacacatctgcagtattttccatgatgctcaactggtctagttgtgaaaaacaattatgggaaattatttttgcttttccaaaattatgacaacaaagaaaacccaaatttcatccccagccccccctaaaaacataaatgatttcgatcactttttttttttgaggaagagatgcatcagcttttaaataaatggtgaagagcaataacatctgatggagaggggccacctgggctcatttcacctgtgcagtggattcaggtggtgggccatatccatcccatactgcagtttgtggttgctgttgttaggggtgccatatgtctttcccttgttctttgtccactgatattcactagcctgtttgtcctcacccctgaagcagataaacacatgtagatggaggaaaagtgacaggcaggtgggttcatcagtgggctcatcccaaaggtgacccatcccttggattggagtcaggtctattttaggcatggcaggttggaagaaagactattctcatagctaacatggctgaccttcaaccctcttttccctttagttggacgtagaagcagctctgaccaaagcccttggggaagtggacattcttctgacctggatgcagaaattctacaagctctgaatgtctagaccaggacctccctccccctggcactggtttgttccctgtgtcatttcaaacagtctcccttcctatgctgttcactggacacttcacgcccttggccatgggtcccattcttggcccaggattattgtcaaagaagtcattctttaagcagcgccagtgacagtcagggaaggtgcctctggatgctgtgaagagtctacagagaagattcttgtatttattacaactctatttaattaatgtcagtatttcaactgaagttctatttatttgtgagactgtaagttacatgaaggcagcagaatattgtgccccatgcttctttacccctcacaatccttgccacagtgtggggcagtggatgggtgcttagtaagtacttaataaactgtggtgctttttttggcctgtctttggattgttaaaaaacagagagggatgcttggatgtaaaactgaacttcagagcatgaaaatcacactgtcttctgatatctgcagggacagagcattggggtgggggtaaggtgcatctgtttgaaaagtaaacgataaaatgtggattaaagtgcccagcacaaagcagatcctcaataaacatttcatttcccacccacactcgccagctcaccccatcatccctttcccttggtgccctccttttttttttatcctagtcattcttccctaatcttccacttgagtgtcaagctgaccttgctgatggtgacattgcacctggatgtactatccaatctgtgatgacattccctgctaataaaagacaacataactcaagtctggcagactttcttctctatttctggatgaatgcccagtgagactgtgttgtacagctagaaaaggccttcttcccaatagcaaggctgtgcatctagcctcaagctctggctgaactttgtggtcgacatcaatctaaagatacagtgtctgactataaccttgttccaaaaacctaggcaaagagtatatgtaggaggtgggatatcacttccatgacataagtgctattgcagagccgtggccacccaggaactcctgactgctttccttcccctgcttgctatacattgtctggaactggctaagaaatggggaacatttgtgaaaaccaagaaatgtaatggttttggatgaataaaatagaccaaagttaaggtaagtgcacaaatatcagtgtcaggctatggaagaaagataaagagatacttcttttttttttttttttagaggggagatgctgaggtcagggcacttatgtgcatcaagtgatggagacagagtaaagagaatttatggatatatatgcatatcttgctaataagtttggtttatcatcacatcaagataaattgcctttagcatagaacttgagataagtagacgttcactagcaagtgctaacatttggatcagggcaaaggcgtttccaggagtgtttttataccagacccctgcttagtccatggggctgaggcatgtcacataactcagagcaagagccttctatttgtgtaagacccaaccctgggaaggatgcccgagacaatagctatgcctctgccccagcctgatgccatgtgatctagagcctgggcagcaacaaccctgtggtcaaagacatggaagaaacactctgcaaatcccacagtctgttcgacggcttggaaaggaagcaagtggcattgggacaattgctctacatgcctacagcttacctgtcaactacagggggctgccaaggtgtgcaagacgacctgggggcagagccatgctcagggcacagatagatggggatgggagtcgagatggggcatgggaagtgatgagggctctgagaacacatgaagcaggtattggacatcagcagatagatgagactccttggcaccacagtccgagcctggggttgggggatagctggggagttgtcaggcaggaacattgatgtagtcatctgaatcactgtcctccatcatggcggcaggctggtggtagaggctcacgtattcacagctggtcttcagagatggggcatggagccagggagattcagacacctggggacaatgaaagaagcatcactggatctgggtagggtgattttaatatctccccaggtggattttcatagtgggcaatggggcatggacatggctgctgagttccagaaggcaaagacacagagatggctcagctccatcaagtggagtagccctggggattttcagggtagtgtctcacctgagataactggaaaacctaatgtgggcaggaaatgccttaaatggggctcagagtaaaatcatgtggctaagcatgggcctgaaagagacccagctgccagaggagtatcccctcggggataagatgctgtgacttatggcataaatatgcatcttcttagggagttattcagaagtagagtgagtcaccctcagcacctctgtaagggctcagagatgctgtgatgtggcgtcgtgacagtgcattccaggaagggggatggatggtgaaggggataagatggcagcccacatggaacactggtgctcctcttccccagacagaaacttcaggatcatccaccttgaggacagtcagttctcaaaagacaggactgtgccagtgaccccaacatggcacagttactatctcatccactgaggaaggccacaagggggacagttatgtatttaaacacaagctctgagaattagacgtccagcagcctgaatatagtaggcattcaggaagtactcattgaaaggaacttttatatattttgtactttactaaagagggaagcagcagcagcttgctttgaaaacatgttttccatcagtcaaggaagtaagaagccacaaaacagaaaagaaaaaaagagagaaggttgaaaagaaaagtaacagtgagagcaaagaaaactaagcaacaaaattacatggtcctggtataaatgtcagtgaggatgaaactcagtcaagtaatcagtgaaagacagctaataagcacatgttggtagcactccacttagatgatataagaccagtcaagaaagacctggatcccagaacagctcaagatgtcaacccgaagcaaattaaccagcacataacaataggagaaacgatacacaaagttggaggtgacacagagaaatgagagatgatcaagataaaatttccagggtgggaaggaaggtggtaatacctgagcttcctttagaggccaaagaagagactgaggacgggaagaagatgaggctgaggatggggaagaggatgaggcagaggaaatcctcgatgtatgacatgattttgtttttgttaaattaaacgaactttgaaaaaagtgagcaagtcctttgttagtttttcacactatcttctattatgttttaattaactttctttgtctgaaatagagatggttttagatttgctaaaaaacaaaaatttgtctttcactgcctgttatagttcatcatttgagattaacttatttggcttaagaaatggaaatgctccccatggaagctataataatgagtcattaagcataggcacc

SEQ ID NO: 24832 - DNA, 1617 bp, Homo Sapiens
aggagggcaggatggaaaatgcccctcttcctcatactgtgcctgctacaaggttcttctttcgcccttccacaaaaaagaccccatccgagatggctgtgggagggctctctcccctccaggacccatctccgggccatgggaacactcaggccttcctcgcccctctgctggcgggaggagagctcctttgcagctccaaattcattgaagggctcaaggctggtgtcaggggagcctggaggagctgtcaccatccagtgccattatgccccctcatctgtcaacaggcaccagaggaagtactggtgccgtctggggcccccaagatggatctgccagaccattgtgtccaccaaccagtatactcaccatcgctatcgtgaccgtgtggccctcacagactttccacagagaggcttgtttgtggtgaggctgtcccaactgtccccggatgacatcggatgctacctctgcggcattggaagtgaaaacaacatgctgttcttaagcatgaatctgaccatctctgcaggtcccgccagcaccctccccacagccactccagctgctggggagctcaccatgagatcctatggaacagcgtctccagtggccaacagatggaccccaggaaccacccagaccttaggacaggggacagcatgggacacagttgcttccactccaggaaccagcaagactacagcttcagctgagggaagacgaaccccaggagcaacccggccagcagctccagggacaggcagctgggcagagggttctgtcaaagcacctgctccgattccagagagtccaccttcaaagagcagaagcatgtccaatacaacagaaggtgtttgggagggcaccagaagctcggtgacaaacagggctagagccagcaaggacaggagggagatgacaactaccaaggctgataggccaagggaggacatagagggggtcaggatagctcttgatgcagccaaaaaggtcctaggaaccattgggccaccagctctggtctcagaaactttggcctgggaaatcctcccacaagcaacgccagtttctaagcaacaatctcagggttccattggagaaacaactccagctgcaggcatgtggaccttgggaactccagctgcagatgtgtggatcttgggaactccagctgcagatgtgtggaccagcatggaggcagcatctggggaaggaagcgctgcaggggacctagatgctgccactggagacagaggtccccaagcaacactgagccagaccccggcagtaggaccctggggaccccctggcaaggagtcctccgtgaagcgtacttttccagaagatgaaagcagctctcggaccctggctcctgtctctaccatgctggccctgtttatgcttatggctctggttctattgcaaaggaagctctggagaaggaggacctctcaggaggcagaaagggtcaccttaattcagatgacacattttctggaagtgaacccccaagcagaccagctgccccatgtggaaagaaagatgctccaggatgactctcttcctgctggggccagcctgactgccccagagagaaatccaggaccctga

SEQ ID NO: 24833 - DNA, 4527 bp, Homo Sapiens
atggggcaggagccgcggacgctgccgccctcccccaactggtactgcgcccgctgcagcgatgccgtgcccgggggcctctttggcttcgccgcgcggacctccgtcttccttgtccgcgtgggcccgggcgcaggcgagagtccagggacacccccgtttcgagtcataggagagttggtgggacacaccgaaagggtctctggcttcacattttctcatcaccctggtcagtacaacctctgtgccaccagctccgacgatgggactgtgaaaatatgggatgtagagacaaaaacagttgtgacagaacatgcactccatcagcatacgatatcaacactacattggtctcctcgagtaaaggacttaatagtatctggggatgaaaaaggagtagttttctgttactggtttaacagaaatgacagccagcacctctttatagaacccaggacaattttctgtcttacttgttcacctcatcatgaagatttagtagccattggctacaaggatggcatagtggtgataattgacatcagtaagaaaggagaggttattcataggcttcgaggccatgatgatgaaatccactccatagcctggtgtcccctgcctggtgaagattgtttatctataaaccaagaggaaacttcagaagaagctgaaattaccaacgggaatgctgtagcacaagctccagtaacaaaaggttgctacttagccactggaagcaaagatcaaaccattcgaatctggagctgttctagaggccgaggggtgatgattttgaaattgccctttctgaagagaagaggagggggtatagacccaactgttaaagagcgcctttggttgacactccattggcccagcaatcaaccaacacagctggtatctagctgttttggaggtgaactgttgcaatgggatctcactcaatcttggagacggaaatacaccctcttcagtgcctcatcagaagggcaaaatcattcaagaattgtgtttaatttatgtcctttacaaacagaggatgacaaacagctgttactttctacatcaatggatagagatgtaaaatgttgggacatagccaccttggagtgcagctggacccttccttcccttggtgggtttgcatacagcctggctttctcttctgtggacataggctctttggccataggtgttggggatggcatgatccgtgtatggaatacactctccataaagaacaactatgatgtgaaaaatttttggcaaggcgtgaagtccaaggttacagcgctgtgctggcacccaaccaaggaaggttgcttagcttttggaactgatgatggaaaagtgggattgtatgacacctactccaacaagcctccacagatttctagcacatatcataagaagactgtatatacgttagcctgggggccaccagtaccccccatgtcacttggaggagaaggagacagaccttcccttgctttatacagctgtggaggagaagggattgtcttacagcataatccctggaagcttagtggagaagcctttgacatcaacaaactcatcagggacaccaattcaatcaaatacaaattgcctgtacacacagagataagttggaaagcagatggcaaaatcatggctcttggcaatgaagatggatcaatagaaatatttcagattcccaacctgaaactgatctgtactatccaacagcatcacaagcttgtgaataccattagctggcatcatgagcatggcagccagccagaattgagctatctgatggcctctggctccaacaatgcagtcatttacgtgcacaacctgaagactgtcatagagagcagccctgagtctccagtgaccattacagagccctaccggaccctctcagggcatacggccaagattaccagtgtggcgtggagcccacatcatgatggaaggctggtatctgcttcctatgatggtacagcccaggtgtgggatgctctccgggaagagcccctgtgcaatttccgaggacatcaaggtcgactgctttgtgtggcatggtctcctttggatccagactgcatctattcaggggcagatgacttttgtgtgcacaagtggctcacttccatgcaagatcattcccggcctcctcaaggcaaaaaaagtattgaattggagaaaaaacggctctctcaacctaaggcaaagcccaaaaagaagaaaaagcccaccttgagaactcctgtaaagctggaatcgattgatggaaatgaagaagaaagcatgaaggagaactcaggacctgttgagaatggtgtgtcagaccaagaaggggaggagcaagcacgggagccggaattaccctgtggccttgctccagcggtttctagagaaccagttatctgcactccagtttcctcaggctttgaaaagtcaaaagtcaccattaataacaaagtcattttactgaaaaaggagccaccaaaagagaagccagaaaccttaatcaagaagagaaaagctcgttccttgcttcccctgagtacaagcctggaccacagatccaaagaggagcttcatcaggactgtttggtactagcaactgcaaagcactccagagagctgaatgaagatgtgtctgctgatgttgaggaaagatttcatctggggcttttcacagacagggctaccctgtatagaatgattgatattgaaggaaaaggtcacttagaaaatggccaccctgagttatttcaccagcttatgctttggaaaggggatctcaaaggtgttctccagactgcagcagaaagaggggagctgacagacaaccttgtggctatggcaccagcagctggctaccatgtgtggctatgggctgtggaagcttttgccaaacagctgtgttttcaggatcagtatgtcaaggctgcttctcacctactttccatccacaaagtgtatgaagcggtggagctgctcaagtcaaaccatttttacagggaagctattgcgattgccaaggcccggctgcgcccggaggacccagtcctgaaggacttgtacctcagctggggaaccgtcctagaaagagatggccactatgctgtagctgccaaatgctatttaggggccacttgtgcttatgatgcagccaaagttttggccaaaaagggggatgcggcatcacttagaacggctgcagagttggctgccatcgtaggagaggatgagttgtctgcttccctggctctcagatgtgcccaagagctgcttctggccaacaactgggtgggagcccaggaagccctgcagctgcatgaaagtctacagggtcagagattggtgttttgccttctggagctactgtccaggcatctggaggaaaagcagctttcagagggcaaaagctcctcctcttaccacacttggaacacgggcaccgaagggcctttcgtggagagggtgactgcagtgtggaagagcatcttcagccttgacacccctgagcagtatcaggaagcctttcagaagctgcagaacatcaagtacccatctgctacaaataacacacctgccaaacagctcctgcttcacatttgccatgacttgaccctggcagtgctgagccaacagatggcctcctgggacgaggctgtgcaggcgctccttcgggcggtggtccggagctatgactcagggagcttcaccatcatgcaggaagtgtactcagcctttctccctgatggctgtgaccacctaagagacaagttgggggaccatcaatcccctgccacaccagctttcaaaagtttggaggccttttttctttatgggcgtctgtatgaattctggtggtctctctccagaccttgcccaaattccagtgtctgggtaagggctggtcacagaacactctctgttgagccaagccagcagttagacactgccagcactgaagaaacggaccctgaaacttctcagccagagccaaacaggccttcagaactagacttgagactcacagaagaaggtgagcgaatgctgagtacttttaaggagctcttttcagaaaagcatgccagtctccaaaactcacagagaactgttgctgaagtccaagagaccttggcagaaatgatccgacaacaccaaaagagtcaactctgtaaatccacagcaaatggtcctgataagaatgaaccggaagtagaagcagagcagcccctctgcagttctcagagccagtgtaaagaagaaaaaaatgagccactttctctgcctgagttaaccaaaaggcttaccgaggcaaatcagagaatggcaaaatttcctgagagcattaaggcctggcccttcccagatgtgctggagtgctgcctcgtcctgcttctcatcaggtcccactttcctggctgtctggcccaggaaatgcagcagcaggcccaagagctccttcagaaatacggcaacacgaaaacttacagaagacactgccagaccttctgtatgtga

SEQ ID NO: 24834 - DNA, 627 bp, Homo Sapiens
caatggcggcctcgacggcctcgcaccggcccatcaaggggatcttgaagaacaagacctctacgacttcctctatggtggcgtcggccgaacagccccgcgggaatgtcgacgaggagctgagcaaaaaatcccagaagtgggatgaaatgaacatcttggcgacgtatcatccagcagacaaagactatggtttaatgaaaatagatgaaccaagcactccttaccatagtatgatgggggatgatgaagatgcctgtagtgacaccgaggccactgaagccatggcgccagacatcttagccaggaaattagctgcagctgaaggcttggagccaaagtatcggattcaggaacaagaaagcagtggagaggaggatagtgacctctcacctgaagaacgagaaaaaaagcgacaatttgaaatgaaaaggaagcttcactacaatgaaggactcaatatcaaactagccagacaattaatttcaaaagacctacatgatgatgatgaagatgaagaaatgttagagactgcagatggagaaagcatgaatacggaagaatcaaatcaaggatctactccaagtgaccaacagcaaaacaaattacgaagttcatagacgagat

SEQ ID NO: 24835 - DNA, 70000 bp, Homo Sapiens
cttctcagagaaactgggaagagacaaaaactcaaacgataaaacagggatcaaagtggcttcaagtccatataatcctaattcctgaaatgaaagaatatagttctggattggctagggctgtttttaaaataagggaacattaacaatttattctgcgtcagttcctctgaggttttgcaaaacccatccctgcctgctccaggccccttgactcagtagaaaggacactgtgggataaggagtctcaggccacttaccctgatatacggatcctggccacagtcatcttccttcgcatccttcagtaaaagaaccttcattattgcctggcagtccttatagggcactgcgacagagcaaggaaacagatcttaattagatctcaaagactcttcctaagcaatttccgatggggacggtacacaagaagaaggcaatcaaatgcttgtggaagagacctatccctcctacaccatgacttagcactaatgggcttgttctttctgaagacccctgtcactgataaggccaagaaagagcatgttagcagttgatatcacttggaaagacagatgaaaccattagtgaaagccaagtgtcctatgccaaacgtttatggttccggaaagagaactgatgtaaatttagggttgtatcaacaacaaacagagaaattggtatcttatgttttaaggagataaatagcttttccatttcaagataaatatgctaagtagctcataagcactttgggaaataattatattgactcttctacttattaaatgatgttttctaaacgtcaagtatcataagagagtctaacaacatggaaaacgatttgttgacatcaaaagctttatatacttcatcttctttcttcctgtaatttcacttctaagaatactaaagcaatactgataaatgtgtccaaagattaacataaagatgctcacactagaattcttttgggtctcgttgggtcatattagggaatgtggctcttatcttaatagcaacgggaagcttcttgtttatagatgtattttttttttttttttttttttttttagaggcagggtttcaccatgttgcccaggctagtctcgaactcctgagctcaggtgatctacctgcctcggcctcccaaaatgctgggattacaggagtgagccactgcacccagccttatagatgtatttctcctctcttttcctcatttctgcttgcccttttaccttctcccttctctaaggtgataatataaggaaggaagtatggtgtcacagaataagcacaggactaagggccaacggacctgagctctggtctcagctttatgacttaaccatggtgtgatcttgttttttcccatgttaaatgggaataacctctgccctaccaagccttagggttgctgagtgactcaaagaagataaaaacagcgaacagatctattgaacttactgcctcccaggcactattctaagagcttcacatgcattaagtccacctacgaggcttaggaagaagctgaggtgtacagaggatgacactcatccaaagtctcagaattgctacgtggcagagctgggattcacacccaaccagtctggctccaaagtctgtgcttttaaccccctacgctatattatgcctcacatacactttgaatacgaaaatgtttgggaaaaatagaggtataaaaatataaagtatcactgtagtacaaagtgcttagtttagttatgcaaacaccccaaagaaaaatcaatctacccattgtaaacagagaaaatatttctcctgggttctaatctgtggttctcttaggtaataaaaccgatgctggcatgaagtttaggcttctggataataaagagctccctgagatgtgttgcaaataaaaatccaactactacccttatcctttatctgacgtcactgaaagcatttgtcttcttttttaatcctgtatacaatcattcccaaacactgaaagcatttctaatataaaattaggccaggacagtggttcatgcctggtaatctcagcactttggcaggctgaggcaggaggattgcttgagagcaggagtccaagatcagcctggacaacatagcgagaccccatttctacaaaaattttaaaagttgttaacaaggagccgggcatagtggcgcatccctgtagtcctaactacgcaggaggctgaggtgggagaatcacttgagcccaggagttcaaggttgctgtgggctataatcgtgccactgcactccagcctgggtgacagagaaggatcttgtctaaataataataataataataataatataaaattaaaaggttctgttgttgatgattctttgctgtgctagagtcacatattatcaggctgattgggaaagaaatcaattgagaagcgtgcacagataggttaacatgtcgccaccttgggctttaggaagaggcttggtggagtagagggtgtttgcacaggagggccagtgtctgggttctggtctaggctgctcttgcctcagtctcagtttcagattcctgtacattggaaaggggctgtgagcctctccattgttggcttttttgatggactttctttcctgtagtagatgctcattatttgctcaccttgtgggaaaacaacaatttcaattttacccagcatctttgaaacagaaagaatgattaattttccttaaagtaaaatggagcacttgtccttcaagttgcctgcttaggtctctcccaagcatactctactttctttcctgttctaaagttttttgttgttgttttttgagatgcagtcctgctctgtcgcccaggctggagtgcagtggtgcaatctcaactcactgcaacctccgcctcccgggttcaagcgattctcctgcctcagcctcctgagtagctgggactacaggcatgcgccaccatgcccagctaatttttgtattttagtagagatggggtttcagcatgttggccaggatggtctccatctcttaacctcgtgatccggctgccttggcttcccaaagtgttgagattacaggtgtgagccactgcacccggcctaaagttttttaaaataaacttccactcctgctctgaagcttgcctcggtcactttttctgccttatgcccccagttgaattttcttctgaggagacaagattgaggttgctgcaggtgtctactgatttgccactggtaacatatttggtgccacgtgactcagatggtaagggatctctatgcctcgctttcttctgctggaggcatctgatccctgtgcagtttttcttctcctccctctctcctgcttactaaacaacccccagaacaattcctcttggccatacgtgactctgctctctgccagttgatttcttagctcactctggtgggtggctcatgggagtgggaaggaccctagggtctgcatcaagcagatcagaggcactatatggccctccttgataggaggcttgagactggtgaggctagggcctaaaaaccgtgcagtgtctggggtttcctctgcctttttttccaatgaaaataacgaaacctgttatttcccattgagggggaaaaaggcgggagaagccccagcagaaatgaagctgctcctgaagcttccaacatgaaactcacctcggcactggtaaaaagagggctcaacctgtctctagatttacagtctaatgcttgctctgccattttaccctcatacttatgttcatcaatcattgatgaaaaagaaaagaaaaaaaaaatgactggaataagggcaccttactggtaagaaagaaccaaacctcaaacccgtaccttctatgtcatggtgttctgggtatcagcaataacaacagtcacccttttactgagcatttactcatgttaattactgggtgtattagagttcttcagagaaacagaaccaatggcatatatttacatctagaaagggatttgttataaggtattagctcatgcagttatggaggctgagaagtcccatgatctgctgtctgcaagctggagacttgttagcaggaaggctggtgttgtagcctgaaggcctgagagccaagggtgtaggttccagcctgagtgtgaaggcctcagcaccaggagcaccaagggcagaagatatcccagatcaagcatgcaggaggagacaggacacattcttccttctttggctttttgttctatttaggccctcaacagactggatgctgcccacctactttggggagggcaatccactttactcagtctatccattcaaatgctcatcttttctgaaaacaacttcacagacacaccaagaaataatgtttaaccagatatctgggcatccgtgatccagtcaagatgacatgtaaaagtaactatcacactgggctaagcattttacatgcaagactgcaatcctcacttaaacctgcaaggtaggtggtgttagccttatttgcaggaggtgaaaccaagtccctgggaggtttgagtaacttgtcccaggtcacacagcacagtaagtgggagagatggaatttggatcctggtctgaagcccatgctcagtctcctaaccacttgctaccatccctctgcctcattaagataaattctgagctaaagatgaacactgaacgagtggtaagcaatctactacctgctgagttcagttccctagggtcagtactgtatttactttcacattcactattctaattcacactttgaccatgagctcaacactgggaactaatctgagggcataaagtaaggctttttcccctacttgtcttacaaaagtgatcctgtttactgtgaaagatttgcaaactacaaaaaagtatagttcctcaaaaaaataaacatagaattaccatatgatctagcaattcccctgctacatatataccccaaagaattgaaagcagggactcgaacagatatttgatactcatgttcatagcaacattatttacaacagctaaaatgtagaagtaaccaaaatgtttaccgacagataagtagataaacaaaatgtggtctatacatgcaatggagtattattcagccttaacaaggaaggaaatcctaatgcatgctacagcatgggataaactttgaagacatcatgctgaatgaaatagtcacaaaaggaagaatattgtgttactccacttacatgaggtttctagaatagtcaaattaataaagatggaaagtagaaaggtcatggagggaaaataagggagttgtttaactacagtttcaattttgctagatgaaaagagttctgccaatggatagtggtggtgatggttgcacaatgtgaatgcacttcatgccactgaactgtatctttaaaaatagttaagatggtaaaatgtatgttatgtatcttttaccaccataaaaaaagtataaagaaacaggaaaaaaaattggctatggtatctcagtgcaactctgttgatatgttcacatggtctttctgagtcttttttctaatcttagccttttgatgggtcttttttgacagcttcctctcttctccattacaggaacatgtttttgcagttgtgcgacccaaagaggccatttcaagctgccccatcagatgtggagcgctgatgtgtaagtattactttaatatccatgacatggctgggtagacaagagactcccaggaaagaccgaaatcacagaacacgattatgggcaatctgggctcctggggacctttagggcacgccatctcgtactgatgaaggatcactgatttatcagatgttaccctgcttaaacagaagcagcctattagcgcagctcacaccattcctagaatcaaacatatccaacccacccccctcattttacagagaaaaatcaattgagaaccgcagatcttattcctagaaagctgatgaaccctgtttctctcgcaatgggaagacctggctgccccaggctgcatccccacctgccacaggggctggcgctcgctctgcagttggccgcagtcccctccactcttctctccaaataggctcgggtctttaacctagactaccccactggccccgaagcatttttttttttttttagatagggtctacctctgtcgcccaggctggagtgtggagtgcggtggcgcgatctcggctcactgcaacctccgtctcctgggggcatgcgattctcctgccttagcctcctgagtagctgggactacaggcgcgcaccaccacacctggctagtttttgtatttttagtagagatgggatttcgccatgttgggcaggctggtctcgaactcctgacctcaagtgatccacccatctcggcctcccaaagtgctgggattacaggtgtccgccaccacgcccggctaatttttgtacttttagcagagatgaggttttgccatgttggccaggctggtctcgaactcctgacctctggtgatccacccgctttgacctccctaagtgctgggattacaggcgcgagacaccgggcccggccccccgccgaagcatttttaactgcggtgccggctttaaaaaaacttttaggtcaagaaatgcgctccagaagctcggcgagggtaggctgggcaggcgccttccgtcaccggcgcagcggtagcggcagcggacatccccgcctgggcaggcccaggtccgcggaagcctcggggccctggccccactgtgtcacacaccgcccggggccgggcccctgcacgcccgcgggcttcggcgtccgtaccggtacagcgggcggcgacacctacctcgcgggaccgtgcccagcacccggcctggcacacagcgggcacccggtcggggggcggtgtcgcgcagtcccagcgaaaaggctgcaggagcaatgacaacaggggcggaagccccctccccacgcagcccgaggggccgcggcggccacccgcgccgggccccaggaccccgcacctcagactggggtcgcgtgggtggctgcgcgcagctaggcgctcgcgcatgcgcaccgccatccaggccacggaatgaggccagaggttagatgggttgaaccactacgggaaggggaggggaagctttgggaggagtgatggagggtggaaagcggaagaaaaaagcaagatgggaccgcaagctggacgtgactgtaaggggtcatggctgcggaatccagcaggggcattggggttgacgtgcactcagcgccgagcttcttcgtagttcctcacccccttggctactatgggctggtccggaaggtcaggcaaggggaagctgcgcaggcgcagtgtgagcggcaacatggcgtccaggtctaagcggcgtgccgtggaaagtggggttccgcagccgccggatcccccagtccagcgcgacgaggaagaggaaaaagaagtcgaaaatgaggatgaagacgatgatgacagtgacaaggaaaaggatgaagaggacgaggtcattgacgaggtgagaaggacacgctcccctagttggtttatacctgagaaaaactttttggcaagcccaggctgtgtaaaaatagtgtagggtcttccctgaccctgagggtctgtgaggagaaactggagataagttctttctcaggtttctcctcggtctttaacacactgcagccatagtagttattttttaaaggtctagtccggtccagttaatctcccaacccgcgtcctccccgaaaaagcccgccacaacaggtgtgttcttctcgtcctctttagttctcaggctgaagcctcagatcctgaatcggccaccccgggctcgcagagggggccctctcccctcggggcagcagctgtcctcctcttcactctgcgggcggcactcacttgggccctcagtttcttgaaggctcttgccgcgttctaccgtagaagccttttcaaatgctcttctttatcctgcagttttcccttccttcttcagatctcagctaggctgtattttctggctcctggggcagctgaccaagtcgtgggtaaatctttggtttcatagtctcatagaactgtgttcctttcttcagactaggtcctaccgtagtgcctggcaatataggtacttattatttgtttagtaaacaattaggactgaatgatccttcagcctactgaatgtttaaatagatacctcagccttaacttgtccaaagcagaatttgtataataattcatgcccctctcttaatcgtcaccatttctataaatggcccctaaagtcaccagctgctctaacccaaaacctggggcttaactttaattcctccctttcctcatcctatatccagcccatcagtaaatcctgttatccagacatttctcagcactaattctgagaccatcgtagtccacacctctatcatctcttgcctggactactatttaatgtaacagcttttaaccggcgttcttttctccatttttgttcccctacaatcagtctatactccacttacagtcagagagatcttataggtctgatctcaggcctctgcttagattgctgcattggctttctagttcatttacaagaaaatcaagagtcttcacaattgagggacggaaaggcagcctagatggctggatcagaataaggaagagagagtgataggaaataaaatcagagaggtaatcatgagtcatgatgagcatggaggggagcatggagagaagcatggatgcaggattagaggtgacaccatggtgtgggtatgtgatcaatcttccttcccttacaaattttactttggctctatgccttgaatgccatctcaccatttttcacttagaactttgactggctcttttattacttttgggttatagaaatcaatgctgcttgtgttaacatgggaaatctatcacaccaccacagtcttaattctaaatcacctgggaatgagggacagggctcttttctacaaacgtgactgttcctgctgaagccatgtggagatgagcccatacccaggaaaagggtgctggacagataatccatttgccgcccatttccctggtggtgccataatagtctgggacagaggtccgagatgtctgtctagacaaagaaaaaaacactagatgagcattatttacagaatgtatttatatctaaggaataagtttaagtcctgaataatgacagtttgttatttggtttagtttgatcctgtttggaacactcccacccgaccccttgtgttttgctgctcacataatctggctaagttagcatttgaagtctgcaaagctggacttaaagagttcaaattggagctggaattgctctaagcaattccagggccttgcaattttacaattaaggaagacttaaatatatacatagtcagggtggcaaggtaaaaggaggtctgatttcctctgcgatgttcttcagctaagacctaaattctgaaaccgttaaaacctgaagtgcctttaaatatattatttcatcagagccccaggttcattgtgtcacttatcaaggtctgatttagggtcctcaaggactaatcttgttagtgtttaaaagcaactaggttttgtttttggcattttagttccatcttctagattctgttgtcttgcagatagagatcagggagcccagctacacattcattcttctagtcccttgtactcattgtatttccttctgccttagggccttagtttgtgctgttccctgtaccaggaactctctttgctgtttctcggtttcttgctcaaatgtcacttcaaggaaggctttcctgactgacttcttattttttaagttgttacaacattgtgtacctttgttttatagcacttacatttatttctatgaatatttccttaatgcctatattccttcctaaatcgtaagctgcacgagagcaggatcatttgtgtctgccttactaaccttttcatcttgagtgcctggcacagtgcttggtacctggattgatacttaataaatatttgctaagcaaatgtagtgtaacctcaaatccatgggctaagtcaagctctaggcaattccagggacttttgaagtgattttgatttttgcccacccttgtaatcaggaaaataatttatcctttgtggctgccgtgtctggtttatttgaactggactttctcaacatttaaactaggttactctgagtgttttgttttctcaggcttttgtgtcacctgaagaaatagtgtgaaggtgctttgtattcttcacagatggcaatcttggcaatgtttgcctgttttaaagtctagatgtttgtagtttttctggtaacaactattttgtgtgttatttacaggaagtgaatattgaatttgaagcttattccctatcagataatgattatgacggaattaagaaattactgcagcaggtattgtcttttatttattatgcataaatttcctcttctaagaaaaatcaggggccgggtgcagtggttcatgcctataatctcagcattttggaaggccgaggtgagaggattgcttgagcccaggagtttgagaccagcctgggcaacataatgagaacctgtctctacaaaaaaattaaaaattagccaactgtggtagcacacaccgttagtcctaactcctcaggaggctgaggctggaggattacttgagtctaagagctcaaggctgcagctatgaatgtgccattgagctccagtctgggcaacagagtgagcctctgtctctaaaaaaaaagaaaattcaggtcattcaatacaggctctcccaagttcatctttttagaatttccatttctatcctctccaccttgcctggaaggaagaattatttcctttcatctgctaattagagttattttgtttttttttttaattcacaattcttatgtaacagtcatataactgtgctgtttggtgctataaaattgatgcttgctgcttctccttattcttttactcatataatatgactttggttctttagcctttatagctctaccgtctttttcaccaaattctttggccttaagtttatcctctctcgtttctcccttttttctccccctcccccattacttctatattactactgacttcttcttttctgaaatttcctaatctttagcttctttgactctcctgggcttttctttccctcttggggttgcttttctagatcatcatcttaagtcacagaaatttcattgtttgtatttgaatataggatttgaagttattagaaatcatgctttgatcttaatttaaaataattttttcctccttttagctttttctaaaggctcctgtgaacactgcagaactaacagatctcttaattcaacagaaccatattgggagtgtgattaaggtaagtaggataattgtgtttattctgattaaatgagttctttattctgttcatgctgggcctcaccatgcttgtaatcccagcactttgggaagcaaaggtgggaggattgcttgaggccaggagttcaagaccatcctgggcaatatagcaatactctgtctctacaaaaaataacaaaaaattagccgggcatagtagcacatgcctgtagtctttttacccaggtggctgaggtaggaggatctcttgagccaagaagttgaaggccatggtgagctttgtgccgctgcactctagccgggcaacacagcaagaccctatatctgaaaaaaaaaaaaaaaaaaaaaaaaagttctttattctgtttagctcaaattggaagcagtattactggaggaatggagactgatcagaagtcattgcagaaatccaagcttattaaatgcagtagtccaggtgggggcaatggagagggagagaagtgggctcatttagaaaatatttgggagatgaaatatgatgaggtttagtccctgattgggtctgaaagtgagaggaaaaggagtcaaggatgacttccaggtttctagcttgagcaaacaggataacaaacatggaggaaggtcaaattaggagggggaatgtgaatttggatttgtacattttgagtttgagttacctgtgagataccgggtagcaggtggagccctggagacttgggagttggtcgtaaatgttactgaggtcgtagaagtgattgagattgcgcagggagggaagggacagacaccttagtaataccaagaatacttcgatgagtaatataagtggcagagccagcaaaggagattaaaagggatgacaggagaagtagaagaaacaatagtgcagtgatgtcatacacagcaagaaagataacatttgaaggaggaggggatggtcatctttatcagatagatgttgtagagagctcaacaaaataaggactggtttagaccctgggtctgctgcttatcatctggtggttctttgggttatctgttgtttgtataacaaaccaccccatagcttagtgtcgtaaaatagcagtagtcatttatttggctaatggatctacagtttggacagagctcagtgggcacaactcatctgtgctcctgctccatcatgttagctggggtggcttgactaggggctggaggattccctttcaagatggctcactcacatgactggcaagttagccctagctgtctgtcgggagcttagctgggactctggaccaggggccttagttcttctccatgtgggcctcgtcacacattggtttgcttccaagagcaagctgcccaaaagaagcaggcagaagtgatatagtgccatttccaccatttgcttagtctttacagatagaaatttctatctagggggagggcacattgatcccaccactccatgagaaaagtacctaggtcactttgtcagaagagcatgtccaaggagagatccattggggccatctgtgaaagatacagtctgccacagtaccttaatctgtttccatttctgtctctgaaaatgaggatggtactagcaccgatcttgtagagtgcatgggtaaacaaaatgaattgctgactgcttaaaacagtgtctggcagctgacatgtgctacatatgtgtagctgtcactgttgatgtctttttcctgttcctagcacctgttccctagcctgttgtgaaaaacacaacaaacaaaagctccattcagtctaatgttccactcttaagtacatcaccttcagagccaaaattcttgaaaagtaatcttaagtcatggtttctacttcctgtcctcctattcattcttcagacactcttatctgacttttacaccactaaaattcggacactgagtgatagggtcaccaacatacttgttactaaatacagtgtacacttttcaaggcttctgacaatattagtaactttatggcactcaatgtaaagaaaatgagaaattaaacctatggggcattccttttattagggcaatgggaaaaagcagaccacctgccctttcatcaaataaatgtgatctctagctgattcgtgtcttagaagacctaatggatatggaggagaagcagttatttttatccttgaaagaggttattatctaatggcaggattcactctttaaatggataatcacatcaatagctctgcagttgtaactgtggcttcttgggattctccagagacacttgaggtgtcctgaggatagagacttcttgttcttagtaaagggactacccatagtgttcggtggagccagtccctaggatcatagaacaaagggcagggggttctcttttttccccttctctcttgctaatgtgataggtgtaagtggccctcaagcattgcctagcttcactaatggtcaagactgacaagtgttctggaaactcatgagttttagatgaaacaatgctgtgggccagcagagaagcaaggcttggctccagcctaattgtgtagaaaacaaatgaaaatgctttatttcatgaggtttatctcttctggatttgtattatattgagaatctgataaaagaaaatgacttaatctggtacaaagaaatttcaatctgttcagaatctgaaaagaggaacagagtcgaggtaaagcgaaatgaacaaggtcacacagtatttaagatacaatgctttccaagatgatggtggtaaaactgtgacagtatttaaaatacaatgctttctaagatggcggtggtaaaacaaagttttgcttttgaaaagtgaaaagataaatgaggcctacatcccaagacttggttttatactcttggtattatactaaatataacatttaaatattttttcttttaaaatagcaaacggatgtttcagaagacagcaatgatgatatggatgaagatgaggtttttggtttcataagccttttaaatttaactgaaagaaaggttggtttcactggatggcatctgaatggttatttcttaggccaaaaccacttttatttaatgcatggtgaaaatgtcttttatgttaaacagtgatattaactatagggataagtgctcttgtgaaatcttattgtaatcctttttcaatatgaaggtggtggtgttgggtctgtacccagttaaagttgtttactccctgtggtttagggaatcatctggctttgcagtcctgatgttggtactgatgcaggagctgtttgtgctgtctctctgcagctgttatctttgctacttgtgtagtggggatattctcaggctttgctgcctcaatgttgagggcatttactgacattttattttgtttcgattcatctctttttattgattctctgatgagttgtaataaaaagtaaaccagctgcttacccacctcagaataagatgcaggctacacttagtctttaattttgaaataaactgtccagttacttccatctatctttatgagatggactagagttgccattccagtgtgtctgaatgttaattatgactctcttaccactcatcatgggatggtaaataaccagtgtatttacttttgagaaatgcttaagcagtcaacactgaagacatacaagacgttaaggctatggcaggaaactgcccttagctgtaagatgaaaagtgatagcttttactctcaggttttgtcctctatgtgatggcttgtaataggaaacaagctttctctttgctttctagggtacccagtgtgttgaacaaattcaagagttggttctacgcttctgtgagaagaactgtgaaaagagcatggttgaacagctggacaagtttttaaatgacaccaccaagcctgtgggccttctcctaagtgaaagattcattaatgtccctccacagatcgctctgcccatgtaccagcagcttcagtaagagattctgggaaaatatctttgaacagtaatttttttttcaaatagattcctaaatgtcatttaagtagaatatgtagatatagaaagagttctgtccttggtttaagtgggtttagtgtgaggggagtggaagaaacatcctgtgaagtacatacattattaacaactggctttttgaagagtttgtgacaataatcatgaaattttaacttaagatttaagtgatatataagtagataatttcatatagactttgcatccccatttgattgaagtttttcaccttcacagatagctttctgcaacatgaataaaataatgaacaattacaacaataacaaaactggtaaagttcccaaattctattggtatgtttcataacaaatgaaaccatagtcctgatactgtggctagcttttcagggtttttgttattctattttttaatccagaagttttaagtttacaaaaatatttcaaatgtagctgtgaaatctagcaaactgagtgtactaagaattgtattgtctgtgctttgcaacagaggacaaaatataggcagattctcttatttatttctatctaatttaaatttttttttttttttggtagagacagggtcttgctacattgcccaggctggtcttgaactcctaggctaaagtgatcttcctgcctcggcctcccagtgttgggattacaggtgtcagtcacagcacttgacctagacaggttctttatagaatattctttctcagaggtcatagcccttgcgttgtggttttcctttaaatagctgtaggaatgcaactctactctggaaacctttacgtttgctgttttttcctagggattcgatgcttcttatctcctgctccctgctctctcagctgtagctcagattgtgcttctggtgccttaagtggtttttgtttttttttggttttctttttttctgatcagctggagctcacatttatttggttttataggagggtgatttgctttctcctagtcctgttaaagctgaagtgagccaagcgcagtggtgcacgcctgtagtcgcagctactcaggaggctgaggcagggggaatgcttgaggccaggagttccaggctgcaatatactatgattgtgcctgtgaatagccactgcacgccagcctgggcaaaattacaagaccctatctttttttttttctttttttttttttgaaaaggccaggtgtggtggctgacacttgtaattccaacactttgggaggccgaagctggcagatcacttgaggctaggagtttgagaccagcctggccaacatggcgaaaccccaattctactaaaaatacacccacaaaaaattagccgggtatggtggtgcagacctgtaatcccagctactcaggaggcttaggcacgaaaatcgtgtgaacctggcaggcagaggttgcagtgagccgagattgtgccattgtactctacagcctgggcaacagagtgagattttgtctccaaacgaaaaaaagaaaaaaaaaaaaaaggaaagctgaagaggacggttgttctgagtttcttcttttgttcaagggcatccagatgcacaaggctatgtttaattttcagaaagaagaaacattaaggctttgttgcgattccattgctagaatttaggttgtgtgtttatgcagtttctgcagtatgtcagaaattagttccagactctagcaattagagactgtggtagtagtcacaggctgtagtgacattggttgtggctgtatacctttgtgtgtttcagttaaatgttcattgctttaaaaaattcaaaaattcagattcgtatatatttttaacttatgcacaggcagagcagtgatacattgagtgaatttgagactcatctgatctgttagttgctatatatccacaaatcagcataatctgagagatatatcatagtattataaaaagtaatacataatctaaaatgcaactgattatgtaaataaaaatcattcctgtagactaagtgttcagattgaatgcctgcgtcacagcagaacccactgaagatgcctcaccgggttttctgtgctctggtttgttgatggatttcacttgacccagcaggtaaacaaatgttgtgtgtgtgccttgcaggaaagaactggcgggggcacacagaaccaataagccatgtgggaagtgctacttttaccttctgattagtaagacatttgtggaagcaggaaaaaacaattccaaaaagaaacctagcaacaaaaagaaagctgcgttaatgtttgcaaatgcagaggaagaatttttctatgaggtaagactatcctgcttatttgtttagatgtaaataaggattttcttgaaaatgatttatcaagatttattgttctcccactttaggtccaagtctttcaagtgtggctactctgtttttctgtttccccacaggacctagcagctaacatagtgccaggtgcatagtaggtactcaggaggctaggcaccagcctccttgcctgcactgtggttatgagcatgaggaggaggaggagaaaagtgattaacctgttaagaatgattaggcatttataatatgcttcctgtgaaatctttcattctaaaaccatgcggagaggtagacattagcctggggtttacagatgtggactttaaggcatagggaaatgagggaaattacctgcgatcacacagctggtcagtgtggaagctggggcacccctgctgctctgtgtccttagtcgtggatgtcatcctgctggtgggatatctccagcatttttttcctataaaggtagcttgtactgtgatggacagccatataccagagaatattcttaccctctcttcctctgaaaaatcttgaagtgggccaggtgcggtggtgcacacctgtaatcccagcaccttgggaagctgaggcgggcagatcacctgaggccagaaattcaagaccagcctggccaacagggagaaaccccatctctactaaaaatacaaaaaaaaaaaaattagccgggcatggtggcagatgcctgtaatcccagctactcggaaggctaaggcaggaaaattgcttgaacctgggaggcagaggctgcagtgagccgagatcgcgccactgcactccagcctgagcaacaaggaagaaactccgtctcaaaaacaaacaaacaaacaaaaaacacaaaaacatcttgagccaggcacggtggctcacgcctgtaatcccagcactttgggaggtcaaggcgggtggatcacgaggtcaggagatcgagaccatcctggctaacatggtgaaaccccgtctctactaaaaaatacaaaaaattagccgggcgtggtggcacgtgcctgtagtcccagctactcgggaggctgaggcaggagaatggcataaacccgggaggcggagcttgcagtgagccgagattgcgccactgcactccagcctgggcgacagagcgagactctgtctcagaaaaaaaaaaatcttgaagtgtatctctgaggggaacatattttcctgaattggatgatatcacatcactttgaagacttctgcagaagactaaagcgctacaaatttagctgtgcccttcttttccaggaagtaaatagtaaacataatttttaaaaaacataggccgggtgcggtggctcatgcctgtaatcccagcactttgggaggccaaggcgggcggatcacgaggtcaggagatcagaccatcctggctaacacgatgaaacgctgtctttactaaaaatacaaaaaattagccaggcacaatggtgggcaccggtagtcccagctacttgggaggctgaggcaggagaatggtgtgaacccgggaggcagagcttgcggtgagccgagatcacgccactgcactccagcctgggtgacagagtgagactctgtctcaaaaaaaaaaaacaaacaaacaaaaaaaacaaaaccatatgcttcaacacctcaggttgaccatttggggggagtgtgtatgggtgttttaagatggcggggtatgcagatttactctgtcttcacacaaaagcctgatgctaaggaagcagctgagaaagtgagaaaagagtgtttgaagacaagttcttgttaaatatcaaattttacaagtcttaatttcattatgtttcacaagattattttgacaattaaatgaaaataccacttagctgcttgttcacctcttagaaattgcacacctctatccctgttcctcatgtgggtttaaaatctacttggtttgtgttttataacttctgcctgaatgtcccatttgaactttttcaattctgagttttgcttttttttagctctcattcttatttaagcatatgccaaacgtaatattctttgccgtagatcaaatgggttttgtctttgggttgtcccgatttttaattcatggttacttatttggtttagaaggcaattctcaagttcaactactcagtgcaggaggagagcgacacttgtctgggaggcaaatggtcttttgatgacgtaccaatgacgcccttgcgaactgtgatgttaattccaggcgacaagatgaacgaaatcatggataaactgaaagaatatctatctgtctaacccatttccaatggacagtgatgggcttgtttttgtaaaattaccagaaaactcagtggagatttactgaaaaactcagactttattcagattaagttcctctacaaaaagtagggttctgtcccatgtgtctctgacacatttacaaaataccagttttttaaaattttggtcaaattatgagtggttgatttaaaaacttttccaagaagaagaaaagcatggagtagtaatttaaagaactcaataaaaacttctattttttattttaaaataatatacacagtgttattttcttcaagaccgtcctgtggatgtgaaatccgtcttcgcgtcatgtatctcccatatccagcagttcagccatccagctacctttgggaccctgctgcaccttgtgtttgctggggagtcactggagagtgcatctctgttcagtttcagggcacgtctcacacatttgctgttccttattcattgttgacacaggggataggtgatccactacttgctgtagaatgtccttactttcactaggaggcagattactgaaatagtattgtggtaccagctgcataaatctgtttatttaagacaaaaagatgagattatgagtggggaaggtggtgagagacaccaaacattatgtctgggcacttcccatccctggagaatctacctgtagaaccggtatttaatttgaactcagatagtatctcagtccgactttgtaaaataaatactttctgttttttatgcagccaatcctgttgcatttctagaataagttggcctctctagtgttatgccacacagtggaagtgctgtctaccactaacctttagtggaaactagtatttcccctaaggcccatcaccatataagaggcaccaatcgtatgcttaagagagctttgggtaggggagagagggggtatctttgcttcttattttaactagtaccactccacatccagctgcgtaagccagacatctatgagtcactcttggttgctgccttgaacactacttgctggaatagtagtggaaccttcaaaatggatccagactctgtactggcctctcaaagactagtggagtagtctcactcttgccattgcccctcctttccattcatgtagcagccacagttatttttccttttttctttttagacagcgtcttggtctgtctcccaggctggtgtgcggtggtgtgacagtacctcactgcagccttgacctcctgggctcaagcgatcctctgtcgcagaatctcaagtagctgggactataggcgcatgccaccacacccggctaatttttttattttgtagagacggggtcttgctatgttgccagggctggtcttgaactcttgggctcaagccatcttcctcctgccttggcctcccaaggtgcctggccagctacagtgatccttaaaactatatcgagaagatgctactcttgcttaaaatgctccaattgctgtgtactgcacttagataaaatataaactatgtggcccataaagccttacaccttctggtgcctgcctctctcttcagccttccctccttcctcttccccgacagctccaactgcagtggctcttgaaagatggctaagctcattcctctcaaggtcaatgcacctgtatacagtgcatttctctagcattctgtccttcttaaagacacatggtctttgtttttatttctacactgtcttttctatgctgtaatctaacaggcagggacatttcttaggtatcatccacagaggcctgcccttagtaggtactgtcaacgtaaattaagattgcatcagtataaactttagaactaagaataaaagccaaatttgtcatttactcctacaggtatgaattaaaaaaaaaatacaaccctttcttctccattaaacttacagttcaggagagatttctgaggtaatcctgatgtagttgttctcagaaatgctgaatttatggaagaggacccactctggcatcttcttggtgattgagtaaccagacaggggatgcagctgagcaacctgcttatgtgtcagcattaagtagttacctgatccatcaacatcccgagcaatctgaaaggcagaattttaaagaaaaaagattttgtattaatatggagatcattatacaaagatgtttgttgaaaaaaataccaaagtattttatacgggatagttaaaactaacgtttgccactcatgtttcctactttcacatgtagaaaataagccataagcatgttttgcctaaaactttgagacagtgatgttaactaacttcagcaacagcagggcactgctaaaacagtgcagctgtgaggttaatgttttggccatgagatgaaacttagcacgctacccaccatactatgggcgacatacactccaatgccaagtgctttacacttggtgtgtagcacgcaatgaccctgtgatgtaggaaccttactttacagatgaggaaatccataatgatatgtcatttttctccattaagactacatattctgccttggccctttattcccttgaggggaaggatacttaagtaccaaatctttaataataacatggatttttagttttacttaatgtcaaaatcatcatcctaagccattgttggcagcatatcctgagtatgtgcaattcagcagagcctatgctgaggtgaccccaccccttctcacctgcataaagtaaccggacagaagagctttctttatgtttagagtgttttccttggagccaaaagcaggttctgcatagggaagctcgattcgcttgataatttctaagagttcagctcgaataacatctgccattctgagtgctgaacagttgaggaagtaatcacgacaccacttttccacacagtctaggagggaaagaacacaaggctatttagaaatgatttgtcagaagctctgaagagcccaggccaggcagttgccatctttaagccctgtgctctcctctcctacaaaggaggccacgtaggtgagtggcaggaaggcagcaaggacaaggatttctggtggctgcaaggtcagctgtcagggcactaccaggaagggagacggtgccaccgacagcacccatgccacctgctggggttctgtgatcccagccaactgtggaaactgttcctagtggtgactgaagatgtatttcactaacccgtggctcataaaggccagagaggattttgtaagatctatgttgtgtctctatgcatacagcatgtatgtatgtggtcccatttaatcaaactaggcaggaaaaagcccacagtataaattcctctgatctatgaaaatatctcatattttatttaatgataagaacaggattactaccaggttgatttgggaattaattatgttatagttaagctcatctatctaccctagctgtaacttttatcttaaaattcaggcatgtgggtgagtttgaagttagtctttctggccacctgtaattacttaagatggacctgggaatgtacatggccatggcaccatggacagaagaccctcatttaccctgtcctgtccactcatgctgctcggagcaaccacagcatgtacttagtgtcacccattcagcatgccctcaaaaggtgccaccagattcctgtgtacctgctggctccactgacaactttttcttctcagctttgaaacactaactccctgttctttatacaattctgtctttcaaattgctgtcatatttttcacactacttcacatattttcacaccatctttcagaacaaaggaggtaaaagatgcttcatggaaaatgtcagggagggaccttactggctgccctttatgggtggctctagcctctgctatgctgctttgccctgtttgccccctcctcttgtttctgtctgcatagcagcttccagttgacttctgagtaccttcctgtgacaggtaagctacccactgcccttcaggcatacaaaggactttgtggctttgctttgacatgcgccattctcttctctggacaccctctgctctcctctatcaagctccgtcagcaactctgcagcctcccctcagcaccccagcctacctattctgcactagtatctggagctctgcagcctctctgcatgcacgtggtgaatgtgccaggatacggaaggtgcacagcacaactctgacagtgggcacgtagaggtggctgttcttgtcttcctccaaagacccatgtacgagtctgtgtcccccgtcaccatgccccaagcaagcttgctctgaaggctggctgagtggagtcctggagctctggaagtacaggcccgccatggtggcacaccagagctccgtgggagcagggggactgagcatctcccactctgcagatgcctgtgggtgcgtttagggcctcaagtgccattgcattcaagtggccagtagggctggcgaagaatgtttgatgaataactaataaggactcagacttatctagggaaaggaaggtggaattaataggtagtttctgagcattcacttacactcactgctagaattcagagttgtgtcttggtaagccttgtaaatgctgatgagggtaaagtgatctccttcgggatgtaaaaatgtcttccaacaagtcaaggcagcctcttcagctccatgtggcacatgtgaaaagcaatttggagcttcaaaatgaaaaaggtcacatggttagcaataatgaagacattttatcttagcctaacatgcagaggggaggggtcacgactgttagtggcatggctcctgtcttggtactctgaataaatatgttattcttgtttacttagaaatcccagaaatttagagtgagtcatcctaattctccctctccttttgtgtgtgtgtgtttgcttttctaaggtcaactgaatatggttaatatcctgcttctattccggcaggagcagggaaaacctgaggtgcttggaggtccagacacaagaagaggattggaaccagttccgatacagcacaatggttggtctgttcccccagtattagaataaattaaaacatacaagccaggatgaatgaagccaataggaaataaaaaacaggcacacaacattatttggggaaaaacacctctagtgacacattttcttcatctgcactgattatttcagcaaaagaaatctagtatgttttcatacatctgatgtataaatttgctgaactttgagttagttttcttaagataatttttcatattaagaaaattttccttttctaacctattaaaatacctcactatcatttcaaaaggttaaatgagttgatcactatctctgctctgtgctcctcaaaatataatttcaaatggatccgatctaaatctatacctagtgcagatttgcaaaaaaagaaaaggaatagtcattaaggatacctgttaccatggctgcgattgttagcacttcatctacacagtcaaattcacaggacgctaagatagacttcgagagttgtggatcaagaggaaactctgacatgatgattccaaattcagaaagatttccatcattatccagtgctgccagataatctaagtcttccaatgcctgcatcaaactttctggtgctaggaaaggaaaaaaataataatttaagagtctcatatggctaagatggagaaacaggtactggacttttccctcctgcatgaaacaagcaaacaatggacaaaatatgtgaaacaacggtttgcaagccaccaaataccagggagtgaaggatagtgattcttgagagggcaaactcaggaggggagccctgtgattgtccagctcatgctccgaggagggtcccagctgcagtgtgcatgcggggggaacccaggtggagcctgccagcctccctgcagtaggaaaacaatgccagggatccagggagactaaggtggccggaactcgcggtcacagtactggagagagacacacagatctaagtcgggggccagagggagctccctcaactaggcagcacagccctactgatcagcgcatgtgtgtaaggaaccacctcaggccagagaaagagccatgtgagaagattagaaggaacagtggtgctgacacaggacctagggtagggcctgttcccaccaccctagctggaaaacctcatgatttatggggcactgggtagaaaacacaagtgagaaaccctagatgggcactgccacctgacacagctatacagcaggacctgaaaggatcacactgcatcctaggacaaagctcaaaagtacctctgggactacaaaaatattcagtgcccaagaaggtaaaatgtacaatgtctagcatccagtagagaggcatgaaaagcaggaaaatacattgcataatacagagaaaaattaatcacaactgacctggatctcagatgctagaaatagtagacaaagatgttatttcccagtgcaaataaagaaataaagatagcaagctgattctctccatctctttatttcttttaagtttatgtaacatcgataatgatgtggtattatatatgctcagtctttaccaaagtttttaaaaatccatttatttaaagaaatatattctctttgtggaataaggctatatatagattggtgcaaaagtaattgcggtttttgccattactttcaatggcacaaaccacaattatttcttgcaccaacctaatatttattaaataaatacatgtgttttgtccacccttctggttcctggtatagcaatacaggtcacacaatgaagcaaatcccataatagaaagctgctgtattgttataccccaaaactgcaggatttatgagccactaggttggttttgttttagttccagtaagtgcaaggtgggcaggggctgaagactctggggccctaagaagcgcttgaacctgtctgctcctgggagttcaaagtaacatatggtaaaaattttcttatgtgctgtctaaactttgatcattaagctctatgtctaaatttcaggcaaactgagtagctcaaaaacctcactttgggaggccgaggcgggaggatcaccaggtcaggagattgagaccatcctggctaacacggtgaaaccccgtctcaactaaaaaaatacaaaaaattagccgggcgtggtggcaggcgcctgtggtcccagctactcgggaggttgaggcaggagaatggcgtgaacccaggaagtggagcttgtagtgagccgagatggcaccactgcactccagcctgggcgacagagcgagactccgtctcaaaaaaaaaaaaacctactcacaaacttcgatttgataaaattcctccattcctgtcaggacaactggaaggcattagaagccactactgtaggctgggaaatgactcagggaagctgcgatgcagcctaccacacctccagtcctgctggaggacagcggagccagcaccagatataacttcagcctgacgcgcccaccacaggcaaaagatctgctactaggagtgagggggcagtgccaaaccacccaagggaaatctgcagggaacccagacatccgctggagtactgaagcaaggctttcatccttaccttggggcaaatatgttgaatttccctattctgaatgttttcccatcaagatttaaaactgagcagaagcttatggcttctcagagatattcctgtcctgcctgggtcctgacatacagcattaccgtcttacttgttcattcttggggacctttggactaaccatgaccttgagaaatcacaatcatgggaaataaacagatgggctattcagaaaaaaagttcaagagttctatcagtgaggcatgacatgaaaagtaacagccgatctgctggagaaggtacaagaagcagcatcagaaataagcatcttaaacagagcaggaaggggctggagtacaaacttaactactgaaagcttttcagaaaccagtttctataaatcagcaaagctgctgcattataagttacaggatctttggcaatggtccctttaagcatctggcttgacagccaggctctgtccccaaagggcacctactattcatttttacaccctggagttgagttggccgcacacagggttagtaacataaatgacttcatgattctgctcctggtcctacaacagaaaaggagaggatgttcttggggttttattatattagaaagaatgagttaatgaatgcagattacacaggtgaagaacattaataaataactaaataggatttgctaatattatattctgcattttatctccccagtgtggcccataaacttgcttagctaaaaagcagaagagtttatatgggggttctttagggcagtgctgcttaagtataatccatagtaagtaacgctaacaaatggaatggaagtgttttagtgtcaggcctctttgttctggcagtgcaaaatcagactgctttattctgaaggcaattttgagatgaaccaaacatcatctttattaagctcgcttgccagcggcagctgtactccctgtggaatagctcactgcaaggtcacactcctcctccactaccatcactcaaagtaatgtgaagggctatcattacagtatttcttcactgttctgtgtgcctgttttctgtggaaccccaaatgccaagctccaatatgtgcctgcattttccttccttggcatcagtagaaaacctagttacaaagaggtcattaaactgcaaccagcagaggaggagccgatgcagcgctaactccaagctgagcacaggccaagtggagtccaaggccacggcagttccagagctgacagccccacgcggcatgtttcccatgttcttatagtgttcttatagatgtcagatggtaggaagcctcggttggctcccaaaccctcacaggaagtctgtctactcaggtgctcaggaggcttcctccagccaggtctcttttgttataacaatctttggcctactttctgcctaatctggcaaaaatggctcagaaacactgaatttcctctcaaggtagctgacattatgcaaatgtatgccaacatatttatatgtactttcctacaggtaaaagttttagtctgcaattattcctgggaatatgcataggagagagaacatcatgccttctcttgtctaaagtggacatgtattttcacgaggatagggcagggggtctcctggtaaccagtccccaaagccagggccattccctctccttccaccacactccttaaccccctttcttcccaataagagcagagaagtaaggctggatttgagtcattagagttggaaaggatgttagagatagagtggcctccatggtaaactgaagaaaagcattttcaactccctgcccactggcgggagccaagatccttctgtccagccttgccctgggcagggctctcgggtaatggcagtatccccactgccctcccagtgccacccgcaccgtgaggcaggcggaggccagctcctccgagcttagctgtgcctgaagacctctcacacgccagctctgctcctgcccgtgacatggaaggaaacacacgcagacctttgacagccacaggcacctcctgatcctctcgactctccctgcatgtcacatcactcccaccgcccaggcctcagaaaggactaagtggggaaggaagctgaatttgtctcccacacgtgactgcctttgctcatgttctggggaagactatcggccttctagagggcacctgtctagtcagtattcctcaagcgtaagggcattgggaaagttctgccacttcacaaattaccaacggtctccactcccagtaactgttcttacagccaggaagctggccccaggtttttgtagtggtgactagctgaagactctccccaccctcataccattatagagaactatctttaaacaagagttggcactgtagttagatagtatggaactggcagccccagaacaacctagaaaaatcaggaaaaaaaatgcatgggttttaaaatgaccatacagtgggtgttttctatatgagtagttaaaggactttatgtttggtgttggttcatgatttcctcataagggtgaggctcaaattattatttgctctcagtctgttttgagtatcttgtgctattggcactggcaaggctctggggcaggcacacatctgggacagcctcactcttggcccttctagcatggatggtctcatttatatatggagatgcacacgtaaatcaagaatcctgctctactggaaatgcacttttacctccaaattgtccccttttataggaactgtaccttcacttccatacttataggacaggattttgtgccacgtgacaacaccacattatcactactaaccccagtcacaggggactggttcagggtgggcagcttctcaaatagaatcaatggctccctttcttgggcgttttcgactttagaccaagggagtttccaggagctgacatagtaaatcataaagcttagggcagagagcagctaagactctgcccagttcctaacgggtcattaactagtacccatcgcggcctgggggttggagacccctgcattaatgtatatacacatttatatcaatggacagagagaaatgcagttatcacttaggagggctgaaggagcaaatgaagtttctgtttctgatttattttagggttgggacttgggcattgtgtaaaagagtccacagggggagactctacacatttgcataatgccagctaactactcatatagaaaacacccattgtatggtcattttaaaacccatgcatttttcttcctgatttttctaggttgttctgggactgccagttccataccatggaagggagggagggaggggaacctagagatacagggatgagaaactaaaaaacttgttttggatttcttaagatacctcagttcccttatcataattcactttttccttatgctagtttgagctggattactagtgcttgcattcagaagaatttaatatatccactgcaacataatgcattctataacagagtgcttccagagtgccactggaacttccaaatggtagggacgtagcatagggaagaacaaaaagagctatactcacatagtacctactgtgtgccaggtacatgcattaatgcagaggtccccaaactttttggcaccagggaccgacttcatggaagacaatttttccacagaccagagggtggagaggatggttgtgagatgattcaagctcgttacatgtgcactttatttttattattattacattgtaatatataatgaaataattatacaactcatcatagtgtagaatcagtgggagccctgagcttgttttcctgtaactagacggtcccatctgggggtgatgggagacagtgacagatcatcaggcattagattctcataaggagcgggcagcctagatccctggcatgtgcagttcataatagggttcgagctcctacgagaatccagtgctgccactgatctgacaggaggtggagctcaggcagtaatgctcgcttgccccccactcacctcctgctgtccggcccagttcctaacaggccacgaactggtacccatcactgcctaggggttggggacccctgcattaatgtatatacacatttacataaatggacagagaaaaatgcagttatcacttaggagggctgaaggagcaaatgaagcttctgtttctgatttattttagggttgggacttgggcattgtgtaaaagagtccacagggggagaaactgaagaatgaagagatggtgtagaccctaagactctacaatgtctagggcctctggggaatagcattaagagttggctctgaagaggacagggaggaaaggcttctgcttcacttaatttcacagggacatgttcccaaaacctggcatttgcctaactcctactcctttacactgtacatggcaattttgcataaacatctcatttgtacctctaaataaccccaggatacaagagggcagacactctaccctaattttacagatgagaaaaagacaagtggcttgccaaagccacatggccacccagctgttttgtcatatgtaaagtgaggttttgaacttgggccttccaccggcagtgttgaacctggcacctggcatgctctgccagcacagctgatgctggactcccaagtccagtgctgttgctgttatctgccatggctcttcctggctccggcccatctcagaggcaatctggtgatgtctcctaataactgagggtcattatctgcttctcacacccattaaaactgctctttctaggaccctctgcagctcagggcccctgtggtgcagagctcaggtaggagtcactcagacgatgactgtgctatagcatttactatacaccagtcacttttctaaggggcatgcatatgttaactaatttatcttaataactctatgaaccaattgctttgattatcctcatattcagataaatgaagtgaagcaatgagagtcctaatttactgaataataccccactagcaaatgatggggccaggcttggagccctggcagcctggcccaagagcctgtgccttttggcatagtcccctcaatatggggaccatctaccccagtttacccagggcagtatctgtttccacctttcatcccagcttaatcattaatagcattcatgcccctgtcccatgaagttcacagggacatggtcagtttgtctgaattcatcgcaaaataaacaggttccattaagttaaattgctgttttgttttgttttgttagcagggaggggtcactcctgctgagccacagccatctttccgcctgcactgttgcacgcaaaaacatatcaacttaaatgataagccatatagttcccaggcccacaagagcctaaagggcttcaggagccaaaagtacttccattctgggccctttaaaacctctcctggattttgttttcactttctgtaacattatttactttattgtttccaagatcctcacacactggccctggaaagttgttttggcatgtttgcgtctctttttcacaccccctcatctgagtatagtagtaacttttgtgtagcctttaaacagataatagtgtaaccttcattaacttaaaaacctaggctgtggcctcctgacagtcatgctagaatatttgctcgactctctgggctgtttgggcagtgccagtcctgccggtaggtgtcaggcactgcggcagagctatggggagggccacatgtgagggccgttggcagcctgcttcctcccattctcctcttagtacatgtaaatgttatatatagtatagtaaatgttacgttaacatttaaagatcattttgtaaattccaaagccaaatcttgagtttccaagtgatttacaaacaagcgcatatacttctctagtattcttacaaactgggcttttagtgtggtaaatactattccagaaggtcttgatgaattggtttaggaatcctctggtgaaagatctgcaccatcacaacagatgacaccactgtagaatcttttgtttctcttttgaaccagggtcttgctctgtcaccctgtctgaagtacagtagcacgatcatagctcactgcaaccttgaaccctggactcaagtgatcctcctgactcagcttcccaaacagctagtactacaggcgtatgccaccacacctggctcattaaaaaaaaaaaaaaaaaaaatttgtagagatggggtcttgttatattgcccaggctggtcttgaattcctggccctcaagcagttctcccacctcagcctcccaaggtgccaggattacaggtgtgagccaccatgcccagccctgcagaatctttaattcctcttttcaccagagccatccctggcctctgcagcctttgactttcttttctttctttcttttttttttttttttttttgagacagagttttgctcttgttgcccaggctgcagtgcaatggcgcaatcttggttcaccgcaacctccacctcctgagttcaagtgattctcctgcctcagcctcccaagtagctgggattacaggcatgcactaccatgcccggctaattttgtttttagtagagacgagatttcaccacgttggtcaggctggtcttgaactcctgacctgaggtgatccacccacctcggcctcccaaaatgctgggattagaggcgtgagccactgtgcccagcaactttattttcttcctgcattttcccctgttttcatgaggcgttgccttatctaacgtgccatgcctgtttgtgtttgggttcacttttcttttcataatccaaagaatcatagatcataccaaagccagtcatctggctactaccaaaatgagttctgcctctgaatacaaagatgacctctggtgtagtctggtaccttttggctagtttttctccaaatttctatctaggtaccactgccttcccagggtagcggcagtctcaggccatctgtttccactgaagtggtcagctggtcctgaggcctcctaccccaatggacagtgactgtgtcattcaggatggaggtcaattgtcaggcagccaaggaagaaaaatacaactgattttttaaaaagaggtccagatcaggggaattcaattaacagcctgtagcctagttatgccaaattcattttcacatggttcatgcatcctgaaaagggtaactagtttgctggatttgcatatttcaattataagttgaattaaatgcagcagctgcgagcatctttttctttttttgcttccaaaacaatgagtcagaattaatccacagttatattttccccaagcacagcagaaaagttatgtgtgtattgtcaggagacaaaaataaattgttaccctaacccttttgtcccccagttatcagctttaagcctcatggaatgagcagcacagagggtgactattgagagaacacagtgagatagtttgcttttaaaaatccttgacatcaccaagccttccttttcttctccctgcatttctagtccaccaaacatctactaccctgagcaagaagatgcctaggaaatcaacaggtggtgattcctgggcttatgagatgaacagtgggactggaagagcaattttcaaaaatgaaacctatcttgttggggctcaggacacaccaccccaaaatatgactggaggagactagaatatgccaccccaaaatatacttctctggcatattttgagctggttattctgagaaactgcagacataggactagctctgaaaagctgtcactttgtaaaagaaatctacatctacaaaggaaatctacattaataagtgtggtggcttgcacctgtggtcccagctatttgggaagctgtggtgggaggatcacttgagcctgtgaggtggaggttgcagtgagctatgatcacgccactgtactccagtttgagcaacagagcaagaccctgtctcaaaaaaaaaaaaaaaaaaaaagaaaagaaaaaaggacaattcaagctgctgagaattcttctttctgctgattcacccttacgcttccatactccacattacccagctccttaagcccagttcccctgtgctgcagtgtccaacagcagacacatttctcgtgtcagaacagttatttcctagaggtttgtggggttttaaaaattaccttcagagaatgtttacctctagcaggaaaatgcttcagtccaaaccaacgccccctccatgcttgtgtgcattgctgcgcatcatgtgaactcaggacagagaatgggcaggagaaggtgaatctcagcctaatgcctggctgacatgggagcataaggctacctggtctgttcatgaagtcacagtggcctaggcccgcaatgtctatcctcttcataaaaagcaccatgcttgttaggttggcttcctgcatttctgctggcttcagtggcgtcatgtctttggaggcaaattcttcagtgtacaggcagaaaaattttcctaaaagacaccaagaaaaatggctttaatatttctgggttgcctgcatacaagaattgacaacatttagtatttgtgtccacagcactacctgaagaagatgagccaagaatctgcttgcgtatctctgcctggctctggctgatgggctgcatgacgagcgagtttgctcttattctcgggttgtacacctttaaatggaaagacagcatcattagcgtcagataagtcatgattcagtaggctcactgatcctgaagagaatatgctgcgcagtactttactccatgaaatgcactgccacagactcattttctttgcacgatatttattattgtttcacttgccttgagatggaaactgcaagtgctttgataaatggatttaaaggttgtctgctttcattgtggcttcaataactatgagacctttgtgtcatctgctgaaatactagcactgtcacttctcaaagcactgtactggtgaatgataacatatgctcatatgtcacacagagaaagggttctcacctgatagtgccatgtttctttatagttttgttcaaatcaaccaggatcttggtggtctcacctttacaacacatactgagagttccaatcataacagctaatacagaaactgcgtatggcactaacaatgattttccttacaggtggttcacgggggcaagtgacagccctggtttctctgaaggctggactaattcaatcaagatcaactctaagtgatttccagggaaccttcatgactgttggaattgctctgtcataataagtcagggatatttaggaggctcatagtctcctggagggataaaacatctcggcacctagtaatggtaaattagtcaatatttgttagtttcgtttgagatctcaaatgttaggattttctgaagtctcagtgtctttcagagtttgagataccttgttttcattttttctaatttttaatttaaaagtaataaagaatattttgtaatgattaggatgaaaattttatcgtcaattataagccaaaatttgctaaaattaaagtcagtatacttgaaacaagtttctagtaagttctctggggtaagatactaattactctgataaaggggctatcaaaaaaatccagtaaattgttcataagaagagatcagtttaagagtcaaacaatttgctttgctagtaccttagctaaagaaaaaatactattaaagatgactatcacctttatgctctagtagttgagtcttccctcaaaactttctcctttggcagctcaatcaatttaattcatttccaaacctccaacatgctaatggaatcaagacttttgttactggctgcaataattcttctttgcactcatgaccaaattcaacgaatccccaggtcacatagttcatcctcacttcctgatcagtaaaatggtaggaaactgagaaactagtgcttgacaacgatcagcagtctgtttagcctactcaataataattacctttcttctttccacacccacatcgataacaaatctgactgagttgctccagatcaaaaactctccagagctagtagttaacaccactcttctttgataaacttggcatcttttttctgtttcatcgagtggcttgaacaatgaacatttctcttttggatacaaaggaacaaccaccagttctccaagatctgggtttaggttagatccttgatagacagtttcacagactttctcaatatcctaaagaaaaaaaaacccatgaaaataaaatacaatgcaaacaacatcactattaaaaaaatgtctgaattacaaaaaattttaggcaatactacgtaacagatacagggaaagaaatccctgtgttgctgcctacatgtatctttaaataagtaaagatgcacctaaatgagaaaacgtctttggggaagttaaatataatttatattgttttcccatttaattttgttagatttcactaaaaatctaagtaaaaaagatgacttcccacaactgccatagtttttacagctcaattccattctctaggtctctagcttatgtctctttcctttccataccatttgtagaatgggattgaattaactcaagggttttgtaggaagacagatccatctagaaaaatagcaaggtatcacaggtcactgagaactaggtgagctgtgctcgtttcctggtctgctaagtggctcccaggaagctgggcagaggccgctccagggggtcccacatcagctggtacacaggtacggtcccttgcttgcacttcctttttccacatataattgaattacttggggcagattttttaccaagcaaacagcatggctgttgatcctaatgagtgaaaacttgccaattggaataatgagaacaaaacgttttctccattcttataattctgattacttcattttactccacatattaaggaaggattgtttagaaattaaaaggaaggccaggagtggtggctcacgcctgtaatcccagcactttgggaggctgaggcgggcggatcatgaagtcaagagattgggaccatcctggccaacatggtgaaaccctgtctactaaaaatacaaaaattagctgggcatgatggcatgcgtctgtagtcccagctactcacaaggctgaggcaggagaatcacttgaacccgggagacagaggttgcagcgagccgagatcgtgccactgcactccagcctggcaacagagtgagactccgtctcaaaaaaaaaaaaaaaagaaattaaaaggaaaagaatgagtacttgagctgagctgcatcccctgaacctggctgctgcttggccttaggaggacacgcattcattcctcccagatgagtccatcaagcaagcttctcactggtgcaacttaacagctaacctggatttggaaaggggtatttgattccagcagcccattcatgagcaatttcctatcaagataaactgttttttttttttttttttgagatggagtctcgctctgttgcccaggctggagtgcagtggcccgatctcagctcactgcaagctctgcctctcaggttcatgccattctcctgcctcagcctcccgagtagctgggactacaggtgcccaccaccatggccggctaattttttttgtatttttagtagagacggggcttcaccgtgttagccaggatggtctcgatctcctgacctcatgatctgcctgccttggcctcccaaagtgctgggattacaggcgtaagccaccgcacctggcccaagataaactttttattgcactgaaatatttacttttattctcctagaagatgtgggaaaaataattatggccactaattctttatttggttctagctgctaaaactttttagtcataggtgaattcttcggtctaatgctctctcactgagctattttggctgtcttgtaagttggttctaatgttgaattttgttccaaatggcaataaaaaagaatttttaaaatcttcagaagggaaaaagcagagcaaaacagaaatagataaatagtttaggctcctcaagcacagctgatacagggctttaaggccataatctgcagaatttggggcagaaaagctttaaaaaatgtgcatctggtacttcagacattttgtttattcatttccttgattcttattcaatgtatgtggtttatttacatacgcataactttcctataactacctgcacagttacggaaaacagcaacacccactgaaggacgatatctagcagacatctagctcaccaaaaatgaaagaagatccacaactgcataaaacatttcccaggaaaacctccaacctaaaaacacctttgtgatagtttattactgtacagtaatctggctacatattatcgtaaatctcaatgtatgttttctgcttatttcatattttgtcttccggttaaaagacagctaggtgataggaaacaacacgctaaacattcagggctctaagtctcaattaagtgccaagacacagggcagcctgtgaatcacagagattaattcacagcaggtgtggtgctaggcaagtggctggagaaaatgtgacacacctaaggcaaatgcactgccgtttcaccaaaatgtttgagaatatttctgtaatttaaaacatacttcttaatataaaaaatggcagggctgggtgcagtggctcatgcctataatcccagcactttgggaggccaagacaggagaactgcttgaggccaggagttcaagaccagcctgggcaacatagttagaccccgtctctaccaaaaaaaaaacaaaaaacaaaaactagctgggcatactggtgcacacctgtaatcccagctactttgaaggctgaagaggtagatggcttgagcccaggagttcgaggtcacactgagccaagatcacaccactgcactccagcctaggcaacatagtgaggtcctgtctctaagtaaataaatacaaattttaaatgacaattaatacatttgtattagactggttgagtttgttttcacatgatatttaagtgctacggtaggttttaaagctttatatagaaatcaagaaagcatcaaatagcatggggggaaatgatcaatagctgttagcactgatttcggtgcaagacaaatctttccaagacacaaatcccaatccataagagatgagaatcttaatgagggatcctgacaaaaatagtaaaaaagaaaagtccatcagtatactgaatggtgttctgcttgttaggcagtagatggggtaaggaaaaccagataacacctgtggaatccaaggctgaagcaggagaaagaaacctggtgcccaggtaaagtctgctgaagccagcccaatgtcagtggctggcttgctgccccacccacagggcaggtcggctgttgagcccctgaacaatgaggagctcacctttagagggtccagtgctccgcctgggtcacagaggctcagaattacaaaatcctctggtagctttcatggcactctcactttaagactgcaagactgatggtttcttaataggaatgcctttccagcctgccttcaggggaaattacatacctctccaagtcctgtggcatttacagtttctactaccagcctggataatgatgcatgttctaaagttgacagttcaaaagtcactctacaattaattatagtttatattaaacttataagaatcatgtactctaagaccatctgcacctcagttctgttatgagctttattttccaagatccaaaatccatttccaaatccatttaggaatttttgcttaccctgacttgaaggattacacccatcctatcagtcttaattgcatttttttcttgcagaaatgtatatcctggttttttttttttaatttttcattttttttttttttctagagacagggtcttgctctgtcacccaggctggagtgcagtggtgcaatcatagctcactgcagcctcaaactccttagttcaagcaatcctcccacctcagcttcctgagtaggtgggactacaggcctgagccaccatgcctggctaattttttaatttttttgttgagatagggtcctgctatgttgtcaaggctggtctcaacctcctggcctcacgtgatcctcccgcctcagcctcccaaagtgctgtcattacaggtgtgagccacagtgcccggcctacgtcctgtttttcacctggcaattctgactctcaaatatattagatttgccattcttcccttccttaggcttcatctgtttacactgagaacctccaactgttttcataaatcctatgtctccgtaatcattttattattttcctcaggactttcttgaatatcttgaatcatgcaggatgagatgataacagaataaatcactgtaataggcagatttgctattcaagagaatgtatatcatatacatacaaaaaatgataaatatgcagtcatattgaggttctagaaacagatacatttaagaaaactaaagttcccaaagccagaaggagctgtcatcctttatgctttgagtataaaatagaataaatacttctgaaagtgtttctgaaatatgtggatgttcaagaaaaggctctgacagacagctgagccacttatctgttcagctgtggctcagcctacatcaaataatttcctttttggtttctgtttaatgagtagaaccactacatatatgggtcatggtctaaaaactcatgcttctcctctctgtgggagaagacagggaaaaaaggccaggcaattagtctccatgaagagaggtctaattctggagatcctggaggcttttagattcagccaacagagtagtggggaaagaaatagggccagtgtagctgcaatttaaaaaaaaaatgcaaccccaaatggtaccttggctgtctaaaagcagtaacagaatggaaatgatgcttgattgcacatttccagtcattcttttaaagagatgttttaaagaaatctgagttaaaggtttttttttttgtttgtttgtttgttttttttttttttttttaatcttttaagaatggagccccagtccagggagatgaccttttcgggtgggctatattttctgcccatactccactgactatcacaggactgcttgtgggaaatgttgtgttacttaactctatggtgagtgcttaggtaatagtcctgatctccaacaaacacacctgctcacagggaggcagtggagaatgtcaggggagtcggcatgcacctactgtaccaagagacaattcacagcaagcataaatagagccagctgtgcctttggggcagccactctctggcctgagcctgctggagggaagttggctctggagatcatgtctagagactcctcacccatattttgttttcagaactgcatgtgattttagaaacacttcctgttctcctttcagcacaggttttatttaatgaggtgtgatgaaaccaaatatttaaacagttaattagcaaactgaaacctgtatgttagttattaaaagcttcccaaatgaaataccttattactgtaaggttagagtatcacttacttacttgttcacaggccagaaagactacaatgtcacctttctcacccgagtggtgaatttcaaagataaggcgtaaaatagactcaaaagaatccttttgagcctcactaaggtacacaacctccacagggtgtttatttttcacttctatgacaggcacgtttccataataagaattgagtttgctgatcaggtgaggtgaggagttaattatgagcttcagttctggtcttgctagtaaaacatctttaagaagtccaagtaacacatcagttgcaatgcttctttcatgaatatcatctaagatgatgaccccatagctacccaaaaaaggattggacatcatttctctttgcagcatatcatcagtacaatacctataaagaagaaacattaaagttagaatattcttatgctaactcatgcaaaaaacttcctaacaagaaaaatgcctttcctatattcatttctctaaatcagtaactctaaatttttactggggccaaaattcctttaagttgatacaatctacagaattatagcacaaaaaaacacagataaacaagatttatacccagtttgtatatgttcatggactgccccctacaaagaccattctgaaccctaagttaaagacctctgcctaaatgtttattacaaatattaataaaagcctgcatctaacttttgttctgagctttatacataaaaagtagtatcataaaacaccctggtcaatttttcctctcgaattcatcaatgaaagaattttgagtaaaattatacacttttcaaggaaaggatacaagaataaccatcctggctcaggctcatggtcctgctagcccactgttaggacagacactattattggtgattcactgtgagagatgatatcattaagatgtcatccaaataataagcaaacagaaggatctaaaaagtaaccacctatttaagggcagcatgaaaactggctagaattcctggagtggggagaggtcattagtgattttaatgggcttttcccatacttcttgggatgattttttaaaattaaaataaccacctattagtcactaagcttaatgaaaataactttctgacactatttacatatttacctgtattactgcttgaagaaaccaatcccatttttttttttttttttttttgagatagagtctcgctctgtcgcccaggctggagtgcagtggcgcaatctcggctcactgcaagctccgcctcccgggttcacgccattctgcctcagcctccagagtagctgggactacaggcgcccgccaccacgcctggctaattttttgtatttttagtagagacaagatttcaccgtgttagccaggatggtctcgatctcctgaccttgtgatccagccaccttggcctcccaaagtgctgggattacaggcgtgagccaccgcgcccggccccaatcccatatgttttttacccatttaaggtatttacttttatttattcttgtacatggcaattctgagattgctatccttcgacaggcctgcctgcaaggttagcccttggctagcatttgggaacttagatttggggagggtcctcaccattcccagaactgataaagagtagtttgccccgcctgtaatcccagcactttgggaggccgaggcaggcggatcacaaggtcaggatatcgagaccatcctggctaacgcggtgaaaccccgtctctactaaaaatacaaaaaattagccgggagtagtggcgggcgcctgtagtaccagctacccgggaggctgaggcaggagaatggcgtgaactggagaggcggagcttgcagtgagccgagattgcgccagggcactccagcctgggcgacagagcgagactcccccagaaaagagtagtttgctgtgcctgaaccatttgtacaggcaatatgttttacgctgcacatgtgctttccttctgggagtctggaattttgaaacatactaggcagagggtgcctctacggccagccctcaataaaaaccctgggcactgagcctgagtttccctggtagggcaccatttcacgagctgtgaatgaagtgcacggtttgtgacttcactgggcgagagctcgtgagcttgcgcctgggttcctgtaaacttcgtcccatccactatttccctttgctgatgttgctttgtatcttttcaatgcaataaaccttagttatatgtaaataatatgctgaatcccatgaacctttctagcaaatcactgaacccgggggtagtcttggggatcttgacacagtcctcaattaacctctttcaaggaaaaaaaaaaaaaggaagtaaacaaacatctattaagcacctagtgtgagccagtcactaagctggtgtatatgtttctcatttaatcttcagaataaatcttcaaagtagatattgctatcccattactatgactcatttataaatgagaaaactgaaggtcagaaaaattcagtaccctgcccaaggtcacaaagccaggtagagagtcaagatttaaacccagatagttgttctatctgttgtcactgtcaaattataacgattgcttccttggccttgtagttttggtgataaaagtccatgttcttcctctctggatctttatgagatcaaagtgtatgccctctgcctttcttttcatacaggttctcatcctgtgtctttcaaatgagcagtgataaattgatgattcctttcctcaaacttagaaaataaagcatcttgaatactatagtattatactttgtgcaagatgccaacagatgcattgaaatctagttttcaatttttttttttttgctgaggctaattagagatttaatttctaatgttatctctgtttccttttcagcaaaactcacctaagcactgatcttataggaagtaatgctgccccataagattgaggaggtttatgtgttatgtaaatacatctaggcttaattaaaaaaaagagaagatgctaacttattaaaaactccagcagactcatccagcaaggcctagccttacagatgattatataagggaattgtgaaggctcaatcctaaaacttactatacaaacccacatttttctgcagtcccacctacttgggaggctgaggtgggagatcactccagcccaggaggagtcccacattacagtgagctatgatcccacaactgcatcccagtctgtgcaatgtgagcaaggctccaactcaaaacaaagcaaaaaaaaaaactactttttttctatataacacaaagatatgtttctgaactttatggtaatgagatattgtgtgtatgatactttaaaaagtgctgttaactaataagtacgtaaaaaaaatagatacactaccaaggtttcaggaaatgcagtttatatctttaaattaaggctaaatttctaaaagctaagactataataaaataaagttttattaatatttatattttataaaattatataattgagtttaaccttaatgaaaatttgagaattttccagttctaaaaacagaaaagaccaccatttgacactatgagtcacttctatgagatatcttgatatgtagttcctaaagactattttaggtatataatattcaggtattcactgtttcaaaaaaggccagagaaaagcttaaagaagaacaaagttgttacatatagcatccaaaaaatagtagtaggcttaaagacagtttactaattgcctatgatgtgtttgatagatactaaggggctaccaaaaaaatgaaaaagacagtatcaaatatagactactgccttctataatcaatgatcaatttttttttttttttgagatggagtctcactctgttgcccagtctggagtgcagtggcatgatctcggctcactgcaagctctgcctcctgggttcacgccattctcctgcctcagcctcctgagcagctgggactataggcacctgccaccactcccagctaattttttttgtatttttagtagagacggggtttcaccatgttagccaggatggtcccgatctcctgaccttgggatctgcccgccttggcttcccaaagtgctgggattacaggcgtgagccaccgtgcccggccaatcaatgatcaatgttaaatcctctgatttaaatagctattcaatctgagcttattcaaaattatggctagcatacctcttcaggaaaatcaatcttgttctaatcataattataaaaatataattataaacatagctaccacatacatacaccatgcatcagttacataaatttaatagtcctcacaacaaccctcagagcaagtatattaatcgtccacatttttcagatgaggcaacttaaaggtcaaagaggttaggtgacttctataaggttacaagtgagtaagtggtggagacaccctttgacagccatgttgcctcctctccagagcatggaataccaggaagaaaacaggtgttgctttattttatcataggggtcttttcaatagctctggcctctttcctgtgactcaaacactgtttaccacaatgcatcagagtatcttctgactctgcgctggttctgggggcatgtcacagtggaaaagaaagtacaatgttcagaagcaagagtaactgtgaagtgaagatatgaaagcaatgaagaataaggcagcccagcaagggcagaaagaaacaacctgcaaaacctgtcaaagcaggaagctactctccacctgtctccatgggtgcctttgtacctcagcccaccacacctgaagcaactgtccctgttaagaaaggaatgccatacacagattgaaactaatacatactttaatatatagtatttcctttgggtgtcagaattgaatgcttgggtttttaccataaaacaatcctaagcctaacatgtgatagatgtttaaaaggtgaggcgtgtctaacagtattattagatttccccaccattatttgtctttgtggctttccatattaagaagtatcttaggctgggtgcggtagctcacgcctgtaataccagcactttcaaaggccgaggccagcaaactgcctcagctaaggagtttgagaccagcccaggcaacatggcgaaaccccgtctctactaaaaatacaaaaagttagccaagtgtgatggtgcatgcctgtagtcccagctacttaggaggctgaggcacgataatcgcttgaacccggaagatggaggttgaagtgagctgagatcgtgccacttcactccagcctgggagacagagtgggactctgtctcaaaaaaaaaaaaaaaaaaaaaaaaaaaaaaaaaaaaaagaaagaaaaagaaatatctgattccatatcatgacaaagctcttataatatctcattttaaaaatgactacattaaagaatccttttaaagggttttcaaagtctagatggtattaaagatataatattaacttcagaacctagtcagagccatcatttaattaaaaacataattcaaagggctactttaaaatgtcaaaccaaccaaccaaccacaaatctgcttagggatccttcaccctttcagggtcctatgtcttgtcctgtccagctctttaactagtttgtgagctcctaagaaccagagaggtttttatgtttcttttgtaccactcacgtacaatttacacaatcagcaatttataaatacatagtaatttaatgactcagggacataattgttataataacagaaggtaatatatcttcaagaagttcaagtcagagtgctgatggtctaaagactttcccctatgatttgacactagcctgaagactgtcttctacttttgaagataaacgtttgagggaaagtagcttagtacaaaccgaatgagccccatgggctttctttttttctgggacagggtctcactctgtcacccaggcaggagtgcagtggcgcgatcacagctcactgcagcctcgatttcctggactcaagtgatctttccgcttcagcctcctgagtagctgggactataggcatgcaccatcacgctcactaatttttgtattttttgtagagatgagatctcactgtgttgcctagtctggtctcaaactccagagctcaagcaatcctcctgcctcgccctcccaaagtgctgggattatgggcattagccactgtgcccagccccatgggttttctgaatggagataagaaccgcaccagagtgcagtgctagctgggacagggcaaaatcccttccactatccagtttaccgaacatcctcctggggatgagcacatgagacactagggatatgagcacgtgaaaaaccatccctgccctgttacagaaaagcagagcttccccaatgctgtgcgtggcacactgtatgccacacaaatgggttagagaggtgcagaaatactgaccccgagatacttagctacttggctcttggagtggtcgggcagtgcccggggcagctgaagcccgtgggatggtcaactctggctccaggcagctgtgaccatttccttgcggtactgtatggatactatcactttctatgatggctgtaatataaaggtgcttgagaagcactagcccagagcagtgatttttccagtttctttttccttttttttcttctttcaagctcttggaaatccttcttcaaaggaaatctcataatgaagctaagcacagaagagataccacaacttgcggtagccacagagaagtctccttggaacatagaagactctgcaaagcacagtttgagaaacactgtcgaagctgctatgatgcaggctgacaccaagttttccagaagccccacagagggttttctaatgtgtattactggaggggcagggaagccttcctggagtaggtggctgctacactgcatactgagtgactaggaggaactagccgggcccggacatgctgagcacagggaggggcaggtgtacaggcacagggtgtggaaagcacagggcacacagtgtgctccaggtgtccatgtggcttgcacacaggcaatgatgtggaccctgcatgaggcatagctccagaagcacacgcttgaaggttctgaggggccaagcaagttgttaactttttccaggggataatgggagtcatgggatacatttagacaaggaatcccagatgatgccagtgtgggaaagcaactgttgctggctggctgatgacagagaccagttgctactgcacagcatagatgcttaacaggtagaatgccagaataatgctccttcagaattgtagaacctaagccaagaatcatcagcagggagcggactgaaccccacaaaccaacctcaggattgtttcgttggtacagcagttctcgaaagggatcacgtagccaacctcatgaccaatgttaacatccatttcatccgccacccgcagggcgagctggaccacagtctgcttgtggacctgtgtgcatatcacgcccccgtgctggtagtggatggaaagacaatattcagcacaccactgaggaacctgtagcaggaaaaaatgagacaggatcagcttctgctgaaaacaaaacaagagacatctctgtcttacagcagggttcatcttataagtgattttctttcatcagtaaatcagcagtgggctgtattacatcttacttagtgaaactctgaacaatatggattatgcacagagttactgctaggaaataaagttaagaagaaacaggagttaacagggactgtgaaagtttgactgccagacaaaaaaaggcagataaaaatcaaggacaggccgggtgtggtggctcacgcctgtaatcccagcactttgggaggccgaggtgggcggatcacgaagtcaggagatcgagaccatcctggctaacatggtgaaaccccgtctctacttaaaatacaaaaaattagctaggcgtggtggcgggcgcctgtagtctcagctacttgggaggctgaggcaggagaatggcgtgaacccgggaggcggagcttgcagtgagcagagattgtgccactgcacgccagcctgggcgacagagcaagactccgtctcaaaaaaaaaaaaaaaaaaatcaaggacaaaaatgaaaaaaaaaatactttcaacctcaactgtgtttctgaaaagactaatgtatttagagattattttctttttgattagaaggcccatcaaaaatatggcttctgttatcagctattgtgttttaagcaatgtaaattatagatagcatttagataaaaactagtgactcaaaattaaagcatttatatttaaatccaaatgatgataacaaatatccagataagcctacttaacatttctctgataataaaagctaaaatatcctggtaatttacaatctaaatataattaaataaataaacccatctaaataaacccagtgagataatcaaccaacccatctggatttggagtcagttctaagcaaagctactctagagccattttattttaaaaatccttttttttctaaaatatattatggaccaactgatgtttatcacattcatttgtacaagaattattatagtagaatgtactgaattcatttgtatgctacaatcttaaggcattgtcagtaaattatgcattgttacatgcattttaaaaataaattattccaagagtgtttttaattgatctaaggaatttaaacgttgtaaaatttctaattatcttgaggtctgctatttatgagattcattatgaaattcttagatctgaattctcactgtaatttgaaaaataaacataactcaccagaaatacaagtaactccaaaatgaatgactgctgtagactgtaaattcctaaggactgaaaggcaaatgcacttcctgcactttcagataggtgtcagccttgtcaacaggttgcaagttatcagtaattatttactcaacgcttactttgttctatgaaagatgaaattttaagatactgcgctcaggaaacgtggaatcaaggcaagatccaggaataacaagccacctaagggattggcttgccattaatttgttccatgtaaaccacaaattttctaagctttagttaattcttacctgtaaaatgaatagactgaatgaatgagaattatccttcaagtttgaactctggtgtcgttttctccacaaggcttgctgtgatcccctaggtatctagatccacggtgtgcttcccaccgtggcagccatcaccttcctgaggttgctgtttgttcctagttccccactacctaacggcccctcaaatgagctctaaaagcagagacctatccgtgttggtcaccaaattatcctagtactcagtaattattcattgaatgaataatttcttatactgtctagaaataatttaaaattctgtgattctacatagtttaagattctacatcgtttaagaatttacataaaattttgcctcctttattccttagcaagtaattttttattcttgccaaattcttacttttaaatggattgccttcatgtcagggtccactatctagggtccctagccaagacctcaaacatcattcatgtgaaaagctatattaaaactacttgtttttaaaaaattttctttaggccaggcatggtggctcatgcctgtaatcctagcaatttgggaggccaaggcaggtggatcacctgaggtcaggagttcaaaaccagcctggtcaacatggggaaaccctgtctctactgaaaatacaaaaattagctgggtgtggtggcgtacgcctatagtcccagctactcaggaggctgaggcaggagaatcgcttaaacctggcaggcagaggttgcagtgagctgagctggcaccactgtactccagcctgggcgacagagtgagactctgtctcaaaaaaaaaaaaaaaatttctttagtagagacagggtctcgctctgttgcccaggctggtctcaattgcctgggctcaagtgatccttttgcctcagcttcccaaagtgttgggattacagatgtgagcccctgtgcccagccaaaacccttgtttgaatatgattctctgtctctccactatgtgggaagatccttaagctacacgtgtggtttgcatttgttcccaataccgaacagaggatctgacatatggtagggataagagttgagtggaaagatggataaggacatcataataattgaaaagaagagagagaaaggcttgggcttagtgctaagcatgggagagaggtaataaaaccacgggaaaattactgcaaaggaagaataagcagtgcccactaacagactaattatgcataggaagaagacaaatattctatgatttctaacttaaaatactaattatataattgacaagaacaggaaattggaaagtaaaataaaataaatgaatgaagctaaagagcagcataaagttcttttggggggaatcaggagttaggagggtaggaagatgaccttcaggatagtcaggaagatggtcaatgttatcagaagaacatccaggcataaccatcctgggatcaacggaaaagcaaggcaggaggctaagggagaggtcagagctagagataggcatggtagttgcagaatttcagtactgaaagaaatctctggaagacatgaaggccaacaccctcatttgatgcatgaggaaagaaacttagaggcgtgacttgtccaaggtcatactgccagtaaacagcatgaccagaaccaatccatatcttctagtttcttggcgagtataattgccactacatcacagttgcttctaagcatctttatagaaaggtggcaactgaagccatgaaattctcaggcaatcagcattttaaattactctttctaggctgggtgcggtggctcacatctgtaatctcagcactttgggaggccaaggcgggtggattatttgagaggtcaggagtttgaggctaacctggccaacgtgacgaaaccccatctctattaaaaatacaaaaattagccaggcgtggtggtgggtgcctgtaatcccagctactcgggaggctgaggcaggaaaatcacttgaacccgggaggcgcaggttgcagtgagctgagatcacaccactgcactccagcctgggcaacagagcgagactctgtctcaaaaaaataaaaaataaaaataaataaataaactactctttctagcctaatggcaacatcagggggacagtactatgatgacagtgggcactgctttacatagctagaatcgttgctgaaataatactatccagttttattaaaacatttggacacgttcagcctggttattcatataaggtccaggacagctgctttcgaactctaaaattcgacaagattccaatgatcatgagccatgttctcaagcttctgatttgggccttttttaaaaactgcatttaatttatttctctttgctcatgaaacacattctgcaagattagtttattacagtgtgttgataatagtataaacattatacattcctggaagtacaacaaatataccaatccaacagtcttcattttccttttctgccttcctctacattagagcaaactatttcacctatgaggcaaagacattaattcagaaatgggaaaaggccatctaaatatcagttacaataaccagtagaagactgaacatatccatatcgtgcttaatgtaggaatgtttgcttacgtgcccaagttaatagttgagcagaagtcacaacaaattatactgcacgtactcaactgtggctctgaccacataggatgcagctccccttccagtaacagctacttggagatagttaacagtaagcaatgcaaacacaaactgaaaaggttatctccagccagaaaagagggaaacatgaaaccatctgccttatttgttagagttctccagttttacatgccttctgaatcactctgggcaagctaagtaacatactgagggttgattccttagcaaacttgaattactggctaaaaaatgttatcatttggcaaatgtcgataatttgagtatttcacatttcaagggatactgagattgcagctttacaaagaactcttgccttctctgcatttatagtaaatattgtatctcttgttggtattgacctttcttcccctagttctgcttcttttctttttttttttttttttgagatggagtctcactcttgttgcccaggctggagtgcaatggcaggatcttggctcactgcaacctccgcctcccgggttcaagcaattctcctgcctcagcgtcccaagtagctgggattacaggcacgcaccagcacacctggctaattttgtatttttagtagagacgaggtttctccatgctggtcaggctggtctccaattcccaacctcaggtgatccgcccgcctcggcctcccaaagtgctgggattacaggtgtgagccacaacacctggcctaacttttctgggtactacttagcaactttttcattgtcccagttgcatctttgtcttctcaccaatgacttacaagcctgttagaggttttgtttctaccccatagttcctctttggaagatattcccccctagtattaaaaaacattattctggatggactagttgccaagttggcactatgggaattagaaaagcttaaatagttgtacctttctatgaatcatttggctttaacttttttcagagaaacattgaattctgggtcactttgtgactgagtacttagcaaaagttgcacaatatggtgaagaaacagaaaattgctcctctaacacataaaaaaagctattttcatgtgatttatcctgggagtttggtgatgtgcaacccttggatttacgcatttggtctggaaatgctccctaactagaaatcaatacttcacatctctttattctgaactcaccaaatacttttttcatgtttctcaatccattttctaaattcagttttctgtacttctgatgtgccatttgcataaagccagagcagtggggcctgccctatgctctgtcccaaagcccagctggaactgactctggggcatgcaaggtaagcaatcgaggcatgagaatgtgcatccctggcctcttaccgcctacctgaaaggaaatcaccaacactctggccaatctgctgctatgagagtaggtaagaggagtcctccgggtaatcaaaatctaatctaaatcaaggctttatcaacctaagttagcaactgcagttctacaacttgtacaaattcagacagtgaggcaaagatgctccattcccaactccgggcagcacacagaggttgggctgctgggtagtgggagagctggggcctggggtctttagggtgggctgcagggagatctcctataagaatctgcaaccagatccagatcagaatcaagggagcagcagcggcatcacgtatccgtgtatggtctcatcactgccactgtggcaagaggacctccacatgagctacactggtgtagaactttctgtcctttccatctactgccagtgattgtttcacctcatctaatggataataaagttagttaactataatttaatatagttaaatgagaataaatgaagtgagaaaaaaaggacctccatgagacacaatgctattactgttctgttagacacatactagtcccaaaggcctctaatccctcacttttgatcatcaggacgtccatcagggcctgagtcctcttctgctttcttctcttaatgtctctaggaccaccaatcctgaagctactgccaaggtcccaatcactccctttaatttcagtaccagaaaaacagaatctacaagtttaaaggaatctaaagaaccaccaattcacccaaaggtgaattcaacacattcagtgttgaattcatcagcacaagctcatggtttttaagtttgcaagtcttaatggtttcaacaacattcctgtaaaatgcctagcctgagtatgcccctaaggcagctatcccacccaaagtgagccaatatatcagaatccattactgaggagtgaggtcccttctgaatcaaatatcacacatccctggataacaattcacatacatcttggttttgagtgaatacaggtagaacctaccagcagaaaatggtgaacaagtttactcagtcaatagaagtacagatgttctaagtcatacatcttttagaatctaagttaattctttttcatatcttttcatatctttttcacctcactgacccatccattcatgggaaatttcaggacaaaaactagagaaggagaaataagcaaaatatacacttctagagatgtttttctctctcttttaggatcgttcataacctgtctgcaaaaaatgtaataagaaaagattctataaacatatgggaaattgtcctctgtttctgcaccaaagacaggtgaaatctttaggacctttgtaaagcttggctctgaagaaagacttttttcttgaaaggtttaaaactctgaagaacaagaaaacagtctcgcaaactcttaaaacaacaacaacaaaaaccaagttgtttccaaaagaaaccaaccaatgctcccactatctaaattagtttaggatagatccattttcttatttgagtaccattttgatttttctcactttgaagatacatgtcgtcccaattaacagaaaataagcctaattcattgaaataattgagaaattaaaaatgacaagagaaaccattgctaggtattaatataacatataacatataacaattcttgctcttgaagatgataaattctaaaactcaagaagtagattaaaaaaattttttaaactgcagtgtggattagcaattctgaaactacaatatgaattgttcttttgagtatctttacttgttcaatctgagaacaggtaaagatagtgtgaataacacgaagccctgtttctcatagagaagttatggatatgaaaactgggaaggctagaataaaccctgtagtgctaaactggaatcagaggcatcagtacaaactcatggtttttaagatatagaaagagagataaaaaatatgagaggtaagaaaatagaaatacataaaaatagagaaagacagagagaaacagagccacaaatagatggatagaatgagacgtgtgtatattgcactcacatacatttatttccttgttgtgtccactgagatggcctaaaagcaatgataggccgggtgaagtgggcctataatcccagcactttgggaggccaaggcaggtaggttgcttgagcccaggagtccgagaccaacctgggcaacatgacaaaaccccgtctctataaaaaatacaaaaattagttgagtgtagtggcacacacttgtagtcccagctactctaaaggctgaggtgggaggatcacttgagcccaggatgttgaggttgcagtgagccgtgatcatgccactgcactccagcctgggtgacagaatgaaacactgtctcaaaaaaaaaattgcaatgataaaccaatggtaataggtacttagtgtccagatcttggtttcaaaacacagttcaccactaaacggaacaaggactcctggagaaaaaaaaaatggtttctacaccggcatgcggaatgtactagatgaacctggaacatcttactgagccagaaagcaaagaagtgctcaataatggggaaatgtcaaaaggacagagaagccacattgggggcaatttgaacaacaaagtaagtaggcttagtaatacattataacccatagaataaaataagaatttatgagtccacattgacataaataaatgatgaaggagagaaagctcagacttacagaaagattctaaataatgtgtagaaggcatgtcagaattagaataatcatctttggttactactaatgtaataattcaaaggtaagaatcaccaaaaatgctaacactagtggatgaatgtgaaactgcctttgcagaaattgtaacagtgagaaaattatgatggtgaaggagatctgacctgacaactccatcttgcctttcacccccaaactcccttagccattcctgcagtgggccaagctaacttttgtagatagtttatagtttaaatgatgacagcaaaatgaaactgcctttgtaaaactaatgaaaggacaccaggttaggaggatgagaggggcctgaattctgccaagatgtaggtgtagttaaatgattaccagtcattattccagaggtcacaagatttgtaacctccctgtaaataacatcactattatagaacctaagattggccttctgagatgtcttttcaggtttttgtatttctgacaactggaggccctataactggatagaccagtaactcctctgttgtccctacccagaagtggactcagcacatgaggactgttttccacacctctgtgattgcatcctcagccaatcagcagtacccattccttagccccctgcccaccaaactatccttgaaaaactctagcctccaaattgacaaagaggctgattggagtaatagtacaactcctgtctgctgtttagccagctttatgtgtattaaattcattctctatttcaattcccttgtcttgataaattggctctatcttgacaacaaacaagatgaacccattgggtggttacaaatgtataatgagaaacatttacatactttcaaaatatgtatctattaaatgattggagggaaattgttaacttttcaataaagaaccaggcagataccaccttaccaagggatcagaattaacatcaccagcatgggcaaaactgacatcttgtgcctcctgatatgaggcactgagaaggatacacagcacttgtgtgatcttcttgccacaaatgcagagccggaacctaaccctaaggaaacatcagacatgttcaaactgagggaggttctgcagaatatataacctgtgctcttcaaaaatgtcaaagtcataaaggacagggagagactggggagttgtgtcagattaaaaaacgacaataaaatacaatgcaattttagattggattttggaccagaaaaacaatttttttcagtgattataaaggctatcaatgggaaactgattaaatgtgaatgtctagaaatcagataataattagatatcaacattacattccagattttgataattatgttacggctacacactgtttttcagtaaataaatactctgttaagtatttggaggcaaagggcatcatgtcctcaacctacccctaaatggttcagaataaaaatgtgtatgaatgtatggagggggcagggagggaaagataaagtttatatggtaaaatcttacatttggggaatctgggtgaacaacatatggaaaatctttgtactatttttgcaactttttgtaagtttgaaattattgtaaaataaaaacacattttttcaatgttatttgtccacagaaactaggaaaattatactcagtcagttctcatcgttagcttctcgtaatgaactgaaatcgtttgttataacaataacagcgtaacaaagaacaaatcataataaacctttgatactggcagctgtaaatcagataaaaaacatctgttgtccagccctcctcttttcaaattacctttaaagtaagttaactttagggcaggtacagtggctcatgtttgtaatcccagcactttgggaggtgaaggtgggaggatcgcttgagcccaggagttcgagaccagcctggccaaaattgtgaaaccctgactctactaaaaatacaaaaataagccaagcatgatggtgcatgcctgtaatcccagctactcaagaggctgaggcacaagaattgcttgaaccgggagacggaggtcatagtaagccaagactgccccactgcattccagcctgggtgacagaacgagcctctctgtctcaaaaaataatagtgataataaaataggtaaactctagagataataaacaacttgaaagcaacaatttatagtagaaaatattcttttaactccaattcagaaagctactgacattagatagacaaattatcaaatccttctgggccacagtttattcatctgaaaaatgaaggggttccatcagtttctaattctattctattagagcatagtctattctactagatctattcgtaacttctctatgagaaatgggacttcttattattcacactatatggtctattctaattcttacatcgcgagaatctagaaatgaatttcatgataaaaatactggttgcttgctttaaaacttaagagtaaaatatggatctcacttgaacaaaaacttgaagtccaaatacaacaacaaactgaataataagtatttattaactatctaatgttggggctcaggacatacctccccagaatatgactgaaggagaccagaatatgtgaccccaaaatatgcctcctttgcacattttgagaaagtgtagacataggagtagctctgaaaagttacctttttaaagataaatttgtgcctatacaagaaatctctgcttataagggcatctccctctctgcaacaggaggagatgactaagtaaagaagacatcgacttacatcttcataacaaacttcaccttcatttaaggtgcttttcctggccatctcatcttaacagggttgttccccacaaccttttttactttgtttcagagaatgatggtatttaagcccaaaatttaaatgctttctttgagatctactctagagacttgctcatttctctggggttttcccgtgtatacatgaggcatacatattaatacacttctgtttttcttctgttaatttgtcttttgttacagggagcctcagataagagttatgaaggacagagaaaattattactttttccttctctacactaccttgtttttcttggtgtttttttttgttttgttttgttttctttttttttttgagatggagtcttactctgtcacccaggctggagtgcagtgacacaatctcagctcactgcaacctccacctcctgggttcaagtgattctcctgcctcagcctcccaaggagctgggactacaggtgtgcatcaccatgcccagctaatttttgtattttttagtagagtcagggtttcaccatattggacaggctggtctcgaactcctgacttcatgatctgcccgtctcggcctcccaaagtgctgagattacaggcatgagccacagcgcccagccttttcttgttttttttttttttttttttttttttgagacggggtcttgctctgttgcccaggctgaagtacagtggcatgaacatggctcactgcagccttgacctcatgggctcaagtgatccttctgcctcagcctcttgggtagctgggaccacaggcacgcaccaccatgcccagctaattttttaattttttataaagttgggatcttgccatgttgcccagcctggtctcaaactgctggactcaagcaatcctcctgcctcagcctcccaaagtgatgggattataggtgtgaaccactgcacctggcccactatcccgttaaacaaacaaacaaactttaattgagaggccattaggctgaggcaatgacagagctctagaaggtcccacataagcaaactaaagtccaatgtaaacagtaaaaccatactagactttatcaatcagaaactgccaactattccctaactcggaactttccactctaaccaatttaaatgtcttttgtcttactttcatgttcagcctataaaagctcactgcccttgctgctagaatggggctcactaacctccaatggttctgagtgctgcgtaattcatgagtcattctttgctcaaacaaactccttgttttttttgttttttttctgagacaaggtctctcactcacatcgcccaggctggaatgcaggggcatcatcacagctcactgcagcctcaacttcccaggttcaggtgattctctcacctcagcctcccaagtagctgggacgacaggcatgcagcaccatgcccggctacttctttgtagagacggcattttgccatgttgcccaggctggtcttgaactcctgggctcaaatgatctgtccaccttggtctcccaaagtgctgggattccagatgtgagccactgtgcctgctccaactctttaatattttaatatccctaggtttatctcttaatgatcctaattctttcccccatcttagaccccaaagtgtgtggccccaggcctggatcatatttagttgctcagttatttcttatagtcaggaaaatcagaatttccttgtgcttttgatttcagtagctcagccagcttcaccagcaagcacatccacatatctggattctcagaccactgggcactgaaacagagcagttaatccccatacccatgctgaggaaataacacgcatcacatcttttaaaatatcatatacacaatggatcatttgagtaaatttaatactaggatcatttgagtaattttaatactgctctatagacaattcagtggtaccctaaacacaattaatttctacatagatattattaacttttcagctagtattagtaaaattaataaaattaggtacgtgatttaattattttatctgaataatgttttgttttttgttttagacactattattagaacactaggctgtgacatgtcattaaataacaattaaaaaatcaacacatacagcaaattattttttgtagtggttactcacctgagcgctcttaccacatttagcatctcctgaaacaatcacgatttgattttgaagcaggttctccataaaggagtatttttctttccatataggaagatcttctctttctttcagaagtttataataacgtgatgaatatggcaatccatcaaaggggttaagttccaaatcctcacaggccaaaacctcttcctcatccccatcgctggaatccagggattcaggaaaatagcgtttttcagaggaagagtttggacactccagcccttcttcttccatcttgtctgacagtgagctcacgcagctgacattccacaagcaagtttctcctatcagtaacccattgcaaacagggcttaaaagcctatttatacaaacccgtatgttccaatctctaagacttcagttcaaggttttagcaagttaaattcctcaaacctgcatctgttctccgttgctgtgttacccactgtgctggctcactacagcactcttcggcattgtaaatgattgtcaataaaccacactaagaaacaaacaaacaaaaagagtaaggaaaattaggaacacatataagttaaaaagaaaatgcacaggagttcaaatgaaaagcattattttttttttttctgttaacgggtttctgtcatttctgctgcctgcttaaaagaacaggaataatttaggctggtgtttaaagtttggtgggttccggtatttcctggctggttcagaaaatgattctgcactgggcctcgtgctctctgcctgacctctatctcaggctctgcgtcttgatcaactgtgaatggaaagcaacaggagggacaggattgtgattgtgaggctaatcaatcacgtggtcacctaatcccatgtcaaaagaggagctggaccctataaaaggaaagaactgtgatgacctggtgagtgttcctctaacacaggctacaggaaaatctattattaagaaatcctttactttaatgaaaaacatttttaaaacttttcattttccttttgcttatgtcagtttagaaagccaagtgaggggaatgaatttattatttccttccatatgtagttatggttggcttttattttatatatatataaaaaagacagggtctcgctctgtcacccaggctggatgcagtggcgtgatcatggctcactgcagcctcaacctcccaggctgttttccccctgcctcagcctcctgagtagctgggactacaggtgtacaccactatgtccagctaatttctgtatttttttgtagagacggagttttgccttgttgcccaggctagtttcgaactcctgggctcaagtggtctgtcctccttggcctcccaaagtgctgggatttcaaatgtgagccaccatgcccagctggctggcttttattaataaggtcttttgtttaattaaaccagaaatctctagcatatttcttgagattcctgggtcttgagcccaacatgtcagctccaagaggccattaaggacaacttttaatttaaatgaagaagagaaatcacccaagaaagagcaagatttataccaataactcagtccccacatgtcaggtgaagggtctttccccttccaattactagtgattaaaaagaaaaattccattagtgttgctggaaataagctccttttcacattaaccagataaaaatgaaaaagaaaactcaagttaaaaagaataataaaatacagttcatgatattttgtaagttactgcacttttcggatcacctggtttaccttaattattgctttagatggttggagccagtgtgctcaacagctagttcctaattagtaagtgataagaaaagctctctctctattggtcaagacaggctccagggcaacagtcaatcactcaaaaaacatttgctgagtgtcttctaagggcttattagatgagtaaactaggcactagatacacacataaaggatattttgaagatggcagcaagagcaggatagaaagttttaaaattcacagatgaacaagctagtttagaggtaagtaaccagagaggcagaagaacttcatagctcttcccaagtaaagttcttaaaaattcatctaaaagccagtgtttcaaaattaaaatggaattacaaaggcataatagaaatgttgtaatatggattcacttcagaactcttcactgcctctataaggtgagagtagacccacagaatagctccaggaagcatggtagcttgagatcatcgcacaagctaattctgggaaggtatccaagaatcagaaaattccactcttcagagaagttaaaatttaattttatattctatttttcttttgttctgattagaatcccttccaagggttctcagcctacatgtaaattaaattgctattaaatattataaccaatgattgccttaggtagtatttcttaactgttttaccttaaaaaaagaacagctattatttttaccaaaaagaaatgtttctcttatttataatactccctaagagtgtaataatcttataattacagtaaattcttacttataaagcactgaccactttgaaccctgaggaaataatcaagttttctgaatagtcttctttctaaagacctgagacttacctggccccttcatcacacattgtgcaatgtatccacacacattagccttaaccacttctctgttatagtggaattaaagatggccacagattatttgccactgttccaaatggagaggtagagtctatttcctctccccttgaatctgagctggccctgtgaccagtgtcactatgactaaaataatgcagttaagtgatactgaatcacttccaagatattcccatgcttgaaacactcctctttagaaccagctgtcattctatgaggtacccacgcccaagccaccgggaagagaccaaagctgaacttccagtccacagcagcataaaccttcaaccatgtgaacaagctgcctaagatgccccagcccagtcgagcctccagatgactgcaaccccagccaactgagcagaagcagcatccacaggagcccatacaacccaaagtatcatgagacaacaaatggtcactgtttttgtaagctactaagttgcagggtggtttgacttgcagaaacagataaccagacttctgccttcttaaataaactatactcacaatttaactttttcattgtgactcaaggtcaccattacatcagttgccaaaacagaatgatgtcctcagatgtctccgaaatctacagaagccaaagaccagactgctctcctggagccctgctcttccctggggactcagaacccatgccactgtgtggtgtggcctcttaccttgtgaggctcttctctgcctttctaacctgctctcctaaccggtgcattagaagccagacaagcttgtttgacagacacatttgtaaagcttgagtccacaaaggatgctaccattgaatccaatgagtctgaggcgcaaaactatgacatttatagactctggaacatctatttcgactactcagaaggaccttttgctgctatatggtttggattccaaatttggagggtggagtggctgagacctaactagaggagttgggcccattgactccaataacattcatatacctctccttattcatcttgcaactggtgtaagccatgtaaatgttttttcctagaggtaattaaatatgtaccaaagatctatgtcttggcctttggcaaatttaacagtaccagtctaaagaaagagaaacaaataatatggtaggttagatgtcattcaaaataaagtttcataactgttctgttgtaagtataaactacattccactataagaaatttaaatctgaaagattgacatttgctctttcaaagctatcatacatgtatattgtagatggcacactttgtcaaggacagctatttgaaatcaatctattacagctcttaaacatgcatccatgaaaataatacatatctaattaacagacaaccttaacaaggtagaattagaagtcaatgtaagatgaagctatgtcttagtcatttatgtgtttggctctggtccagtaattctagaaatacagttcacagaaatggaaagacaaagtttgtaaggcattaagtgaagcaaaagcattaatttgtcctgagtaacttatgtttcaccattcagtgctcctcttttgtgtgttttttttttctgtattcaagccaatattactgcttacttttcatgtatcaaatacccaaatacataattttagcacttggtagatatctggaagttcccaatgcttagttcctggacctctcttcccctttctctctttaatagggcctaagtggtctcatctcatctcatggctttagtgccatccatacttggatgtatgggtgtatctgtccttaggatccatcgatctaaacttcagtgtcatgtattcaactacctatgcatcatctcccacttggatatttaataggaaactcagactttacacgcctgcaactgagctcccaacatgtaccccaaagccacaaatctggtccccccaatttcagttaattccttccttcccattgctcagatcaaagtatttgaagttacccttgatttttctctatcttaaatcccacatctggtccttcgactgatgtggtatgtagaatggcctccaaagatgtgcatgtaggaatccctggaacctatgaatatgtactttgcatggcaaaagggactctacagatgtgattaaattaataaccttgagattggaagattatcctggacgatcctggtgagcccaatctaattacatgagtcttaacaatcagaggaccctcctagccacagtcagaggaaaatatgactatggaagaaggtcggagagatgcaatgttgtgggctttgaaggtggaggaaggggccacggccgaagaatgatgtgagtgacctctaggagctagaagaggcaaggaaacagatcatcttctagaatttccagaaacgaacacagtcctgctggcaccttgattgtagtccagtgagaccgacaaccgacttctgatctacgaagctgttaagacaataaattaccactcaatttatggtaatttcttatagaagcaatagaaaactaatatattcaatcatgtcagttctgtcttcaaaaaatatcaagtgccccataacctctactgtgaacacttggtctgagccactacccctctcacctggattactgcaatagcctcctaaccggccttcctctacccttagccccttacagtcaggtctcaagcctgcagtcagagtcatcctattaaagtcagctcatgtctcctctgctcaatagtctccaatacttcccatctcatctcactctgaggaaaaaccaaaatccttaagaggaccaacaatcactgtatgatctggacccatcgcctctctgccctcatttgcaacagctcctacttcagtcttccctagccagacggctcccctgctattcctcaaacaccatggcagatgcctgcctctggaacttggtgttcacccttctgtatgtctgaaat

SEQ ID NO: 24836 - DNA, 3979 bp, Homo Sapiens
cctcgcccgcctgccgcctttttgtgcgcgtgtgagtgtgggccccagcgtgccctcccgggggtgggttccgggcggaaggcggaggcccggcgcgcagcccgccgcccgcctgcccgcggaccggggagccggggtgcttggagcgggggacgccaggcgtgggctggcggcgggaccaggaggaggaggaggaggaggaggagagcgcgggctggcgcttgcccgggcgcagtcggcggggaccgagtcgtacttcctgtgcgaaaggcggcccgaccctaaccgccaccccctccccctgtctccctctctgaacccgcccattgggggtaggacactcagccgtcaccgctcgctctgctggccgctacctgcagcaagatagggccgccatcgccgggcgacgacgaggaggaggcggccgccgcagccggggcccccgccgccgccggagcgacaggtgatttggcttctgcacagttaggaggagcaccaaaccgatgggaggttttgtcagccacacctacaactataaaagatgaagctggtaatctagtccagattccaagtgctgctacttcaagtgggcagtatgttcttccccttcagaatttgcagaatcaacaaatattttccgttgcaccaggatcagattcatcaaatggtgcagtgtccagtgttcaatatcaagtgataccacagatccagtcagcagatggtcagcaggttcaaattggtttcacaggctcttcagataatgggggtataaatcaagaaagcagtcaaattcagatcattcctggctctaatcaaaccttacttgcctctggaacaccttctgctaacatccagaatctcataccacagactggtcaagtccaggttcagggagttgcaattggtggttcatcttttcctggtcaaacccaagtagttgctaatgtgcctcttggtctgccaggaaatattacgtttgtaccaatcaatagtgtcgatctagattctttgggactctcgggcagttctcagacaatgactgcaggcattaatgccgacggacatttgataaacacaggacaagctatggatagttcagacaattcagaaaggactggtgagcgggtttctcctgatattaatgaaactaatactgatacagatttatttgtgccaacatcctcttcatcacagttgcctgttacgatagatagtacaggtatattacaacaaaacacaaatagcttgactacatctagtgggcaggttcattcttcagatcttcagggaaattatatccagtcgcctgtttctgaagagacacaggcacagaatattcaggtttctacagcacagcctgttgtacagcatctacaacttcaagagtctcagcagccaaccagtcaagcccaaattgtgcaaggtattacaccacagacaatccatggtgtgcaagccagtggtcaaaatatatcacaacaggctttgcaaaatcttcagttgcagctgaatcctggaacctttttaattcaggcacagacagtgaccccttctggacaggtaacttggcaaacgtttcaagtacaaggggtccagaacttgcagaatttgcaaatacagaatactgctgcccaacaaataactctgacgcctgttcaaaccctcacacttggtcaagttgcggcaggtggagccttcacttcaactccagttagtctaagcactggtcagttgccaaatctacaaacagttacagtgaactctatagattctgctggtatacagctacatccaggagagaatgctgacagtcctgcagatattaggatcaaggaagaagaacctgatcctgaagagtggcagctcagtggtgattctaccttgaataccaatgacctaacacacttaagagtacaggtggtagatgaagaaggggaccaacaacatcaagaaggaaaaagacttcggagggtagcttgcacctgtcccaactgtaaagaaggtggtggaagaggtaccaatcttgggaaaaagaagcaacacatttgtcatataccaggatgtggtaaagtctatgggaagacctcacatctgagagctcatctgcgttggcattctggagaacgcccttttgtttgtaactggatgtactgtggtaaaagatttactcgaagtgatgaattacagaggcacagaagaacacatacaggtgagaagaaatttgtttgtccagaatgttcaaaacgctttatgagaagtgaccaccttgccaaacatattaaaacacaccagaataaaaaaggtattcactctagcagtacagtgctggcatctgtggaagctgcgcgagatgatactttgattactgcaggaggaacaacgcttatccttgcaaagattcaacaaggttctgtttcagggataggaactgttaatacttccgccaccagcaatcaagatatccttaccaacactgaaatacctttacagcttgtcacagtttctggaaatgagacaatggagtaaatattacacaaatacttattcattgtggttatttttatacagtagtgagaagaatattgttcctaagttcttagatatctttttattgatgtgcaaaaatttttggattgacagtaacttggttatacatgacactgaaatgccttactttgtatgatattccatagtatattaaaaatggtaaaattgcatgggttttgtaggtacttttggaatctagaagaaatgaaattttaccaagttatataaagagaaaattgaatttaacaatgcgaatggtagtctaaccaaatgcatcaatcctgtgtggtttagtgtaaaaatgagaacatgttggtatttatctattgtaagataaaaaagctggtgggtgaaagaaatcatgttatgataaaaaattttgtaattttcttgatgactggaatttttattatgcataactgacaaatcaagtttccaagcaaatgttacatagtgtaggctttacttagcttatcaatttgtcattttgaagctaattattttaattaggttaactatgtacaatattttaagcattactcttgtaagattttgaaaactacattttaacatggaactctagggatagtcaccttttaaatcctgttgaaaagccatgtttaagatttaatttgccaaaataatgtcttgttaatattctttcaataacgaagttgggcaatataaccaatgtttaaaaaagtttaaaatgtataagttgaggcatttgggtggtaagagaatgttatagtgaattatcccttttcttgactattggaggaccaaaaaataaggtgtattgcgtcttagcagtgattttatccaatcttgtttccaaaaaccatggtctcccagggccttaaaagccatcatgtaaattaccagtaaagtgtaacatatgcaaacataacaaaatcacttccatagtgacgatactccaaccatatggatattagtcatagaagaactagaggttttatgatatttttttaagtcttttttttttgtctaggtagtcagtctgcacttaaatatcaatcattttccttttttgcttcttcccttaaaatttatatgtatccagtacatttaattgagaagcgtatgttttttattatgctgtattttctttttattttttaattattgtttatattttcaattcaaaaatgtacaaaataaagttacattgctggtctgtgtaagagctatacagttttcctaaatgtatacctgtaactgcagcagttcacctatttgcaaaaatttggaattctgttcatttgttattcttaagaccacctcaaatttaaaggctaccttattgtacgtttaaagtgtattataacagtgtggtagttaataaaacactatttttttttcttttgaaaaaaaaaaaaaaaaaaaaaaaaaaaaaaaaaaaaaaaaaaaa

SEQ ID NO: 24837 - DNA, 15446 bp, Homo Sapiens
tagcatatacaggcaacaatccaaatgttcattgcagaaattatgattattattgtttttcttttagaggcagggtgtcactctgttgcccagactaatcttgacctcctgtgatcctcaagagatcctccggtctctgcttcccaaagttcttggattacaggtgtgaggcactgggcctagacattgcagggattattaaaccatggtgcatactaccattaaaggtatgaggtaggttttatatgctgacctagaaagatggtgcaacaccataggggaacaagaaggctgcaaagtggcagcacagcaggagtctttaagaaataggtatttgtttcagcttaagaagtgtctggctgggcgtggtggctcacacctgtaatcccagcacttagggaggcttaggtgggcggatcacttgaggttaggagttcaagaccagcccagtcaacacggtgaaaccccatctctactaaaaatacaaagaaattagctgggcttggtggcaggtggctgtaatcccagctactcaggagctgaggcaggagaatcatctgaacccgggaggccgaggttgcagtgagcctagatcgcaccactgcactccagcctgggtgacagagtaagactcggtcaaaaaaaaaaaaaaaaaagaccgggtgcgaggtgctctcgcctgtaatcccagcactttgggaggcctaggcaggaggatcacaaggtcaggagatcgagaccatcctggccaacatggtgaaaccccatctctactaaaatacaaaaattagccgggtgtgatggcacacgcctgtagtcccagctactcaggaggctgaggcaggggaatcgcttgaaaccaggaggtggaggctgcagtgagccgagatcacgccactgcactccagcctggcgacagagcaagactccatctcaaaaaagaaaagaaaacaaacaaacaaacaaaatccccaaaaagcaaaagtgtctgcatggacttgtgcctaactactcacagtggctacttcttgggggaggtgaaaggggaccctgttaaagaatttttcttctgtattgtttttcttcaactgagtctgcattaattttatatttaatactctccccacccctgatgctcacaggttgctttagctggtggaaggagaacctgcacctctggttttggcaaagtgtagaaggggacaagggcactgctctgcacctgcacaggttcttgcctcctggggtcagtttaatgaatctcagtggtgtttcttgggaagaacacagtggacactcacttgccagtcagtagacaaatcactgaagtccatgtctggcagttctcaatgtcatggggactgtaaggttgtcatgtctcacagttccctgacttagaagattagtggtgacagacacttctcagctctgctcgggagagcagctctgtaatgcgcttgtggtttcagatgtgggcggcctgtgtgaacctgtcgtgcaaagctcacgtcaccaactgctgcagttatctcctgaatcaggctgagggtctttgctgtgcacccagagatagttgggtgacaaatcacctccaggttggggatgcctcagacttgtgatgggactgggcagatgcatctgggaaggtgagtctgtgctttgggcttcccaacctctcaagtcagcatgaaattcagaaggcagagagggacatgtggccctccaactcggggcccagggagccactgtggcatttgagagcgccaccctagctttacctcctctggtgtcctggccttgtgtatctcttagagatggcaaaatttgcagccctgacctcaaggattacaaactaatttccagtcctgtaggggtcatgggttctgctgtggccagtgtggcactgagtttgtcaggcagaatttctaattatggaaggaactctgcttcctcagtgattgaactgacctttgtgggggtgcctttgtggggtgagaatgggcatacttgggcctcagttgtgatggccatggggtggagctgaggtctaggcccagggctgggaaagcttctaccaaccccgaggcatttgggtgttttagggcagaagaggagccaggaggatgggtatgccccactggagctgtgtgtggggcagcaggtgagggtgggattccagagggagggtcaacccagccaagcagaggaaggggaggagagggtttgttttggaaagaacatcaccctctcagtttcctggggtctggatagcctgttcttgtgatgagctggaggatgtgggccctgcttggatcctcctctcccctccctgcccccattttctcttcctgtgatttatgctgttctgggctcaccctcttcccagagctgtcacgctacagctgacaggcagggcaggcgttttaattattattaatttttttttgagacagagtttgagacagtatcaagagtgggtatcctctcagcgtgtcttcaagtagcatcccagagccccgctcctgggtacccacaacatgaacaccgtccagaagcaagggcagcctctgcaggtggggcgggggttggaaaacatttatcaaacggttgagttgggtgcaggggatgcaacatgatcaaacagggtcttgcctccaggagcctcatgtagggacaacgcacagtgatgaccttcaactgcagtggggcagcaaggctgtgggaggggtgttttgggcagagcaggcgacgtgggtacctcttcaccaagacagcaggaagagcacggacatcattttcccgtctcacctccagactcccaggggactgtgccaatatcctcactccagccctggcccatggccactgctcaacccttgggccctgtcagttcagggctgtgcagaaggagagttgcctgtgctcaggctcaggggttccgtccagctaaggaggcctactaggggactggggaaaggcctcatgaaggaccaggcctgtgatggggagggaagatggcagaggggacagtgggaagcagagcagcaggggtctcctccacgcctctctgtacttctcccacccacccttgcctgctcccctctgccctgggtatgtgcccttgtccacccaacacctctgcagtgccaagtccagccctgacttcttcctgagctgtggcccagcgttcccacaggcatttacctcacggatgcagcactgcccctcatcctcttctctgaaagtgtgtgggaaatgcttcttggtgccatctctctcccaccctgccttccctgcaccttctctatgaggtgtctgttgtctctgtacttgcctccagctggcctttcagaccccatccctcctgcctcctgcccatccctacccctgtcagcaccttacatactctgtgcccaacagcattggggattcccactgtgctgaaggaagtcctcatgtggtccagagagggagctggcccctgctcccatttccagcaccattttctggcacaggctccatgtccccaggctccagctgcttctggggtaccaaggtctgcatttcttcctcttcccccagcagacagaagaccttgctggacaggtgtccacttcaatagtaacttctgaggctgccagcctcctgaatggtccagaagaaccagacccttccccgcccccattaaaaaagacaaaatatggccaggcatgttggctcatgcctggcatcccagcactttgggaggccaaagcaggtgaatcacttgaggccaggagtacgagaccagcctgacaaacatggtgaaaccctgtgtctactaaaaatacaaaaattagccaggcgtggtgactcatgcttgtaaatgcttgtaatcccagctacttgggaggctgaagcaggaggatcacttgaactcgggaggcagaggttgcagtgagccgagatcacgccactgtgttccagcctgagcgacagagcgagactccgtctaaaaaaaaaaaatatatatatatatacacacatatatatatgcataatagtctctgtgtaacagtaagtggatgcagtaactggtgtgagggcaacttggagagtgtgcttggaggcacagagatgctcagggctgcctggactgcctccatgatggtggcctgctctgtattaggtgagtgttcaggaaaggtgagggcagggcagcccacagcttcacagtggcccagggaagcagggcaggcaggctatgaggcctagtaggcatctgggccagactttgacactgaggccatggaatgggtggggctctgagaacagaccaaagtgatcatgggctgaaggctatgtccacagatccaaggcgggataggctgtgctgggcagtgatgtcagccaggctccccagcgggactgggggtgtcaggggcagctctgtcccaggtggcagacactggtttcccctcctgctctcacaaccggcctgttaccaggtgttgtctgagctgtggtgaggcttccctggtgacattcaggagcagggagcctgcgagtaagggtgtatgcatctgccctgactgcctggccctgtggtcaaggatgggggaaggcagctctgcctgcagctccaccccatttataaagcactgtggtgccttctgctggggcatgtgctgagtggtgcctcgcaggcactgccctcgggaagttcacaggcttatgtggaagctggtgggaatgggccaagaagagaggtgtcaggagccaggtattgggcaggtcccaggtctctgagcctcagtttcttcatctgtaggagggtggtgaccctgccctgctcagcttaccaggtacagatgtaagttttcagtgcagaggaaaagcagagaacttcccctcagatggccatacccccttgtcgctgtacccaactctccggtcctactttgtagctctcaggtgtcacatgtggatcctgccctaccatcccccttccctgtctagaaacgaggcctgctgagcttggagccatcccactccctgctctcaagccgtctgctcctgggttagcctgtggctggcctggcctgattctacatagatgtgggtgtttctccactgctggggcagcagttgtccattctggggcctgggtcagctctcagctgtggccgttgtgcctgtgcttccccaggtcctggtggtgactccaaccctgccctcacatatcccaagagcaggctgactgccttccccattcccacctttccagtaactgctgcaagaacggacagacactgctgcagagaacttgccacggtgtttcatgctgtggctggtggttccaggctgcacgctccattctaggaaagggtgaggcttcctgatcatcagtcttaacaggggactgtcctatgggtacctgtatacgctgccgggagtggggcagagtggggttagagtagtgcctgctgcccattgggggtgtgcgggttccttaagggctgtagtctgtgtgcgtgtctggttttttcctcctccttatcagtaatcagtcttgtataaccaggctggccctgcttcctgcctaggggctatcggtgtaccatctggagttgcaaatggggtgatagggcgtcagcggccttcccacacccaagcacttcctgacacccagcccctcatctctagccaacctctggctcccctagggatcctggggctcaggcctcacgctccagcatccgggggctttgcccttctggtgttgctcttctttgcaggtgccttggaacaggggtgcaacagagttcagaaagtgccatctgttgcatggataccctgctgccaccctcgtccacctttctggggcagaacagttggatgggtctttatttaagaggacaaaagggagagagaatgcatagaggctgggtctggtggctcacgcctgtaatcccaacactttgggaggccaaggcaggtggatcccttgaggtcaggaggtcaagactagcctggccaacatggtgaaaccccgtctctactaaaaatacaaaaaaaaaaaaattagctgggcatggcgggagatgcctgtaatcccagctactcgggaggctgaggcaggataatcacttgaacccaggaggcggaggttgcagtgagccaagatcacaccactgcactctagcctgggtgacagagggagactgtctcaaaaaaaaaaatttgcttagaatttgtctgtgtgaccctgggcaagtcatttcccctccttgggactcagttccttgcctgtgaacggggacagtgcttctcccttacagagctgttgtgagaattaaagtagaaaatgtacctatggtggttgttggtagtgaccagttcccccaaccctgactcccctgcaggatggggcctgggcccgggaatgggggatgggctggcagaggatgactgtcccagagaggagtcttctcggcagatgtggagacctagctgagtcagaggccaggatctaagtttgagggtgttccttacaccctgcagccatgagtctttggctgagtcaaatggcctttctgagctcagttccttatcagtaaagcctggacagtggtccaggacgctggacactgtgtgagtgttaggacacaggacactgtgtgagtgcaggtggggacccatggagcactctgctggggagcaattcatggggagcacccctccagagagggatgatttgcacagggccctcagcccagtcccttgcaggctggaccttggagagtgaggccctgaggcgagacatgggcacctggctcctggcctgcatctgcatctgcacctgtgtctgcttgggagtctctgtcacaggggaaggacaaggtgagggctgggcactaatgtctgtatgaggtgggtggagaactagggcatgtttgggggactgggttgtccgatgtcaagcctctagggaaaggtttggcccaaactgtgctggggcatgtcctctaggggtcagcctggacctcagtctctagtctccctacttttacctccctaccttcattccctggaccgactgtagtctcccttccttcactctcttgacgcctctccagatctgacttgcccgtgtaccacaggtcagagcccatcacttcccaggcctcccagtgcttccctggacagattctgggatcatttactggtgactgccctgctagggtgtcagctgtcagatcctccccaacccccgagctcagctctggcctgaagtacttaccgtgggctcctgatggtcactgtctccagggccaaggtctagaaccttcacctgcctcaccaacaacattctcaggatcgattgccactggtctgccccagagctgggacagggctccagcccctggctcctcttcaccaggtgagcatggagggccatgcccacctggacagggatgagggtgagttccccaggattgaagcagctatgccaggacagtgtagcagccccgtggtgctgacaaatgccctttccagcaaccaggctcctggcggcacacataagtgcatcttgcggggcagtgagtgcaccgtcgtgctgccacctgaggcagtgctcgtgccatctgacaatttcaccatcactttccaccactgcatgtctgggagggagcaggtcagcctggtggacccggagtacctgccccggagacacggtgagcagcagctataggtctggggcggggccgcttggcaagaacatcctggctgcttgggggtttggagcagggccttgcagcctgtgagtggcccagtgagtgttctcagtcccagccgagtgagatccagggctgggggcaggcttggcccttgggaggggagggcccatatggttactgcaggggcagggttttggcaggaaataaacatgcacggctgctagttggggcaggggctggcacttgagtcatgtgaaatgcacttcagtcataccaggaaggactccaataagatgctgggaaaagcttccagcagcagactgtgaaggaaagggaaagcaagatttagaaaccacctagtctaggtgcagaggccagaggaagtcattgctgtcctgtcccgcctggggcttttgtggaccagtctcccagtgaggtgcctggtctgagagggccttgaccattccccttgggagtctttcagaccccagtcttgtgtgttctgactgacacacccagacccatggggcttcagcctcacatggattcactctgttccagttaagctggacccgccctctgacttgcagagcaacatcagttctggccactgcatcctgacctggagcatcagtcctgccttggagccaatgaccacacttctcagctatgagctggccttcaagaagcaggaagaggcctgggaggtaacactttggctggctttccctgggggcctctctcctgggaacagcagtccagggtagactccccactctacatagggagatgtcaacttgtagtgatgagaagggaggaactagagcggggtgtgtgtgcacacacacatgctggcatgcagatgtgtatgctttatgtgtgtgtatgggagtagggtgagtgcgcctgtgtctctgtgtgtgcacataagtgtggtgagtgtgcatgtatgtgtttatgtgtacacatatgtaactgtgcacactcatgtttgtgtgcccatgtttgtgtgtttatatgtaagtgtacatatgtgtgtgcctgtgccttgcatttgtgtgagtgtgcacatgggcatgcctatgtgtatgagtgtgtatgtgagtgtggtgagttgcttctgtgcacacacttttgtttatgagtgtgcatgcaagtgtgatgagtgtgaaagtgttcctgtagacatgtttgcctgtgtgtgcatatgtgtatttgtgggcaaacgcagctgtgtctgtgagtgtgagtgtgccttctgtgtgtgtgtgtgcacgtgaatgtggtgagtgtgtctgtgtgttaacacaagtgtgttcaagagtgtgttatatgagcatataatgcatgtgtgtattctcgagggctgagggacccagccccaccttcaccacctgctaactgtccccacccccacagcaggcccagcacagggatcacattgtcggggtgacctggcttatacttgaagcctttgagctggaccctggctttatccatgaggccaggctgcgtgtccagatggccacactggaggatgatgtggtagaggaggagcgttatacaggccagtggagtgagtggagccagcctgtgtgcttccaggctccccagagacaaggtgggcactgctgtggctgctgcacttccagcggagtctgggctgggcgtcttctcccctgttcacctcagccctgcaccctttcaccctcctgtaagcccctccccgaggcagccatgcctcagttgacccccttcctctgaaggtctgaggtctgtagggaggacagaaacacctgccaactctggggcttcctgggaacctgtagttagtggctgctgttaggagtgagggtggcagggctgcacaccagggctgggctcctgcctggaggctggacatgacctcagtgtccttaatgggggctggactgacccttgcgcactgcagtgctgagatggcccagggactttatgacccaccttgtggcagatgggaagagtgaggcccaggagtgtggttcacacaaggtccttcagcaggtgacacaaacctccaaggcccatcacaaggtccttcagcaggtgacacaaacctccaaggcccatcacaaaccttccactttggcccagggcactaaagggcgcacctttgccaggtgggtttggggggagcctcctggcactgaggctgctcacagccctgggcccttcctgtccacaggccctctgatcccaccctgggggtggccaggcaacacccttgttgctgtgtccatctttctcctgctgactggcccgacctacctcctgttcaagctgtcgcccaggtaggtggctgatgtgtgtgtgcgtgtgtgtacatgtgtgagcgggcaagagtgtgcatgttagtgtatgtgtgcagatgtgtgactgtgtgcatgtgtgagtgtgtggtgggtgggccgtcaagggccgcccttgtctggttcctcccctcccctctccactgcctggtcctggacggggtgggcttttcgagtctccaccctggtccagaagagggttctcaagttgccaggggagagcagggaaggggggtctgaggcagaggctgaagataagggcagcttggtcccgaccagacccagagtcaccgagatcaagagccggaggtcctagtctcctgcctctggaggagcttggtttgttcatttgttcacatgttctacgaaaggacagttggggcatctggtgtgctcaggaccctgttctcagaacaagatggacaagggccctccttaaataaaccgtcacgcctcatgcaccacatgtcaggttacaagacagggtgcaggggccatgtcaggccgcagatgtgaggaagagggtgtggggagaggggtgttgggtggggctaagtgggagggtgcttcgcttctccttggagcaaaggaaagtgtaaaactgtgtgacacaacctagtttatgttttgaggaatagattgctgggacaaggggacatgggggacctgctggaggccaatgggggccagtgaggtgcccacagggagacgatttggcatgagccagtgaaagaagtggagatagagaaaagtggagagaattgcagggtctcatgaggggaaatagaagggacatgtgggtggatgagatatgagtggtgacccctgaggtggggaaatgggggacagccttgcagggaggttggtgaagtctatttggacctgttgggttggagccccaggtgacatccttgtgggagggtcagtggatccttggcagcaagtctggtgctcagggagacactgggtggggtgggagccacagaccttctgctgatggcaaagacagggttcctggaggtgctggctccctctgtgatctgaggacccagctagtaactccccgttctgaacccgccatcgcagctcacgctgtaaaggacgcgcgcctcagtataaatcagttctatgcggccgttaggcaaggaggcccagttgggtcctgccctgagagtgggttggaatgtgatgagatgggagagaggcagtggcagggacgaggtgggcggacctcctgctgatggaaggaagctcagcctctgcagtgacctcaggccacctgggtcgccataggcctctgactggcctctcttggcctcagggtgaagagaatcttctaccagaacgtgccctctccagcgatgttcttccagcccctctacagtgtacacaatgggaacttccaggtgtgtgcagagaccacagaaggacatggggggcaggggttgcccagagctctggcctgcccaagatgttggctttcactgagggttggcggccagtatgggaggcttgtcagtgcttggagccttttttgtatattcagtgaatttcaatttatacgcgtatctcaaatggggaaaaattagctttattttccattgctgatttctttttgttctcaggtctctagttccattgttgattgaaaaaatgtaaatttctcataacttatctctgtcccctctggtttgcagctttctgcacccaccatgtgcctcacctcctccttctgcgaaggtgtctgtcctgtggccatggggaagggtctgtggtgtgtgtgctgcccttggggctctcactgcctctgggctcctgctctgcctggtcccctggtctccccggatcacatgatggcaccacagctgaggagtgggctctgcacttcccccccttccacccatgttgggctcctacagcccaggcaccagtgagcaacttgggggttgcatcagcccctcccctccctgctgggctgttggttcatgccccctgggtgggaggagggggagagggagagctccagtgagtggtctctggtttttcccctcagactcctcactttgggcaaaggacaagaggcagtgagggcccctccctggggtctgggccaagctgaccactcttctccagaatcttccctccctgtccccttcacactgtggctccagcttactatgcagaaaaatccttttctctctcaatgaggagcgtagttttcaagatttttgtccaaaaatataatttgaaccatgaaccgggcatctggctcttggcagagtctccctctttccccaaggtggtagatgtgactgtcaggagcctgggcagctgacgacaaggctgagcaggtcagattgtgactgtcccctggactgtcatcctgttgcgggcaccagctgttccctagagaactaggacacctgccacgggttatttagacctgcgggtgaggatctggtgccataggttggtctccagggagcactgcagtgatggagggtgttgtgtgtgtgatgcatgggatggaggctcctggtcccaccaagggaacagcttccttttggaggcgggggcctctgtggccccacagaaggatccaggtctgctggccatagccgagtgctttgaaagtcaccagtcctgacagcgattcgtgtgtgtgtctgtgtgtgtgtgtgtgtgtgtttatgtgtctgtgtgtgttcgtgtgtgtgtctgtgtgtgtgtttgtgtgtgtatgtctgtgtgtgtgtgtttatgtgtgtgtgtctgtgtgtgtttaagtctgtgtgtgtttgtgtgtgtgtgtctctgtgtgtgtgtctgtatctgtgtgtgtttgtgtctgtgtgtgtttgtgtgtgtgtctgtgtgtgtttgtgtgtgtgtgtctgtgtgtgtgtttatgtgtctgtgtatgtttgtgtgtgtgtttgtgtgtgtgtgtttgtgtttatgtgtgtatgtctgtgtgtgtctgtgtgtctgtgtgtgtatgtgtctgtgtgtgtttatgtgtctgtgtgtgttcgtgtggtgtgtgtgtctgtgtgtgtgtgtttgtgtgtgtatgtctgtgtgtgtgtgtgtttatgtgtgtgtgtctgtgtgtgtttatgtctgtgtgtgtttgtgtgtgtgtgtctcgtgtgtgtgtgtctgtgtgtatctgtgtgtgtttgtgtgtgtgtgtgtctctgtgtgtgtgtgtgtttgtgtatgtttgtgtgtgtgtgtgtgtgtgttgggaatgcccagtctctgcagctgctgaaaggccctgaggcacatgctgtcaggagctggctctgtcctgggcagatatcaccatctgtacctcggttcaggctgccgtgggcaccaggccctgtgctgggggagtgctgaggagcctgaagggactcagggtcccgtgatgaggctgggctggcacatggaggaaagacagaatgtccaagacacaggcgctgcttggcctctgggtgtggacctcaggagggcttcctggaggaggagggatgctgggcttgccagaaaggaggcagctgctcccaggatgagttctgaacatgctacctgagcccttccctcctcccgtgctctgttccagacttggatgggggcccacggggccggtgtgctgttgagccaggactgtgctggcaccccacagggagccttggagccctgcgtccaggaggccactgcactgctcacttgtggcccagcgcgtccttggaaatctgtggccctggaggaggaacaggagggccctgggaccaggctcccggggaacctgagctcagaggatgtgctgccagcagggtgtacggagtggagggtacagacgcttgcctatctgccacaggaggactgggcccccacgtccctgactaggccggctcccccagactcagagggcagcaggagcagcagcagcagcagcagcagcagcaacaacaacaactactgtgccttgggctgctatgggggatggcacctctcagccctcccaggaaacacacagagctctgggcccatcccagccctggcctgtggcctttcttgtgaccatcagggcctggagacccagcaaggagttgcctgggtgctggctggtcactgccagaggcctgggctgcatgaggacctccagggcatgttgctcccttctgtcctcagcaaggctcggtcctggacattctaggtccctgactcgccagatgcatcatgtccattttgggaaaatggactgaagtttctggagcccttgtctgagactgaacctcctgagaaggggcccctagcagcggtcagaggtcctgtctggatggaggctggaggctcccccctcaacccctctgctcagtgcctgtggggagcagcctctaccctcagcatcctggccacaagttcttccttccattgtcccttttctttatccctgacctctctgagaagtggggtgtggtctctcagctgttctgccctcatacccttaaagggccagcctgggcccagtggacacaggtaaggcaccatgaccacctggtgtgacctctctgtgccttactgaggcacctttctagagattaaaaggggcttgatggctgttccaaagtgttgatggctgggagaaggggccagaggaggagtgaggggtggggtttgtccagccctgggctttccgggctctagagatagcatggtgtaggctcaatgacagttctggggacagcaagttggaggttcaggggcagcttcaggacagcaggatggaggctcagggacaattcctgggaggccagtgccctcgttcctccttgtcctcatcctcccacttgctccaggaaactgagagctgagcctggagcttccagacagtcagtgctgggggtgaccatccagcagtgatggtggcctgtgaagggtcctgcttctgtcctcagcctctcatggggtgggcttgtggaggagctgtggtctggagagagtggcagttggagcagaacgtgcctgcgtttgtttcctagggctgtcgtaacaaagtgccacaaaatggttagcttagaaccacagagatttgttgtctcacaattctgaagtccagaagttggaaataaagatgttggcagtgttcccaaccacatgttcttgggctcccatgaaacagaagttgatatgaggccaaggaagcttcccagacaagactttattaagtcttatgccccgaaagtttgggcagaagagagacggtgcaggaggaagaattcttggctgactccccaaggggaatgcattgtggtgtcttaaggagggtgacatacataatttatgagctacatgagtgtcattgcacatatggggtggagcg

SEQ ID NO: 24838 - DNA, 2124 bp, Homo Sapiens
ggggggatggcggagcgggcgctagagcccgaggcggaggcggaggctgaggcgggcgcgggcggggaggcagcagccgaggagggcgcagcgggccgaaaggcgcggggccggccgcgactcacggagtcggaccgggcccggcgacggctcgagtcccggaagaagtacgacgtgcggcgcgtgtacctgggcgaggcgcacgggccctgggtggacctgcggcgccgcagcggctggagcgacgccaagctcgccgcctacctcatctctctggagcgcggccagcggagcggccgccacgggaagccttgggagcaggtccccaaaaagccaaagcggaagaaaaggcggcgacgcaacgtgaactgcctgaagaacgtggtgatctggtacgaggaccacaagcaccgctgcccgtacgagccgcacctggcggagctagaccccacttttggcctgtacaccacggccgtgtggcagtgcgaagctggccaccgctacttccaggacctgcattcgcccctgaagcccctcagcgactcagaccctgacagtgacaaagtgggcaatgggctggtggctggcagctctgactcatccagctctggctctgcctctgactctgaggagtctcctgagggccagccggtcaaggctgcggcagcggcagcggcagcgacacccaccagcccggtgggcagcagcgggctcatcactcaggagggcgtgcacattccctttgacgtccaccacgtggaaagcctggccgagcagggtaccccgctgtgctccaacccagcaggcaatgggcctgaagccctggagacagtggtgtgcgtgccggtgcctgtgcaagtgggtgcgggccccagcgccctctttgagaacgtgccccaggaggccctgggtgaggtggtggccagctgccccatgccaggcatggtgcccggctcacaggtgatcatcattgcgggccctggttacgacgctctcacggccgagggcattcacctcaacatggcagcaggcagcggtgtccccggcagtggactgggcgaggaggtgccctgtgccatgatggagggtgtggcagcctacacccagacagagcccgagggtagccagcctagcaccatggacgccaccgcagtagcaggcatcgagaccaagaaagagaaggaggacctgtgcttgctaaagaaggaggagaaggaggagccagtagccccggagctggcaacaacggtgcctgagagcgcagagcctgaggcagaggcggacggggaggagctggacggcagcgacatgtcagccatcatctatgaaatccccaaggagcctgagaagaggcggcggagcaagcggtcgcgggtgatggatgctgacggcctgctcgagatgttccactgcccatacgagggctgcagccaagtttacgtggccctcagcagcttccagaaccacgtcaatcttgtgcatcggaaaggaaagaccaaagtgtgccctcatcctggctgtggcaagaagttctatttatccaaccacctgcggcggcacatgatcatccattcaggtgtccgtgaattcacctgcgagacctgcggcaagtccttcaagaggaagaaccacctggaggtacatcggcgcacccacaccggcgagacccccctgcagtgcgagatctgtggctaccagtgccggcagcgcgcgtcgctcaactggcacatgaagaagcacactgcggaggtgcagtacaacttcacgtgcgatcgctgcgggaagcgcttcgagaagctggacagcgtcaagttccacacgctcaaaagccacccggatcacaagcccacctgacccacctgaccactgaccgcccctatttattcgtccgctcggacaccacgcccgggcttgccggggcctggacagctgcgagggccgcccggaccgcgggccggaaggaggcgcccccgccccgccccagagctgggccccctgggcaggttccccaccccgccccaccgcatccttctcggagctggtgcctggggctgcattgctggaactgtgtcaagagagcagagtgagattaaagagcgagaaaggaaaaaaaaaaaaaaaaaa

SEQ ID NO: 24839 - DNA, 2939 bp, Homo Sapiens
ctcggctgccggaagggctcgttcctgtgtcatctcctagcggcctggcgccgaggcggcggtacgcaaggctggagccgcagcgggagcccccggtcttgtagatgatactctccaagctgtaaggaagaagtcaaggattaaggagacctggactggagaggagcctttttcaaaaaacaacaatgacaagagaaaatgtagcccacaatgctctgagacaagagggccttgtgaaggggaaggatgatacctggaaatggggaaccagcttccaaggaagtagctcctctgtttgggagacctcccacctacactttagacaattacgttaccatgagacatctggaccccaggaagccctgagccggctcagggaactctgtcgccggtggctgagaccagaagcacgcaccaaggcacagatcctggagctgctggtgctggagcagtttctgagcatcctgcctggggagattcggacctgggtacagctccatcaccctggaagtggcgaggaggctgtggccctggtagaggagctgcagaaagaccttgatggaccagcaatacaagttccagtccttgtcaaggatcaggacactctccagaaggtggtgagtgccccaggaacaacacttcctcctgtacttcctggcagccacatagcagctgaaatttgcccgcatcctcctactgacctagtggcattcaacctccaggatcctcagcatgattctcctgcccctgaagcttctgccctttcccaggaagagaacccaagaaatcaattaatggcacttatgctcctaacagcccagccccaggagttggtgatgttcgaggaggtgtcagtatgcttcacttcagaggaatgggcatgtctgggcccaatccagagggccttgtactgggatgtgatgctggagaattatggaaatgtgacctccctaggttacaggaaatacaggaggcagaggaacaaataaaagacaccacgagaaacagacacatccagaacgtggaatattgcataagaaagctgccctggattcttcaaaatattattatgatgaaaaagagaggggagtgaaaattgttcaagctgtcttgagtctgctgtgagtttattataccattctctgcttttgtgtatgtatgaaaatttcgatatgaaaggtataaaacatggatgaggaggcttgtttttaaaagataatactagagagccgttaggtactaagaaccagaaatagactcacataaatggccaattgatttttgacaggggcaaaagcaattcaatggaggagggatcgccttttcagcaaatactgttggagtaattggatatccataggcagtaaaccaacaacttcaggacctaggactgagctaagaaggctcagatgactcaaaagcatgctccttagaaggaaaaaaaatgttaaattggacttcatcaaaattaagataatttaccctgtaagagacctttttacaaagatgatattacaggttgggaaaaaatatttgcaaatcatatccaacaagggatttgtatgtaaactacataaagaactttccaaatttaacagtaataagtaaatacaattagaaaataagcaaaagacagacatttcactgaagtatagatagcaaataagcaaatgaaaagatgttcaacatcattaggcatgagggaaatgcagagtaaaatcgtgagatatcacctatcagaatagcttaactttttttttttaatggtggtaactgctggcaaggatgaagagaaacaggatctcatacattgctgggaatgtaaaatggtacagccactctggaatataatttggcagtttcttgtaaaaccacacatgtatatgtcatgcttcaggaattgcacttctgagcatttatcccagagaaatgaaaacttgcgttcacacaaaaacctgtatacgaatgttcatagcagctttatttgtaatggtcgaaacctgtaggcaacccatatatccttccttaggtggttaaaacaaattgtggtttatgtattaccatggaatacttgttactctgcaataaaattgacttattgatatccataacaactcaaataaatttcaagggaattaatgctgagtgaaaataatcacaaaaggccatattctgtatgaaaatattcatataacattctcaaaatgataaaactatagagatgaaaaatggattaatggttgccaaaggttagggatggtgggaggaaaaatggggagagggttggatggaactattaaaaggtagcaccagaaaggtctttgtggtgatggaacacttgtgtatcttgattgcagtggtggttacacaaatctataggtgctatacctatacacacatactgtaccaatgttgatttcctttttcattttatgtaagatgtaaccatgaggggaaagtgggtgaagggtgctatctttgcaacttcctgtgattctatcatttcaaaataaaaagtaaaaaccaacaatggcaacgaaaacccaaaactaaagagctgtaaccaactaaagtgtgtgaaactgatttgaaaaaaagttataaaatacatgttttaggacagttgggaaatttgaatatgactggttattagatggtattagggaatttttgttgattttcttacctgtgacggtggtggtagtttgaagaatattcttaatcttaagggatgcatgttgaagtatttggaatgaagtgttctgatgtttacaactttcaaaaaaatgattttaaatatgtattgagagatcaggcaaacatagcaaaatgttcattgttgagtccacatggaaaatacgggtattcaatgtgccatactttcaactcttctgtactctgatattttcaaaataaaacatttgaggggaaattaaaaa

SEQ ID NO: 24840 - DNA, 2481 bp, Homo Sapiens
atggcggagccctcggccccggagagcaagcacaagtcgtccctcaactcgtccccgtggagtggcctcatggccctgggaaacagccggcacggccaccacgggcccggggcccagtgcgcgcacaaggcggcgggcggcgcggcgccgccgaagccggccccggcggggctgtccggggggctgtcgcagccggctgggtggcagtcgcttctctccttcaccatcctcttcctggcctggcttgccggcttcagctcgcgcctcttcgccgtcatccgcttcgaaagcatcatccacgagttcgacccgtggtttaactatagatcaacacatcatcttgcatctcatgggttctatgaatttttaaattggtttgatgaaagagcatggtatccactaggaagaatagtaggtggtactgtttacccagggttgatgataaccgctggccttattcattggattttaaatacattgaacataactgttcacataagagacgtatgtgtgttccttgcaccaacttttagcggccttacatctatatctactttcctgcttacaagagaactttggaaccaaggagcaggacttttagctgcttgttttattgctattgtaccaggctacatatctcggtcagtagctggatcctttgataatgaaggcattgctatttttgcacttcagttcacatactatttatgggtaaaatctgtaaaaactgggtcagttttttggacaatgtgctgctgcttatcctatttctatatggtctctgcttggggtggttatgtatttatcatcaatcttattccactgcatgtatttgtgttgttactgatgcagagatacagcaaaagagtctacatagcatatagcactttctacattgtgggtttaatattatcaatgcagataccttttgtgggattccagccaatcagaacaagtgaacacatggcagctgcaggtgtctttgcattgctgcaagcttatgctttcttgcagtatctgagagaccgattaacaaaacaagagttccagacccttttctttttgggtgtatcactagctgcaggtgctgtgttccttagtgtcatctatttgacttatacaggttacattgcaccatggagtggcaggttttattcattgtgggatactgggtatgcaaaaatacacattccaattattgcatcagtgtctgagcatcaacctacgacttgggtgtctttcttctttgatctacatattcttgtatgtaccttcccagcaggcctttggttctgcatcaaaaatatcaacgatgaaagagtatttgttgctctatatgcaatcagtgctgtctactttgctggagtgatggtgcgactgatgttgactttgactccagtcgtgtgtatgctgtctgcaattgccttttcaaatgtttttgagcactatttgggggatgacatgaaaagggaaaatccacctgtggaggacagcagtgatgaggatgacaaaagaaaccaaggaaatttgtatgataaggcaggtaaagtgaggaaacatgcaactgaacaggaaaaaactgaagagggattaggccctaatataaaaagcattgtcaccatgttgatgctgatgctattgatgatgtttgctgtccactgtacctgggtcacaagcaatgcctactctagtccaagtgtagtcctggcctcatacaatcatgatggcaccaggaatatcttagatgattttagagaagcttacttttggctaaggcaaaatacagatgaacatgcacgagtaatgtcttggtgggattatggctatcagatagctggaatggctaatagaactacgttggtggataataacacctggaataacagccacatagcactggtgggaaaagctatgtcttctaatgaaacagcagcctataaaatcatgaggactctagatgtagattatgttttggttatttttggaggggttattggctattctggtgatgatatcaacaaatttctctggatggttaggatagctgaaggagaacatcccaaagacattcgggaaagtgactattttaccccacagggagaattccgtgtagacaaagcaggatcccctactttgttgaattgccttatgtataaaatgtcatactacagatttggagaaatgcagctggattttcgtacacccccaggttttgaccgaacacgtaatgctgagattggaaataaggacattaaattcaaacatttggaagaagcctttacatcagaacactggcttgttaggatatataaagtaaaagcacctgataacagggagacattagatcacaaacctcgagtcaccaacattttcccaaaacagaagtatttgtcaaagaagactaccaaaaggaagcgtggctacattaaaaataagctggtttttaagaaaggcaagaaaatatctaagaagactgtttaa

SEQ ID NO: 24841 - DNA, 1717 bp, Homo Sapiens
agcggaggtgagcggggacctcgggggagcggggctccgcgtggcaagggcgcagtgtcccccggagagaatttccccgcagaagtggccgagctgccttctcggccggtacgtgagggaagggggcacttgggggcgcaagcatgtgtctgggtgtctacaccgagcagggtgtttgcgcacgtccgggtgtgagtcgtgggagcccgtggccacaccagcctcctgggctgacgcggaagagagctccttcatcctgcctcagtttccttaggactcagagaaagggagaagaggcagaaggcccctcgcattggcacaagctgtatcccattgcccagggagatcgccaatcacccatcaatatcatctccagccaggctgtgtactctcccagcctgcaaccactggagctttcctatgaggcctgcatgtccctcagcatcaccaacaatggccactctgtccaggtagacttcaatgacagcgatgaccgaaccgtggtgactgggggccccctggaagggccctaccgcctcaagcagtttcacttccactggggcaagaagcacgatgtgggttctgagcacacggtggacggcaagtccttccccagcgagctgcatctggttcactggaatgccaagaagtacagcacttttggggaggcggcctcagcacctgatggcctggctgtggttggtgtttttttggagacaggagacgagcaccccagcatgaatcgtctgacagatgcgctctacatggtccggttcaagggcaccaaagcccagttcagctgcttcaaccccaagtgcctcctgcctgccagccggcactactggacctacccgggctctctgacgactcccccactcagtgagagtgtcacctggattgtgctccgggagcccatctgcatctctgaaaggcagatggggaagttccggagcctgctttttacctcggaggacgatgagaggatccacatggtgaacaacttccggccaccacagccactgaagggccgcgtggtaaaggcctccttccgggcctgagctgcccatctgcctagccggccactagggcaccatcttctcaagggcttccatgtcagcagacaccaaaccatctgaggcttcctccctggggggtgctggggaccctccttcagccagtttgctccttggtcaccctggaggcttctggatgggacccttgagtctggggcacccttcagctgccctggggacaggaaggacaggagctaagcagggtccaagcctggggctgcctctgctctccaagacccaaagaccctgggaacctcctctggtcttccccactggcagtggcagcagccccaccccgagcgcacactgtgatggaggagactgagctccctggggcgggcagctgacactaccagagagactcaagcaataattagaggtgggcagagctgccctctcggcattacctcttctgcaggctctgccatgcacgcacctcactgccaggccattaaaatcagcacccagcatgctggaggtgacgtggccttctccctccagccacctgctgccacgggcaggccctggctatagcttatacagtatctccccttgtccccacccagtcaccaaagccacctacatgacagtccatccctgttgaattaataaattaatgtatccatgcaacaaaaaaaaaaaaa

SEQ ID NO: 24842 - DNA, 1344 bp, Homo Sapiens
atgagccggcgcccctgcagctgcgccctacggccaccccgctgctcctgcagcgccagccccagcgcagtgacagccgccgggcgccctcgaccctcggatagttgtaaagaagaaagttctaccctttctgtcaaaatgaagtgtgattttaattgtaaccatgttcattccggacttaaactggtaaaacctgatgacattggaagactagtttcctacacccctgcatatctggaaggttcctgtaaagactgcattaaagactatgaaaggctgtcatgtattgggtcaccgattgtgagccctaggattgtacaacttgaaactgaaagcaagcgcttgcataacaaggaaaatcaacatgtgcaacagacacttaatagtacaaatgaaatagaagcactagagaccagtagactttatgaagacagtggctattcctcattttctctacaaagtggcctcagtgaacatgaagaaggtagcctcctggaggagaatttcggtgacagtctacaatcctgcctgctacaaatacaaagcccagaccaatatcccaacaaaaacttgctgccagttcttcattttgaaaaagtggtttgttcaacattaaaaaagaatgcaaaacgaaatcctaaagtagatcgggagatgctgaaggaaattatagccagaggaaattttagactgcagaatataattggcagaaaaatgggcctagaatgtgtagatattctcagcgaactctttcgaaggggactcagacatgtcttagcaactattttagcacaactcagtgacatggacttaatcaatgtgtctaaagtgagcacaacttggaagaagatcctagaagatgataagggggcattccagttgtacagtaaagcaatacaaagagttaccgaaaacaacaataaattttcacctcatgcttcaaccagagaatatgttatgttcagaaccccactggcttctgttcagaaatcagcagcccagacttctctcaaaaaagatgctcaaaccaagttatccaatcaaggtgatcagaaaggttctacttatagtcgacacaatgaattctctgaggttgccaagacattgaaaaagaacgaaagcctcaaagcctgtattcgctgtaattcacctgcaaaatatgattgctatttacaacgggcaacctgcaaacgagaaggctgtggatttgattattgtacgaagtgtctctgtaattatcatactactaaagactgttcagatggcaagctcctcaaagccagttgtaaaataggtcccctgcctggtacaaagaaaagcaaaaagaatttacgaagattgtga

SEQ ID NO: 24843 - DNA, 3244 bp, Homo Sapiens
gcggccgccgccatgtcggtgctgggcgagtacgagcgacactgcgattccatcaactcggactttgggagcgagtccgggggttgcggggactcgagtccggggcctagcgccagtcaggggccgcgagccggcggcggcgcggcggagcaggaggaactgcactacatccccatccgcgtcctgggccgcggcgccttcggggaagccacgctgtaccgccgcaccgaggatgactcactggttgtgtggaaggaagtcgatttgacccggctgtctgagaaggaacgtcgtgatgccttgaatgagatagttattctggcactgctgcagcacgacaacattattgcctactacaatcacttcatggacaataccacgctgctgattgagctggaatattgtaatggagggaacctgtatgacaaaatccttcgtcagaaggacaagttgtttgaggaagagatggtggtgtggtacctatttcagattgtttcagcagtgagctgcatccataaagctggaatccttcatagagatataaagacattaaatatttttctgaccaaggcaaacctgataaaacttggagattatggcctagcaaagaaacttaattctgagtattccatggctgagacgcttgtgggaaccccatattacatgtctccagagctctgtcaaggagtaaagtacaatttcaagtctgatatctgggcagttggctgcgtcatttttgaactgcttaccttaaagaggacgtttgatgctacaaacccacttaacctgtgtgtgaagatcgtgcaaggaattcgggccatggaagttgactctagccagtactctttggaattgatccaaatggttcattcgtgccttgaccaggatcctgagcagagacctactgcagatgaacttctagatcgccctcttctcaggaaacgcaggagagagatggaggaaaaagtcactctgcttaatgcacctacaaagagaccaaggtcaagcactgtgactgaagcacccattgctgtagtaacatcacgaaccagtgaagtctatatttggggtggtggaaaatccaccccccagaaactggatgttatcaagagtggctgtagtgcccggcaggtctgtgcagggaatacccactttgctgtggtcacagtggagaaggaactgtacacttgggtgaacatgcaaggaggcactaaactccatggtcagctgggccatggagacaaagcctcctatcgacagccaaagcatgtggaaaagttgcaaggcaaagctatccatcaggtgtcatgtggtgatgatttcactgtctgtgtgactgatgagggtcagctctatgccttcggatcagattattatggctgcatgggggtggacaaagttgctggccctgaagtgctagaacccatgcagctgaacttcttcctcagcaatccagtggagcaggtctcctgtggagataatcatgtggtggttctgacacgaaacaaggaagtctattcttggggctgtggcgaatatggacgactgggtttggattcagaagaggattattatacaccacaaaaggtggatgttcccaaggccttgattattgttgcagttcaatgtggctgtgatgggacatttctgttgacccagtcaggcaaagtgctggcctgtggactcaatgaattcaataagctgggtctgaatcagtgcatgtcgggaattatcaaccatgaagcataccatgaagttccctacacaacgtcctttaccttggccaaacagttgtccttttataagatccgtaccattgccccaggcaagactcacacagctgctattgatgagcgaggccggctgctgacctttggctgcaacaagtgtgggcagctgggcgttgggaactacaagaagcgtctgggaatcaacctgttggggggaccccttggtgggaagcaagtgatcagggtctcctgcggtgatgagtttaccattgctgccactgatgataatcacatttttgcctggggcaatggtggtaatggccgcctggcaatgacccccacagagagaccacatggctctgatatctgtacctcatggcctcggcctatttttggatctctgcatcatgtcccggacctgtcttgccgtggatggcataccattctcatcgttgagaaagtattgaattctaagaccatccgttccaatagcagtggcttatccattggaactgtgtttcagagctctagcccgggaggaggcggcgggggcggcggtggtgaagaagaggacagtcagcaggaatctgaaactcctgacccaagtggaggcttccgaggaacaatggaagcagaccgaggaatggaaggtttaatcagtcccacagaggccatggggaacagtaatggggccagcagctcctgtcctggctggcttcgaaaggagctggaaaatgcagaatttatccccatgcctgacagcccatctcctctcagtgcagcgttttcagaatctgagaaagataccctgccctatgaagagctgcaaggactcaaagtggcctctgaagctcctttggaacacaaaccccaagtagaagcctcgtcacctcggctgaatcctgcagtaacctgtgctgggaagggaacaccactgactcctcctgcgtgtgcgtgcagctctctgcaggtggaggttgagagattgcagggtctggtgttaaagtgtctggctgaacaacagaagctacagcaagaaaacctccagatttttacccaactgcagaagttgaacaagaaattagaaggagggcagcaggtggggatgcattccaaaggaactcagacagcaaaggaagagatggaaatggatccaaagcctgacttagattcagattccgggtgcctcctgggaacagactcctgtagacccagcctctagtctcctgagcctatagagcccccaggagactgggacccaaagaacttcacagcacacttaccgaatgcagagagcagctttcctggctttgttcacttgcagaaaaggagcgcaaggcagaggctctgaagcactttccttgtacatttggagagtggcattgccttttagataggatctaggagtgattttattgttttggagaatggaagggcccccatggccctggctttgtcatcagtgactgccatagcaacagcagctctgtacctcatctgttgatcccaccttt

SEQ ID NO: 24844 - DNA, 1646 bp, Homo Sapiens
ggcggcgcgggaacctgacaccgaggatgaataaatgatgctcgctgactacccgtggccaaagcccgtggccaccgagcgccggctggcaggggcagtgaccggcggccggcccgttcgtccctgggctccgcaagcggcgcggtggcacgaagatggcggggtggccgggcgcgggtcccctctgcgtgctgggcggcgccgcactcggggtgtgcctcgcgggggttgccgggcagctggtggagcccagcacggccccacccaagcccaagccgcctccgctgaccaaggagacagtggtgttctgggacatgcgcctgtggcacgtggtgggcatcttttcgctcttcgtgttgtccatcatcatcacgctgtgctgtgtcttcaactgtcgtgtgccacggacccggaaggagatcgaagcccggtacctgcagcgaaaggcagccaagatgtacacagacaagctggagactgtgccacccctcaatgagctcacagaagtcccaggagaggataagaagaagaagaagaagaagaaggacagtgtggacacagtggccatcaaagtagaggaggatgagaagaatgaggccaagaagaagaaaggagagaaatgaagacatcctgggcagcttgggctggcgggccctggagctcaagccgtggccggggtccaggcatgttggactctgagctcatttggggaccacagaggctgtggtcagagagggaagctgaggcccatggccacatcctcatggcccatcaggggcaggaaccagacaatctcgtaggtgtcctgccccccagcctaggcttggctcctttcaccccatccacatgggtactgtctcggcagaggtggtctggtgccaccgtccctctgcagatacactgctctccccacccagacctgcctgtctcccaccctttctgccagggatggcagtggctgtgaaggagtaatgggatatggggttacttcagccaccctttctggcacgaaatggctgaagtgcatgggtcagggtgtgaggccacacccagagtagccatgaggaggcagagagggtcactgggggacactgtggcagcaggagggactctgtctggccagggaggagccccagtggtgagaagacttccccaagcctggcaggggatccagctcaagggagtaagtagaggtggcttcagaaatggaacccccagcccagcagacatcaagctcaaggcaatgggctaccctcatttcacacgttgtgatgaagctgaggctgctgccaggcccggcatgaggccccgaggctcgagctcggggctgggggctgcagggctgggtcaggggtacacagagctaaggccaatgggctagagggtgccggaaagagagctggagtctgggctcctcttgggaatcagagtatatttaagaagccaagggggacctcgggctgttctggtggccccttctatgcccagctgtgctgggaggtcccagggccctagaagatcacagcagggccttctgcctgctgaccataacagtgccagcttctttgcagcttcctcttctaccatttcccactacgggcacctaaaagaagcatctctgaccagaagacaaaggcccaaatagc

SEQ ID NO: 24845 - DNA, 2454 bp, Homo Sapiens
ggctgtgggaataagatggcggggaagaagaatgttctgtcgtctctcgcagtttacgcggaagattcagagcccgagtctgatggcgaggctggaatcgaggcggtgggcagcgcggctgaggagaaaggcggattggtatctgatgcctatggggaggatgacttttctcgtctagggggtgatgaagatggttatgaagaagaagaagatgagaacagtagacagtcggaagatgacgattcagagactgaaaaacctgaggctgatgacccaaaggataatacagaagcagaaaagcgagacccccaggaactcgtggcctccttttctgaaagagttcggaacatgtcgcctgatgaaatcaagatcccgccagaaccccctggcagatgttcaaatcacttgcaagacaagatccagaagctttatgaacgaaagataaaggagggaatggatatgaactacattatccaaaggaagaaagaatttcggaaccctagcatctacgagaagctgatccagttctgtgccattgacgagcttggcaccaactacccaaaggatatgtttgatccccatggctggtctgaggactcctactatgaggcattagccaaggcccagaaaattgagatggacaaattggaaaaggccaaaaaggagcgaacaaaaattgagtttgtgacgggcaccaaaaaaggcaccacgaccaacgccacgtccaccaccactaccactgccagcacagctgttgcagatgctcagaagagaaagagcaagtgggattcggctatcccagtgacaacgatagcccagcccaccatcctcaccaccacagccaccctgccagctgttgtcacggtcaccaccagcgccagcggctccaagaccaccgtcatctctgctgtgggcaccattgtgaagaaggccaagcagtgacctgaggggccaccctaggacttgaaaggaccgtgcagcccagtgaccactgcccagtgggaggcgccactttgtatatttcaggactgggacctactccccagatgccacctgagaggagcttctgtttggcattccagatggaaggacaggcagcacgggagccaggcgctgtggacagggtctgtccacgcaccacctggggtctgccgcctattaaaagtgccgtattcttacctcttggcatctcagatgcactggcctctcctgcattctgtttgcaggcaaatgcttcagctcacatgtcccccaagactcaatagtcttggttgggactattgcctcagggttgacaacagggtgatggaggcctgggacgctgttcagaggggtgacccaagaagtcaccgttgttatccgtgtatgcctctgggcatggacaggcgggagtccccgagccccacgtatgccccatctgccgccttgatcccaaaacccagccagttctcgggtgatggtggagctgtgctcccttgagtgcacttgagcactccccagaccagatcactttttggacacacccaggaaggcttttgaagtcaagccagtttccagaagggctggggtgagatcctgacctgtgcagagagtggggaggcgtcagcgcctggccagggctgccccagtcctttggtgcccggtgagcgcagccagcaggagctgagcagcgggggagatgaatcacctcctgccttggcgaggcggcagctcattgtttacaggcaagccctgctcctgggagggctcctgccaccccacccttcctctgtgtgttatctctgccccacagcagcccctgggcagcaccagtggccactgggctccccccggggttgaaacgggtttcccagaccaggggttcagaggagactatttacccttcatgatctttggcgattctccactggagcggaagggctgtgtgtcaaaagaaggaagccaggctgtgaagggccgtgttgctttcagtgggtgggcagaggtttagaaaggtggttctgaaatggcacctggtactcttgtgggacctggggaatataaggaactctgtgcatgaggtttcaaaaataaaaattgagtccactctccccgtacacacacactcgggcacttcaggaggtcagttctcaccccttcctcgatggggctttaaagctctggggagaagagctgctccccactcatgccccagagggactgtgaaaaggcttcctgtgacctccgatggcggcccctcattggccaagggcactgtggatgttttgtgggaggcagcatggcaccgtggaaagggcagtagacgtggagccggcacctctggtctggattccacttaaaaccagttgagtggtctcaagcccttaacctctgtaagcctgtttcttctctgaaatcacagtaataaagcgtcgtaagatggttgggaagaaaaaaaaaaaaaaaaaaaaaaaa

SEQ ID NO: 24846 - DNA, 5886 bp, Homo Sapiens
gcaagaatcggcacgaggctgttgagctgtcctgggctgggtgccttgctctttgactgagactggagacagacggcaacagccacaggcagactgaggtggcaataggaaatctgccgagatgttcagtcaggtgcccaggaccccagcctcaggctgctactacctaaattccatgacacctgagggccaggagatgtacttgcgatttgatcagactacaagacgctctccttacaggatgagccggattctagcacgccatcagctagtgactaaaattcaacaagaaattgaggcaaaagaagcatgtgactggctccgtgctgccgggttcccgcaatacgctcagttatatgaggattcacaatttcccatcaacattgtggctgtcaagaatgatcatgattttcttgaaaaggaccttgtagaacctctttgcagacgactaaatacgttgaacaagtgtgcctcaatgaaacttgatgtgaacttccaaaggaaaaagggtgacgactccgatgaggaagatctttgtatcagcaacaaatggactttccaaagaaccagtcgcaggtggtctcgtgtggacgacctctacacgctgctccctcgaggagacagaaatgggtcaccgggaggcacggggatgaggaacacgaccagcagtgagagcgtcctcacagacctgagcgagcctgaggtctgctccattcacagcgaaagcagtggaggcagcgacagtcgcagccagccgggccagtgctgtacagacaacccggtcatgctggatgccccactcgtcagcagcagcctcccacagccccccagagatgtcctcaaccaccccttccaccccaagaatgagaagcccacgagggctagggccaaatcatttttgaaacgcatggaaacactccgagggaagggagcccacgggaggcataaggggtctgggcggacaggtggcctggtgatcagtgggcccatgttgcagcaggagccagagtcctttaaggctatgcagtgcatccaaataccaaatggagatctccagaattcgccgccacctgcctgcagaaaagggctcccatgctctggcaagtcgagtggcgagagcagcccgtcggagcacagcagcagcggggtgagcacgccctgcctgaaggaacgcaagtgccacgaggccaacaagcgcgggggcatgtacttggaggacctagatgtgctggcggggacagcactgccggatgcaggggaccaaagccgtatgcatgagtttcactcccaagagaatttggtggtgcatattcccaaggatcacaaaccaggaacattccccaaggcactttctattgaaagcctctctcccacagatagtagcaatggggttaattggaggaccggtagcatctccctgggcagagagcaggtccctggtgccagggagccccggctcatggcgtcctgccacagagccagccgagtcagtatctatgacaatgtccctggctcccatctgtatgccagcacaggagatcttttggacttggagaaagatgaccttttccctcacttggatgacattctgcagcatgtcaatgggctccaagaggtagtcgatgactggtccaaagatgtcttgcctgaactgcaaactcatgatacattggttggggaacctggcttatccacctttccatctcctaatcagatcaccttagattttgaaggtaactctgtctcagaaggtcggacgacacccagtgatgtggaaagagatgtaacatctcttaatgaatctgagcctcctggggtcagagacaggagggattctggtgtaggggcctctctgaccaggccaaacaggcgactccgatggaacagtttccagctgtcgcaccagccccggccggccccagcatcgccccacatcagcagccagacggccagccagctgagcctgctccagcgcttctcactgctccgcctcacggccatcatggagaagcactccatgtccaacaagcacggctggacatggtcagttccaaagttcatgaagaggatgaaagttcccgactacaaagacaaggctgtctttggcgttcctctcatagtccacgtccaaagaacgggacagcccctgcctcaaagtattcagcaagcactgagatatctacgcagcaactgcctcgatcaggtgggtctttttcgcaaatcaggagtgaagtctcgaatccatgcccttcgccaaatgaatgaaaacttccctgagaacgtcaactatgaagaccagtctgcttatgatgtggcggatatggtgaaacagttcttccgggacctccctgagcctcttttcaccaacaagctcagtgagacctttctccatatctatcagtatgtctccaaagagcagcggctgcaggccgtgcaggctgccatcctgctactggccgatgagaacagggaggtcctgcagacgctcttgtgtttcctgaacgacgtcgtcaacttggtggaagagaatcagatgacgcccatgaacctggcagtgtgtctggccccctccctctttcatcttaatttattgaagaaagaaagctctccacgagtcatacagaagaaatatgccactgggaagccagatcaaaaggacctcaacgagaatctggcagcagctcaggggctagcgcacatgatcatggaatgcgacagactttttgaggttccacacgagttggtggcccagtctcgtaactcgtatgtggaggctgagatccacgtgccaaccctggaagaattggggacacagctggaggagagtggggcaactttccacacttacctgaaccatctcatccagggcctccagaaagaagccaaggagaagttcaaaggatgggtcacgtgctccagcacggacaatacagatcttgctttcaaaaaggtgggcgacgggaacccgctgaagctgtggaaggcttctgtggaggtggaagcacccccctcagtggtcctgaaccgcgtgctgagagagcgccacctgtgggacgaggactttgtgcagtggaaggttgtggaaactctagacaggcaaacagagatctaccagtatgtgctgaacagcatggctccccatccttccagagactttgtggttctcaggacctggaaaactgatttgcccaaaggaatgtgtaccctggtgtccctctccgtggagcatgaggaagcccagctcctgggtggtgtgcgagcagtggtgatggactcgcagtacttgatagaaccgtgtggctctggcaagtcaagactgactcacatctgcaggatagacctgaaaggtcactccccagaatggtacagcaaaggctttggacatctgtgtgcagcagaagttgccaggattagaaactctttccagcccctcattgctgagggcccagaaactaaaatctgagttttgcccagtgtgacatcaaactcagggaagaggaagctaaagtgacgagtgtggcagagagtgtgcatgtgagaaagcgagagaaagaggaactgaaggacgcggttaatgcctaaaaatggaaacgttaagaagttggaatgttggagatgcaagaatttccaagaactttcttagccttcctggagatggctacatccctactaatataattttaaaatgagaactttatatatattacttaaaattaaatggactattccttgtgcattgcctaatttgctatttaaaggcttctaagaagcgtatacctaactgtaaataaatgtatgtatagcatatgtacatatgtgtgtatatctccatctttactgtatatatgtaaaataccaattttatatagaattgtgtgttttgaaaatgacggtgtctgactcagtgagtcccttcctcacacagttctttccaagtggctctgggccccatctctccactgtcctgtaagctgtgcagaacctgctgctaacaccaaggtgtgaacatgccctgatgcctaaccaaagatgagttaaccaaaggaaaataacattaaaggagacttatgtgttaacgctttgtttctgctattcaaaaactgagagtggagatctgggataaagcaaggaaataataattactcctccttaaagcaaatgggggggtgagaagtcattaccaaatttaaagctagatgaggagttgccactgggcccagtaagatggaatttcagtgagatatggaccaccggagtcagcgagagtgactgaaacagaagcgatacctctcgctcccatgcccatcactacagaccccaagtcaagatgaatatcatagcctttacttcttcacagccaaagggagcccctgtgttgtctcaagtttttataaatacatttcataatgttattaaatgtcattctatttgaccagtggcctatttggtcacagttaattggtgttttcttattgcactgaattcaactccagacaccatacaaagggagatgatggccattccgttcaaatcctagatcgttacagcttcagggaattcatattttgttatgtgtaggatactcttaaaatgtaattcattaaacttttacaatctgaaagacagggtttttaactaacatgagaccaaaactatgttctttgattagttttagatagtataatcgggtttattaattcttctgtgtttcttcactagccagtccaagctacctatgcatttgacccaaccttatttattattgtacagatgaagcgaattgactccctttagccaactgctaatggatcgaatgtgctttttattgtaattcaacagctatagagagaaagataacttattgtgtgtttgatttcagggagagagattttctttggtcatccataatagagattgataagatttagcaactggtgttggagaaaaaaagaaaagcaaatgagtgttttcaggtttttttgcattatatgcatttatgtaatgtttctgttatcagcaatgtgcaattattttattgagaggaataaaaaagctttctatgagtttggtatggtgcgaggaaaatcttacagtttgaattatgacctagaaatttttcattcccatgtctacctaagaaggaagcagtaaatccataatttaccttttgggcaatgctttgtgagcaaaacaaagtcacttctgccataacatcttgaatgtaaccatatatgccagattactttatatgcatcaacaagatcaccagtgaagtttaatctagctaaacactggtcctgctcctgagatgggatcctatgtgtttggaaaacgtgataggcacacgaggatgagtggctttgtatcgcccagagaggtgcttgtccagatttcacatgcacatgaattgcctggggatcttgtgaaactgcagactctgctccaagtaatctgggctgggcctgagattctgcatttctaaggagtctcagggatgcctatgctgctggcctaaaaccacactcagaaacgaggacctagaagatccctaaaacagaataagaacaaatgtgattgtatttctgattctccctctcttcgaattatctgacttttttgtttttgtgcacatagtaatcatatcaccgctgcataacaacacagtgcatctttttaaaacaaggaaaagggaaaaaaaggagaaaaaacgatgcatcaagcttgtttgtcaaataccacagtattttattcattgttatcttgccaatggaaataaagtatgatattgcatttaaatattatatttatacctcatgtatatttttacctcaattgttgatatcaatcatcaattgtaaataaataattgccaaggcaaataaattt

SEQ ID NO: 24847 - DNA, 26757 bp, Homo Sapiens
tgttgactaggctggtcttcaacgcctgacctcaggtgatccgcccgcctcggcatcccaaagtgctgggattacaggcgtgagccactgcgcccggcctctcatagtctcttagctttctaaaatttgaaaaatcctgtaaagacacacctgggtcaaagggctcagataacggactgtggcccttaagtacttacgtcacaggttattgagaggatcgatttagttaccagatgtaaaatgctgggatcagtgcctggcaaaggaaaactttgtacagctgcaggctttcaccatacacaacagcatcgctaacgaatgctattacaatattcatttagcgtttaccaagtgcctactctatacaaatcttgagaatacaacgtgaaggtgaactgctgactaaagtttggtccctttcgctccgtctccttgcgaaaatgctctaacggcaggaggtcacgcgagcgctggacgcgtttctccccgcgagcccctttccgaggcctttcgggtccccccggttatccccgcccgggcggtgcgcgcccccgctgttcccgcttccgctccagagaggcagggctttccgagcctgctagccccgcggccgcaactaaccccgggtcggagtgttccggcccggccagccccgcggcgtgagggaaggggagctcagcagttccccgcgcggggcccaggcgtcggcggcagggcgggcccctcaccgccagcgtgccagccccgcccctacccaccagtgtgccagccccgcccttccccacgtcgccgcgcgcccgggggcggggcctggcgcgcaccgcccgcgcacggcgaggcgcctgttgattggccactggggcccgggttcctccggcggagcgcgcctccccccagatttcccgccagcaggagccgcgcggtagatgcggtgcttttaggagctccgtccgacagaacggttgggccttgccggctgtcggtatgtcgcgacagagcaccctgtacagcttcttccccaagtctccggcgctgagtgatgccaacaaggcctcggccagggcctcacgcgaaggcggccgtgccgccgctgcccccggggcctctccttccccaggcggggatgcggcctggagcgaggctgggcctgggcccaggcccttggcgcgctccgcgtcaccgcccaaggcgaagaacctcaacggagggctgcggagatcggtagcgcctgctgcccccaccaggtagcggggtgggggtggggtcgaaggcgggggcatagcggcggggcgcttggaacccggcgaggggaggctcgcacagggggttgggggggtgcacggcctggccctgggctcggaggaggcggggccgcagagttggcttgaatgagtgcaggggtcgagtctggagcatttgggggtgtagcttgtaaacagggtcggaggagagaggctgtgcaggaagagggctgcaggggagacgcggagagttcgggccttttggagggaggagacgcgtcccgccaggtgggggtgctgggctaaggaaggggcgacgcgcgcagctccgggtggggagggggcctgggaggtgggagcactgggggtggggcgagaaggggaaggcgcccggcccacttggtgggcggggcggggggccggggtggcgggaaggaggaatgcctgcgggaggccgaacggggagagtccggtggtgtggggtgcgaaaggaggttcctcggccggcgcggagatagtgagttggggctccagtagtcgatcgaggtagacacttagaggtagttaagagccgcggtcgccgagacgccttggggacggtgggccttcggcctaggtgaggggccgccgagggggtgggccacgagctgcgagcgcgggggggtgtgtcaccatggggaccgcggggcctaattgggcggggcggggccgtggggagccgaagtgctgggatccggctgggtccttcggtaggtaggctgcacgtgcaccgagacgaagatagaatattttgacgtatgtggaaattcgtgtcgagtggaaaatattttattttatgaaatagtgtaatttttatggggcaccactgggcttttagaggccttaatcgggcgctggacaaagatgtgtggacgtgagtgactccggggaagcctgtcgggagttgtcctcactttatgggcagttaagtgcttttttttttttttcctttttgagagagagtttcgctcaagtccaggctggagtgcaatggcgcgatctcagctcaccgcaatctccgcgtcccggcttcaagcgattccccagcttcagcctcccgagtagtcgggattacaggaatgcgcccccacaccccgccaattttgtatttttagtagagacggggtttctccatgttggtcaggctagtctcggaattcccgacctcaggtgatccacccgcctcggcctcaaagtgctgggattacaggcgctagccaccgcgcccggtctgtttagggctttttatccgggcagctggcgacattttgaaaagcttgcttttgctgtttgccagatacatatatatgtattttgagacagagtcttgctcttttgtccaggctagagtgcagtggcgcgttcttggctcaccacaacctctgtctctggatcaagagattatcctgcctcagcctcccaagtagctgggactacaggtgcgccccaccacgcctggctaatttttgtatttttagtagagacgggtttcactatgttggccaggctggtatcgaactcctgacctcttgatcggcccgcattggcctaccaaagtgctgggattacaggcatgaaccaccgagcccggccgtttgtcagatactaaacacaaagtttaatggtcgctatttgaacaaacgaagaaataaaggctcagaaaaaataactcattcaagataagagccagttcgtgttttttgtttggttttgttttgaaatggagtctcgctctgtcgcccaggctggagtgctgtggcgctttctcggctcactgcaacctctgcccgccgggttcaagtgattctcctgcctcagcttcccgagtagctgggattacgggtgtgcccaccgcggtcggtccggctgatttttcaccatggagtttcaccatgttggccaggctggtcttgaaactgctgacctcaagtggtccacccacttcagcctcccaaagtgctgggattacaggtgtgagccaccgtgcccggccgctagttagtggttttgagtaatggatttcaaatccatttaaatccagtttaaagtgtcctaaaggaattctgagatttttctaagtgtaattatagtgttacccttgtttaagcgaccctttcccgcagtttaaatatatatagttgtgcattagtagaatatgcttgtggggaacagagccagcatccgcaataacaaactcctggttagaaaagcatgacgtattgtttacttgagcatgaattgattgttgaatccaaaccaaacgggtgtatttattgtaaggatgtactttacattcatattgaatagcgtatgttatttgtttcttgaggttgagtttaagagacttgtaaaaataaaacgtatacatttcacctcccgttatggagaggattccagggtattcaagaaagatgggcatttgatactaggtttctaaagaaactgcagtgtctagatcactctgccgagcacagcattaggcattatggatcctggatacaaccatgaacaggacaaagcaaagaggcaattgtagactcccaagtggaaaggggacggagaggatgcgggtcaggctaggctctcagctctgtaaaccgaaaccagaaggacaaataagcttagacagattatagtgagagtgggaagctggttcaggaagaggaaggtctgcaaattgtgggtaggatgaaaggaggaggagggagcattggagaagttaagcagagatccaatcatgaacagtctgatgagctacagagacattcggacttactccatgaatcatttaagccttaaaacatgttgagcgtattttttttttttttgagacggaatttcactcttgttgcccaagctggagtgcagtggtgtggtctcagctcactgcaacctccgcctcctgggttccagcgattctcctgcctcatcctctcaagtacctggtattacaggtgcctgccaccacgcccagctaatttttgtgtttatagtagagacggggtttcaccatgttggtcaggccagtcgtgaactcctgacctcaggtgatccacccacctcagcctcccaaagtgttgggattacaggcgtgaaccaccgcacctggccgtgagccaccgtgtctgtccgagcatcttttaatgtttgtcatttagatttcttcttgtgctgaagtgtttgtcttttgctgtttcttttttttttcctagttctttgtcatttgtgtgtgatataaatgtcttctttcacaatgagttctttcatttagtttatggctttgttgttgttgttgaataatagaggtctcactttgttgcccaggctggtgttgaactcttgctctcaagcgatcctcccacttcagcctcccaacctgttgggattacaagtgtgagccaccacacccagccttatggcatctttcgatgaacaaattattgattataatgtggaatttgtccttttattttctctgtggttagtgtttctataggttttatttaagaaatccacagggaggctgggtgcagtggctcatgcctgtaaacccaacactttgggaggccaaggcaggccaacatggctagaccctgtctctccaaaaaataagaaaattagccaggcatggtggcgtgtgcctgtagtcccagcttcttgggagactgagatgggaggatcgcttgagtccaggaggttgaggctgcagtaagccaagagatcatgccatgcactccagcctgggtggcagagtcagaccctgtctgccaaaaaataaaataaaagttggtgaaaatgttgattatatattttaggaacaactagtaattgacatcaaaattatgggctaaagagaaagcaaaaataatgtgatttttaaaccagaattcaaaagatctgtttagcgtatgtttagacaaagccattacttattatatcaaagttttaacatttattttgtgagctgtcagcttttcctcttaacatttttccccaccgtcttaaaaaaccccaagaataccggacatttaagactcacttaaagctttaaaagcacttgcaaaatcctaaaatcataatttaaggtgtttttggagggcaggagcaatggtggcaggcagtgttttgctttgttgcccaggctgaagtacagtggcagatctcggttcactgcaccctcgacctattcggctcaagtgatcctcccacctcagctttctgagtagctgggaccccaagtgcacaccaccccatgcctggctaatttttaaatttttttgtagaaacaaggtctcactgtgtagcccagatggtctcgaattcctgggctcttaagagatcctcccaaagtgctgggatcataggtgtgagccaccacacctggcctattttggcattcttgaaaaccgcaggattaccacggataaaattttaaaattacctttaaagaattcaggtttacacacaaaaaaaatttggtttgttagcagtgagtgaagaaaaattttgagaaatgtttaaaatttttagttttgttacacaatacattttactacctgtttaattatcttttttgactcagaaaccagtttcctgggtccaggatgtttagtggtactctttttcttcaagctttttagcattggaggaactgcatattagtaaaatttttagtcttagcattttatagcttactgctatttcttttctttcattctttctttcttttttttttttttttttttttttttgagatggagtctcgccctgtcacccaggctggagtgcagtggcacgatctcggcttactgcaacctctgccttccaggttcaaatgattctcctgcttcagcctcccgagtagctgggattacagatgcccgccaccatgcccagctaatttttatttttttagtagagatggggtttcaccatgttggccaggccagtctcgaactcctgacctcgtgatcaacccgccttggcctttcaaagtgctgggattacaggcgtgagccaccgtgcccagcctttttctttttctttttctttttttttttttttttgagacggagtcttgctctgttacccaggctggagtgtagtggcatgatctgggctcactgcaacctccacctcccgggttcaagggagtctcctgcttcagcctcccgagtagctgggattacaggcgcctgccaccatgcccagctaatttttgtatttttttagtagagatggggtttcgccatgttggccaggctggtcttgaactcctgacctcaggtgatctgcctgcctcgtcctcccaaaatgctgggattataggagtgagccactgcgcccggcccagcatactgctatttctttctttctttcttcttccttttttttttttttgtttttttttttttttttttttttttgtgagacggagtctgtcgtccaggctggaatgcagtggcgttttcttggctcactgcaacctctgctgcccgggttcaagtgattctcctgcttcaggctcccaagtagctgggattataggcctctgccactgcacttggctaatttttgtatttttggtagagacggggtttcaccatcttggccaggctggtcttgaactcctgacctcgtgatccacctgccttggcctcccaaagtgctgggattacagacctgagccaccgcacccggcccatactgctatttcttaacagcagagaaattatgtgtcagattctgtaagtgtaatggtatataaaggataaaatgatgttgaaaaacaaaattttttgtttaaatgcttatgtttctaatattttatttcagaaaggaatttatttcaaaactgataatggttggatccagcttttcacacaaacttttttttcctagtgaggatgcacatttatcctgtaaacaaatggaagacattatttttttaattgcttgcttagaaatgaaataattcttttctaatgatcttttaaagcatgagacctcatacatcatttaaaacaatttatactgtattttacacatgacaaagttctaaggtaacagcccttttctaagactaaagttacagtcctccctttgtatctgagggggattggttgcaggacccccctgtgaatacccaaatccttggatgtccaagtcccttatgagatgtagtatttgcatataacctatacacatcttcccctgtactttatctctagattacgtacaatacctaatagaatgtaaatgctttgaaattagttgttcagctgtattttaaattttgtattttttttccttttttttttgagacagagtcttgctctgttgcccaggctggagtacagtacagtgatcacagctcactgcacctttaacctcccaggctcaagctgtcctgcctcggcctccccaagtgttgggattacaggtgtgagccatcatacctggtcactgttttttattggttttaaatttttgatttaaaatttttaatctaggttggttgaatctggactggaacccaaggatatgtttgttgagcatactgtatttactttggaatacaactagaatgcttaacttgtatgttaaaaatactttatttggccaggcgcggtggctcacgcctgtaatcccagcactttgagaggccaaggcgggtgaatcatttgaggtcaggagtttaagacgagcctggccaacatggcaaaaccctgactctacaaaaaaaaggtaaaaataagccaggtgtgatggcgtgtgcctgtagtcttggctattcaggaggctgagacacaagaatcgcttgaaccggggaggcacgttacgccctcagttgttgacttgagtttttccgtagtttgtagggggagggtaatagagtattaggtagcttttggaatacataggagtgtaactggaaaaagattccaagcaagtctaatgaattagataatttacctaattagtaaattatgtaatcagtatgctttataataatattgtgagttagatcctgtttctgatatgtacataccatattgtataggtgctactaatttggagagcatatacagtgagtccatgcctttttcctgccatcagcattataccaaaattctgccatggtttttaaactttgattctgagaaagtttctcaccctaataacataactatatttgtgtttgtcttcatagttaaatatgcattatgatatcagcttgcatacattttttaaatgacttgaatatctgactttaaaaattattctagaatttctgtgcttcaatattaatgccagaagacttggaattgtttatttgtaggtaactgcctttaaggaaacttgaccaaatattaactaagttatgtatttccttttggcaacagttgtgacttctcaccaggagatttggtttgggccaagatggagggttacccctggtggccttgtctggtttacaaccacccctttgatggaacattcatccgcgagaaagggaaatcagtccgtgttcatgtacagttttttgatgacagcccaacaaggggctgggttagcaaaaggcttttaaagccatatacaggtaagagtcactactgccatgtgtgtgtgtttgtgtgtgtgtgtgtgtgtgtgagagaaacagacagacaggcagacttttttctatatgatgaaattaagtgtattttaccccagtaaattgcaaggggtggcagttgtgaaagcttctggcatgggaaagggatgtaacatggtctttagctggtttgttttgtggaatggaatttttatttctgtcctttgagtgacttacagcaatattatacccttaataagggtaaactaaactgtccccccatcttgaagggtccaagagaaagttaatgtcatcaggatacatagcctatagatagcgacattctctagggaaagatggagatgcgcactacctggccttcaaactactcactaatgaacacatctgagttgagtttcacaccaaactcctggaaccataactttcttttcccagatctagtcttgtttatcacagacatcaacagcctggcatgtttagcctcacttgggctaggtgcaccccatcgtctcttgtacaagttctctttctttcttttttttttttttttttctggagacagagtctcactctgttgcctaggctggagtgcagtggcgcaatctcggcccactgcaacctccgtctcctgggttcaagagtttcctacctcagcctcccgagtagcttgggattataggcacacgccacgttgcctggctatatatatatattttttttttgagacggagttttgctcttttggcccaggctggagtgcaatggcgcaatctcagctcactgcaaccgccacctcccgggttcaggtgattctccttcctcagcctctaaagtagctgggattacaggtgcacaccaccaagcccagctaattttttatttctagtagagatggggtttcaccatgttggccaagctggtcttgaactgctgacctccagtaatccacccacctccccctaccaaagtgctgggattataggcgtgagccactgtgcccagccgcccagctaatttttgtatttttagtagagacggggtttcaccatgttggccaggctggtctccaacttctgacctcaggtgatctgcccatttcggcctcccaagagtctccagtctagtacgttgtcgtactcggtgttgtaaaatccaaacaagggtcagtttcccaggtaactgggaaattcccagaatcacactctttcgtcatagtgctcatcctacaaaaaaggattgggggcattttgtctaaaattaaatgtaaatggtgatctgacatacaggtggaaagagaattgggaagttttgttctctcttctaccaacttgccacataatcttggccaagcaaagtaacttgttttttcttttaatctttttaaaagaaatagagacacagttttgccatgttgcccaagctggtctcaaactcctgcctgagctcaagcagtctgcccacttcggcctcccaaagtgctgagactacaggcataagccaccatgcccctgggctcggccaactttttcgttttcttttcaagagatgggggtctcactctgtcacccagcctggagtatagtgttgggatcatagctcactggagccttgaactcctgggctcaagtgattcccccctgttttagcctcctcagtaaccgggactagaggtgtctgccaccacacctggctaatttttatatagttttttttttttttttttttttttaaagagatgacggtcttgctatgttgcccccagggtggtcttgaattcttggcctccagtgatccttctgcatcaggctcccaagtagttgggtgatctggctaaagtaacttattttctgatactgtttacttatatttagaatgaatctcattggggttgcactggggccgggcatggtggctcacacctgtaatcccagcgctttggaaggccaaggcaggtggatcacctgaggtcaggagttccagactagcctggcaaacatggtgaaatcccgtctctactaaaaatacaaaaattagctgggcatggtggcacatgcctgtaatcccagctacttgggaggctgaggcaagagaatcgcttgaatctaggaggcggaggttgcagtgagtcaagatcatgccaccgcactccaacctgggtgacagagcgagactgtctctcaaaaaaaaaaaaaaaaaaaaaaaaaaaggctgggcacggtggctcgcgcctgtaatcccaacactttgggaggcccaggcgggtggatcacgaggtcaggcgttcgagaccagcctgaccaagatggtgaaacactgtctctactaaaaatacaaaaataagctgaaatcccagctactcgtgaagctgaggcagagaattgcttaaacctggtaggcggaggttgcagtgagccgagatcgcgccactgcactccagcctggggaacggagtgagacttcatctcaaaaataaataaataaataaataaataaataaaataaaataataaataaagtaaaaagatctctcattgaaccagatgatatatgaagtctcttttaggaccaatttcgagatttaaaaaatttggcagaattactttttttttttgcagcggagtccagctttatcacccaggctggagtggaatggcacaatctcagctcactgcaacctctgcctcctgggttcaagcgattctcctgcctctgcctcccaagtagctgtgattataggcgcccaccaccaggcccagctgatttttgtatttttcagtagagttgaggtttcaccacgttgtccaggctggtctcaaactcctgaccttaagtgatccgtccaccttggcctcccaaagtgctgggattaggtgtgagccactgggctggcccagaatgacttttaaaaagagatcagtaaggccaggcgtggtggctcacgcctgtaatcccagcactttgggagactgaggtaggcggatcacctgaggtcaggagttggagacaagcctggccaacatggtgaaaccctgtctctactaaaaatacaaaaattagccaggcatggtgacacatgcctgtaatctcagctactcaggagggtgaggcagaattgcttgaacccgggagtcagtttcttttttctttttttgagatggagacccactttgtcacccaggctggagtgcaatggtgcagtcttggctcactgcaatctctgtctccggggttcaagtgatcctcctgcctcagtctccttagtagctgagactacaggtgtgcaccaccacacctggctaatttttgtatttttaggagagatggatgtcaccatgttggccaggctgatctttaaactcgtgacctgaagtgatccacccgccttggcctcccaaaatgctgggattacaggtgtgagccaccacgcccagccctaaagttgtattttgatggaacgaactgttttgagaaataaattttaacgcgttgagtctgaactgggctgccctttcaaaatgtgaaggccccttaaagtagcacattggttggttattcttttatttatttagatatatctgatctagttgtctttgggacaaactcatatttaatatcatagctgcatgtaactgacagtgtagtctttgtcttcctgaagtgtttgtttgttttttgagatggagtcttgctctgtcgcccaggctgaagtgcagtggtgcgatcttggctcactgcaacctctgcctcccgggttcaagtgattctccttcctcagcctcccgagtagctaggactacaggcatgtgccaccacacccagctaatttttgtatttttagtagagatggggtttcaccatattggtcaggttggtcttgaactcctgacctcgtgatctgcctgcttctgcctcccagagtgctgggattacaggtgcgagccattgtgcccagctagtaagtttttaagaaagattctcaaacctcttttaaatcgtctgcctcacttgaagaggtatgccctacctgtttagggctgtagacccaggtcattagaagacagactaagtagtcctgggtgaacccatagggcaccttcaaggaggtaaaattggtgattttagtttcaccagtagtttttccctgaatatttattccttttgtgctttattgatctatctatatcaataaaaagtaatggggcataacaaattatacttgtcattcttgttcattagggcaaatgttgtaggttgagtcaagtgtccagccaacaagttattttatgtgtgtgtgtgtgtgtgtgtgtgtgtgtgtatacatatatacatttttttttttttttttcatcgagacagggtcttgcactgtcgcccaggctggagtgaagtggtgcaatctcggctcactgcaacctctgcctcccaggtttaagtgatcttcccacctcagcctcccaagtagctgggactacaggcgcacaccaccacccttggctaatttttgtattttttttttggtagagatggggtttcaccacattgcccaggctggtcttgaattcctgacctcaagtagtccgcccacctaagcctcccaaaatgctgggattacaggcgtgagccaccgcacctggcatatatatattttaagatagagatggggtttgctatgttgcccaggctggtcttgaactgctgggattacaggcgtgagcctctgcacccggcccttattgtttataaatacatttctttctaggttcaaaatcaaaggaagcccagaagggaggtcatttttacagtgcaaagcctgaaatactgagagcaatgcaacgtgcagatgaagccttaaataaagacaagattaagaggcttgaattggcagtttgtgatgagccctcagagccagaagaggaagaagagatggaggtgggacacggcaagcattcagttgttatttatgttagggtgatgggggaagaaagggggagggtgtattaacaagataccttgttttatatatgtgtgtgtatatgtattattttattatacatacatgcatacttctgtagttccctggactgtaggataagttaggttacttagaatctcaacagctagcatcgtttttacttaggttttcaagcctactggcagggtaagcaagaggtagtaccattttggtaagaagtagagagctagggacagtaaagatggagtaatatatatatgagggtatatatagtcaggccctagaaattaattatccagttttatgctttttataaaaaaactgagatggggtcttgctatgttgcccaggctggtctcaaactcctgagttcaagggatctgcccacctgggcctcccaaagtgttgggattacaggcatgagccacagcacccagccccagctttatgcttttaattctaaaactttttttgttgtattttgcattcataagaatagatgttaaataaaccttgaaatacaaccttggctcaaacgttaatggtcatggataaagtgaattaaaacttgttaggggccaggtgtggtggttaatgcctataatcccagcactttaggaagctgaggcagttggatgtcctgaggacaggagttcaagaccagcctggccaacacagtgaaaccctgtttctataaaaaatacaaaaattagctgggcgtggtggcacacacctgtagtcccaaccacttgggaggctgaggcatgagaattgcttgaacttgggaggcagagggacttgggaggcagagggtgtagtgagccaagatcgcaccactgcattccagccagggtgacagagcaagaagactgtcaacaacaacaaaaaatgttatagaagtgaaaaaaattgattaatttagaacaagcttgtccagtctgtggcccaggatggcgtttaaatcagcccaacacaaatttgtaaactttcttaaaacattttgtgatttgttgttgttgtttagctcatcagctatcattagcattagtgtattttatgtgtggcctaagacaattcttccagtgtggcccagggaagctgaaagatcattatcctctgatctatcatattaatgagctgcatcctaaaagacattcatctataactaagctcagtttcatgttttgttcctttttcaatagataagatagggaatgagcaagttaataaagtgggtattttaattttaaggttgaaactaaggatcataacattatcagaggtctagaactggatggcagctacagagatcatttagcctaatactggtttaacaaataatccgggagatccgtgatatgtgaatgtgctaggcctgagatgagacagccaattgtggaagagcaaacactagaaccagtataagttgcttactgctttcttatgctattaatgagcatatcgcctcctgatatttatgatatatggtcatgccaacagctttgtcataaatagaactcccatggcagcaatcacttaatcttgtagttagaggtggggtctcaccatgttgccgagctggccttgaacttctgggctcagcgattttctccacaggcacctgctactgtgcttggtgcagcactttgtgtttttgaacataacctcaagatgttattgtcttcatagtaaaacaaaagatgaggcttagaactggatcactttgcctgtctcttcttacctcctcccagttcaaaatgcttgcatctcttaatagctagcattcccttggattttgcacatgagctcaaactcaagcctcagcacaatcttttttatagttttagtcttttagccagagtcgacttaccccccatacccactctgcttccttcataatgctgctttccctgggcagagaatccttgcccttcttgtattatgtcactttgtggggttggtgtctgctacacttacagcaagtccagagattttttttccaccacgtttgcaggagaactattggcatggaaaatgacaattgttttaatgtcaagtgaaactgaagttgatgttcattgagaggtttctaatttctagaggtgggttctttttttggcatatgaagttgcagcatattaagagaatttacagtagtacagatggggttatcccatccacaacttatgatggggttacataaactaaaaacgtgtttaatacacctaccccaccgaatattgtagcttgggcgtagcctaacctatctcagacgtgctcagaacacttaaatgttagcctaaagttgggcaagatcatctaacacaaagcctattttataataaggaattgcctatctcatgtaattcatcgaatactgtactaaaaatgaaaaacagtggctgcacgggtaccattataaagtcaaaaaatcataagttgaactgtcttacattatggttttccaaattttgatttgtttttaaatactctttccttgcctggcaggtaggcacaacttacgtaacagataagagtgaagaagataatgaaattgagagtgaagaggaagtacagcctaagacacaaggatctaggcgaagtagccgccaaataaaaaaacgaagggtcatatcagattctgagagtgacattggtggctctgatgtggaatttaagccagacactaaggaggaaggaagcagtgatgaaataagcagtggagtgggggatagtgagagtgaaggcctgaacagccctgtcaaagttgctcgaaagcggaagagaatggtgactggaaatggctctcttaaaaggaaaagctctaggaaggaaacgccctcagccaccaaacaagcaactagcatttcatcagaaaccaagaatactttgagagctttctctgcccctcaaaattctgaatcccaagcccacgttagtggaggtggtgatgacagtagtcgccctactgtttggtatcatgaaactttagaatggcttaaggaggaaaagagaagagatgagcacaggaggaggcctgatcaccccgattttgatgcatctacactctatgtgcctgaggatttcctcaattcttgtactcctgggatgaggaagtggtggcagattaagtctcagaactttgatcttgtcatctgttacaaggtggggaaattttatgagctgtaccacatggatgctcttattggagtcagtgaactggggctggtattcatgaaaggcaactgggcccattctggctttcctgaaattgcatttggccgttattcagattccctggtgcagaagggctataaagtagcacgagtggaacagactgagactccagaaatgatggaggcacgatgtagaaagatggcacatatatccaagtatgatagagtggtgaggagggagatctgtaggatcattaccaagggtacacagacttacagtgtgctggaaggtgatccctctgagaactacagtaagtatcttcttagcctcaaagaaaaagaggaagattcttctggccatactcgtgcatatggtgtgtgctttgttgatacttcactgggaaagtttttcataggtcagttttcagatgatcgccattgttcgagatttaggactctagtggcacactatcccccagtacaagttttatttgaaaaaggaaatctctcaaaggaaactaaaacaattctaaagagttcattgtcctgttctcttcaggaaggtctgatacccggctcccagttttgggatgcatccaaaactttgagaactctccttgaggaagaatattttagggaaaagctaagtgatggcattggggtgatgttaccccaggtgcttaaaggtatgacttcagagtctgattccattgggttgacaccaggagagaaaagtgaattggccctctctgctctaggtggttgtgtcttctacctcaaaaaatgccttattgatcaggagcttttatcaatggctaattttgaagaatatattcccttggattctgacacagtcagcactacaagatctggtgctatcttcaccaaagcctatcaacgaatggtgctagatgcagtgacattaaacaacttggagatttttctgaatggaacaaatggttctactgaaggaaccctactagagagggttgatacttgccatactccttttggtaagcggctcctaaagcaatggctttgtgccccactctgtaaccattatgctattaatgatcgtctagatgccatagaagacctcatggttgtgcctgacaaaatctccgaagttgtagagcttctaaagaagcttccagatcttgagaggctactcagtaaaattcataatgttgggtctcccctgaagagtcagaaccacccagacagcagggctataatgtatgaagaaactacatacagcaagaagaagattattgattttctttctgctctggaaggattcaaagtaatgtgtaaaattatagggatcatggaagaagttgctgatggttttaagtctaaaatccttaagcaggtcatctctctgcagacaaaaaatcctgaaggtcgttttcctgatttgactgtagaattgaaccgatgggatacagcctttgaccatgaaaaggctcgaaagactggacttattactcccaaagcaggctttgactctgattatgaccaagctcttgctgacataagagaaaatgaacagagcctcctggaatacctagagaaacagcgcaacagaattggctgtaggaccatagtctattgggggattggtaggaaccgttaccagctggaaattcctgagaatttcaccactcgcaatttgccagaagaatacgagttgaaatctaccaagaagggctgtaaacgatactggaccaaaactattgaaaagaagttggctaatctcataaatgctgaagaacggagggatgtatcattgaaggactgcatgcggcgactgttctataactttgataaaaattacaaggactggcagtctgctgtagagtgtatcgcagtgttgggtaagactttgaacaagcttgttctcaggctttgataagtagtgctgtttgccagctgtatattatccctaaaaataagtaataaggtatatatggtacatattttgacatgcatatacatatttgcatcctgactaggctgcccacagcaatttaagttacttgaaactcgcttttatcttagtagccctttggcctttcttcagttttttttttttttttttttttttttgagacatggtcttgctctgttgcccaggctagaaatatggtgacacaaccatggctactgcagcctcgacctcccaggcttaagtgatctttccacctcagcctcccaagtagctgagattacagatatgcaccaccatgcatggctaatatttaaatgtttgtagagagatggggtctcactgtgttgccaggactggtcttgaactcctgggctcaagtgatcctcctgcctcggcttcccaaagtgctgaggttacaggcatgacccattgcgcctggccctttcttcagtctttaataatcgaacaaaaggtttttgtttttagacagtgtcttgctctgttacccaggacagacctctcgtgtcagcctcttaggtagctaggatttacaggtaagcaccggcgtgccctgctttatttttttggtgggggaagggggaagggagttgaagcttccctatgttgcccaggctggtcttgaactcctggcctcaagtgatcctccagtctcccaaaagtgctgggattacaggcatgagccaccgctcccggcccaaaagatttttaaatgtgttatacttcatgagacaggctttattttagatcgaattttatttatcaataaaaagttgagctttttattatttggtgaatactgtttcaaggtgctttgttacactatctgttgatccaacatttaaaaattgttttattacaacctttgcatttcagtgaatccatctgcatacaattttaaaagaatcattccttttttctgtagccaaattgtcaaagattctttcctacaattgatttttcaaagccctgagttaggaatttacaatttggcaaccatctcaacttcataagcaattttgttctttaaatgtcacggccaacattacctggaaccattgctgttttatagtttaggtttatgttgtatattttttttaattttttagagacggggtcttgctgttttcagactggagtacaatgggatgactagctcactgcagcctcaaactgctgggttcaagtgattctccttcctcagcctcctgagtagctgggactacaggtggtcaccatcacacctggctaatttttgtatttttggtagagacagggtttttcccgtgttggccaggctgttcttgaattcctgacctcaaagcgatctgcccgccttgatctccgaaagagctgggattacacgcatgagccactgcgcccagccctgttttttttttttttttttttttaaataatggtagtttacttgaatttgtaacacagtaacacaaaactattttgatctgaacgcaagtatctaatggaacagaataatatacttccttttagtgtgctgcatttggttactgggtaatttaaaattcttcctcagcacaggtgttcaaaaaccagtcttcagagattgttttcatatcagtgtgccaactttggcacattctgctaagtaagaggcttaagtgtagcatgtttctgctgttttgtgtttgttttgttttgttttttgagacagagtctctctgtcgcccaggctggagtgcattggtgcgatcttggctcattgcaacctctgcctcccaggttcaagtgattctcctgcctcagcctcctgcgtagctgggattacaggcatatgccacgtgtattaggcactgctaatttctgtatttttagtagagacgaggtttcaccatgttggtcaggctggtcctgaactgctgacctcgtgaactctgcccgcctaggcctcctgaagtgctgggattacaggcgtgagccaccgtgcctggcctctgctctatcttttagctttcccttggcacttctatggtccagatgttagagggtaagtattttgatgggggagatcgttggactgtaattgaaagttatctcttataatgaaatgtgttatataaagaagacctataaaacacttaggctgataaaacccccaaacgatgaagcctcacttttaccctctcttttaacagatgttttactgtgcctggctaactatagtcgagggggtgatggtcctatgtgtcgcccagtaattctgttgccggaagataccccccccttcttagagcttaaaggatcacgccatccttgcattacgaagactttttttggagatgattttattcctaatgacattctaataggctgtgaggaagaggagcaggaaaatggcaaagcctattgtgtgcttgttactggaccaaatatggggggcaagtctacgcttatgagacaggtaactgattcttaaagttttgttatcagaaagtcatttgtgacattaggaataacatacttaggtgatcattttccaaacacagttacataaaagtcagccagtgacttaataggaagcaaagggaaattactccctgtgttataaaattgagaattatatttagctgaaacatcgatgcttaatgttaaggggaatatatgttaaaaaggggaaggaggtcagtcattcaggtcatgaggccctttgacttgaattcatttcctcagaaggtaggtatattcatagtgaacaaaaatacaaaggctgtatgaaaagatgaaaatgttacaggtttatccttaaattagactcatttgcagaaatgcaaatgaggtaagaaagcaaatatagttcatgacctctagcaactgttgaaaactgctctttagggatgacatgctggcccttttttttttgttgttgccaaggctgaagtgcagtggcaccatcacagctcactgcagcctcgaactcccaggttcaacccttcctcctgcctcagccttcccagtagctgggactacagatgtacaccatcatgcctagctcatttttaaaaaaattttttatggcattgtatttatcttctctttataaccaggggttgaccagccacagaacttgtaaagttttttatatttttaaaaggttgtaagaaatagtagtagttggctggtccccgctgctctcctgcattatagtatacttctgttcacctagtttgctagagagaggcagtatagtgtgtatagtgatttccaaactttttctttaaatcagaatcacctgaaagaatgtgacaacgtgtaaaaaaaaaaaaaaaggtgcagagattccatcctgacatggattcacttgattggaattgattctaggcatctcagtagttttaaagagctcctaggtgattctattctggccagcgttgagaatcactagggtagtgggttggtaagcaggctctgatgttttaaaggccaggtgaggccctatgcctcttgtctctcttagcctcaactttctccatgttagcaaatggatttcagaacagaaccaacgtacatgtgattgtgaaagttgttttagagtgcctagctcttacgtaagggttcataagaaagacaaaagtttatgaaactgttactaccagtcataaaagaccttttcctccctcattcacaggctggcttattagctgtaatggcccagatgggttgttacgtccctgctgaagtgtgcaggctcacaccaattgatagagtgtttactagacttggtgcctcagacagaataatgtcaggtgagttttttgtttcccacttaagttctcattcagtcatttagatgtgataaaagatatttgcttcttgtatatgagccttttaaatctaatatttgatttttctggtgttactttaaaaacatcactttttaagaactgcatagtctctctctcttttttttttttttgagatggagtttccctcttgttgcccaagctggagtgcaatggcacgatcttggctcactgcaacctctgcttccaggttcaagtgattctcctgcctcagcctctcgagtagctgggattacaggcgcatgccatcacgcccagctaattttttgtatttttagtagaagcggggtttcaccatgttaggctggtctcttaactcctgacctcaggtgatctgcttgcctcggcctcccaaagtgctgggattacaggcgtgagccaccgtgcccggccaataattgcatagtctcttaatgagatttaatcttttataccaatatgtgtagctcatgatagctatataacctagaagatgaatttatgtaatatgatttgcaaaatgagtattcatttgtgatttttttttttttaaggtgaaagtacattttttgttgaattaagtgaaactgccagcatactcatgcatgcaacagcacattctctggtgcttgtggatgaattaggtaagacattaaacttctcatttgaagactatctatcttaaaaacatttgtacaaataactatttttatagaagattatctgaagtacatctaaacaatatgaatgtttttagagcacgcactcaccattgtggcacagaccgatagttggagataaaaggtgatattgtgaaaggtttttgattacccattaattattaggccttacactgtttagttgtaataaaacatttgttatactacggggatgagaacactaataggaggactcaggaagtttatgaccttgagcgatactgtattttctttaaaagaaacctcactccccatgggctgctaagcagactcgtgtagctaaacaaggcctatttatagaatgcttttagacgtggatgtactaaccgatgttgcttttctgtcctagcatttttgttttaattccttttttgttttaattcctttgagttacttccttatgcatattttactttaacaggaagaggtactgcaacatttgatgggacggcaatagcaaatgcagttgttaaagaacttgctgagactataaaatgtcgtacattattttcaactcactaccattcattagtagaagattattctcaaaatgttgctgtgcgcctaggacatatggtatgtgcaaattgtttttttccacaaattcggttttttgagagggcactttctgttgctagcacatgtatcgctaatatttttctttcttaaggcatgcatggtagaaaatgaatgtgaagaccccagccaggagactattacgttcctctataaattcattaagggagcttgtcctaaaagctatggctttaatgcagcaaggcttgctaatctcccagaggaagttattcaaaagggacatagaaaagcaagagaatttgagaagatgaatcagtcactacgattatttcggtaactaactaactataatggaattataactaactgaccttaagtttcaaagaaacagtaaaaggggaagggatgatgcactatgaaaaaacaaaaaaacttttttttttttttttttaattttaagggaagtttgcctggctagtgaaaggtcaactgtagatgctgaagctgtccataaattgctgactttgattgattaaggaattatagactgactacattggaagctttgagttgacttctgacaaaggtggtaaattcagacaacattatgatctaataaactttattttttaaaaatgaccatttttccattttctttctaggaaattaaacccttttaattcttatctaccttctacataatggttattgaatactccacaatatattaagtctagatgttatggtacatgcatacactttcaggctgttttatacccactgtcaccaatacacataaatgggggaggaaaagctatgaaactgtatagggctgtatatatacttgtctcagcttaatgcaggaaattggtttaatttccagcagttttgtctaaactgttcaaaaaaaaactatgaacagagttcaaatacaggactgtttttgttttgaagagactttctaaagtgtacttaaaacatagtagttttttacctttcacaaaactgagttacaagaatacttttgttttacagtgcatcccttcctaggaagtctcattaaaacactcactttttctaggggtgattttgaatgctgcacagggaagggaaggaaataatagtcttaacttttcttaaaggataccagaaacattgctggatataatttaagattagtgttttctctttcatagaaagaacgtacatactgggacatgagtacagttacagcaagtctaggtgtgctaacaaaacagggcacattcaagtacagtaagattttgcttgaaattaaaaacaaactacatgagattaaagcattaaaatcatatttctcaatctgaatacatgttaaaaaaaaaaaatcaaaaggaacgcagaagtgctagctcacatttttaccatattacaaaagcaattggtacccatgtccataaaggcagcaacaaagctgcttgtctattgaagattactactgcaaattggactgcattcaatgctagttgtaaaaacaccagcttttcagaagttggtatctgtacaaaattgcagcttattttcttcacttctgtcccttcaagtctttacacagtaatgctaaaacacccagctttgagatcctgagtcaatatattgccactttctttttggtagcttgagcttcatagtgtcaactgaccttgtgtatccatttttaatacagtctcttcctgtagcatgggcaaatattttaaatcttcttccaaaaaagtgttttaagttatgatgttacaatggcaggactttttctttagggaaggaattcagttgtgctgcaatgtattagattctataggtggagcagagtcatatagtgtatctgtatcatgtgtaggctcaccagctaatgtacaaggattagacagtgttccagcaccacagtcacagaaaaacctaaagcaaaatgaaacccaaatattagaaaagtgagggggaaagtaattgggtaatatatcaagcaagtgtgctacatacctatcatgtctaataaactctacatcatgtccctgatggcacttcttaatgcagttcacacatatggcatttcgatctgtggtgttacaagtatgacatctaaaaagcaaaagcttaaattacttttctcaaacatgtcattaatgcaaaacattccattctgtttatatattactatgacctttggctttaagaggaccaaaacaaaattctttgtggctccagcccagattaattctgaaaaggaactttaatggagtaagtgattttcctgtcatctgtgtcttcggagggaagagaaatgatttgtaaattgtataaaggcagttctttccactttaaaagcctctcaaatgtttctgggctgaaaacaatttttggaggcgtgaagagtcaaaactgtcacagtgactgggatatatcaaacacttaaccccgacatctttaccttgaaatttctaggaaaacattacacaacatgagttacatgaatgacatcagttactgtagcattaggtttttccatagttatggtctttgttttgttttgtagagacagggtctccctatgttgcccaggctggtttagaactcctgggctccagtgatcctcccacttcagcctcccaaagtgctaggattacaggca

SEQ ID NO: 24848 - DNA, 5674 bp, Homo Sapiens
aagaaaatcctgcttgacaaaaaccgtcacttaggaaaagatgtcctttcgggcagccaggctcagcatgaggaacagaaggaatgacactctggacagcacccggaccctgtactccagcgcgtctcggagcacagacttgtcttacagtgaaagcgacttggtgaattttattcaagcaaattttaagaaacgagaatgtgtcttctttatcaaagattccaaggccacggagaatgtgtgcaagtgtggctatgcccagagccagcacatggaaggcacccagatcaaccaaagtgagaaatggaactacaagaaacacaccaaggaatttcctaccgacgcctttggggatattcagtttgagacactggggaagaaagggaagtatatacgtctgtcctgcgacacggacgcggaaatcctttacgagctgctgacccagcactggcacctgaaaacacccaacctggtcatttctgtgaccgggggcgccaagaacttcgccctgaagccgcgcatgcgcaagatcttcagccggctcatctacatcgcgcagtccaaaggtgcttggattctcacgggaggcacccattatggcctgatgaagtacatcggggaggtggtgagagataacaccatcagcaggagttcagaggagaatattgtggccattggcatagcagcttggggcatggtctccaaccgggacaccctcatcaggaattgcgatgctgagggctattttttagcccagtaccttatggatgacttcacaagagatccactgtatatcctggacaacaaccacacacatttgctgctcgtggacaatggctgtcatggacatcccactgtcgaagcaaagctccggaatcagctagagaagtatatctctgagcgcactattcaagattccaactatggtggcaagatccccattgtgtgttttgcccaaggaggtggaaaagagactttgaaagccatcaatacctccatcaaaaataaaattccttgtgtggtggtggaaggctcgggccagatcgctgatgtgatcgctagcctggtggaggtggaggatgccctgacatcttctgccgtcaaggagaagctggtgcgctttttaccccgcacggtgtcccggctgcctgaggaggagactgagagttggatcaaatggctcaaagaaattctcgaatgttctcacctattaacagttattaaaatggaagaagctggggatgaaattgtgagcaatgccatctcctacgctctatacaaagccttcagcaccagtgagcaagacaaggataactggaatgggcagctgaagcttctgctggagtggaaccagctggacttagccaatgatgagattttcaccaatgaccgccgatgggagtctgctgaccttcaagaagtcatgtttacggctctcataaaggacagacccaagtttgtccgcctctttctggagaatggcttgaacctacggaagtttctcacccatgatgtcctcactgaactcttctccaaccacttcagcacgcttgtgtaccggaatctgcagatcgccaagaattcctataatgatgccctcctcacgtttgtctggaaactggttgcgaacttccgaagaggcttccggaaggaagacagaaatggccgggacgagatggacatagaactccacgacgtgtctcctattactcggcaccccctgcaagctctcttcatctgggccattcttcagaataagaaggaactctccaaagtcatttgggagcagaccaggggctgcactctggcagccctgggagccagcaagcttctgaagactctggccaaagtgaagaacgacatcaatgctgctggggagtccgaggagctggctaatgagtacgagacccgggctgttgagctgttcactgagtgttacagcagcgatgaagacttggcagaacagctgctggtctattcctgtgaagcttggggtggaagcaactgtctggagctggcggtggaggccacagaccagcatttcatcgcccagcctggggtccagaattttctttctaagcaatggtatggagagatttcccgagacaccaagaactggaagattatcctgtgtctgtttattatacccttggtgggctgtggctttgtatcatttaggaagaaacctgtcgacaagcacaagaagctgctttggtactatgtggcgttcttcacctcccccttcgtggtcttctcctggaatgtggtcttctacatcgccttcctcctgctgtttgcctacgtgctgctcatggatttccattcggtgccacacccccccgagctggtcctgtactcgctggtctttgtcctcttctgtgatgaagtgagacagtggtacgtaaatggggtgaattattttactgacctgtggaatgtgatggacacgctggggcttttttacttcatagcaggaattgtatttcggctccactcttctaataaaagctctttgtattctggacgagtcattttctgtctggactacattattttcactctaagattgatccacatttttactgtaagcagaaacttaggacccaagattataatgctgcagaggatgctgatcgatgtgttcttcttcctgttcctctttgcggtgtggatggtggcctttggcgtggccaggcaagggatccttaggcagaatgagcagcgctggaggtggatattccgttcggtcatctacgagccctacctggccatgttcggccaggtgcccagtgacgtggatggtaccacgtatgactttgcccactgcaccttcactgggaatgagtccaagccactgtgtgtggagctggatgagcacaacctgccccggttccccgagtggatcaccatccccctggtgtgcatctacatgttatccaccaacatcctgctggtcaacctgctggtcgccatgtttggctacacggtgggcaccgtccaggagaacaatgaccaggtctggaagttccagaggtacttcctggtgcaggagtactgcagccgcctcaatatccccttccccttcatcgtcttcgcttacttctacatggtggtgaagaagtgcttcaagtgttgctgcaaggagaaaaacatggagtcttctgtctgctgtttcaaaaatgaagacaatgagactctggcatgggagggtgtcatgaaggaaaactaccttgtcaagatcaacacaaaagccaacgacacctcagaggaaatgaggcatcgatttagacaactggatacaaagcttaatgatctcaagggtcttctgaaagagattgctaataaaatcaaataaaatcaaataaaactgtatgaaactctaatggagaaaaatctaattatagcaagatcatattaaggaatgctgatgaacaattttgctatcgactactaaatgagagattttcagacccctgggtacatggtggatgattttaaatcaccctagtgtgctgagaccttgagaataaagtgtgtgattggtttcatacttgaagacggatataaaggaagaatatttcctttatgtgtttctccagaatggtgcctgtttctctctgtgtctcaatgcctgggactggaggttgatagtttaagtgtgttcttaccgcctcctttttcctttaatcttatttttgatgaacacatatataggagaacatctatcctatgaataagaacctggtcatgctttactcctgtattgttattttgttcatttccaattgattctctacttttcccttttttgtattatgtgactaattagttggcatattgttaaaagtctctcaaattaggccagattctaaaacatgctgcagcaagaggaccccgctctcttcaggaaaagtgttttcatttctcaggatgcttcttacctgtcagaggaggtgacaaggcagtctcttgctctcttggactcaccaggctcctattgaaggaaccacccccattcctaaatatgtgaaaagtcgcccaaaatgcaaccttgaaaggcactactgactttgttcttattggatactcctcttatttattatttttccattaaaaataatagctggctattatagaaaatttagaccatacagagatgtagaaagaacataaattgtccccattaccttaaggtaatcactgctaacaatttctggatggtttttcaagtctattttttttctatgtatgtctcaattctctttcaaaattttacagaatgttatcatactacatatatactttttatgtaagctttttcacttagtattttatcaaatatgtttttattatattcatagccttcttaaacattatatcaataattgcataataggcaacctctagcgattaccataattttgctcattgaaggctatctccagttgatcattgggatgagcatctttgtgcatgaatcctattgctgtatttgggaaaattttccaaggttagattccaataaatatctatttattattaaatattaaaatatcgatttattattaaaaccatttataaggctttttcataaatgtatagcaaataggaattattaacttgagcataagatatgagatacatgaacctgaactattaaaataaaatattatatttaaccctagtttaagaagaagtcaatatgcttatttaaatattatggatggtgggcagatcacttgaggtcaggagttcgagaccagcctggccaacatggcaaaaccacatctctactaaaaataaaaaaattagctgggtgtggtggtgcactcctgtaatcccagctactcagaaggctgaggtacaagaattgctggaacctgggaggcggaggttgcagtgaaccaagattgcaccactgcactccagccggggtgacagagtgagactccgactgaaaataaataaataaataaataaataaataaataaataaatattatggatggtgaagggaatggtatagaattggagagattatcttactgaacacctgtagtcccagctttctctggaagtggtggtatttgagcaggatgtgcacaaggcaattgaaatgcccataattagtttctcagctttgaatacactataaactcagtggctgaaggaggaaattttagaaggaagctactaaaagatctaatttgaaaaactacaaaagcattaactaaaaaagtttattttccttttgtctgggcagtagtgaaaataactactcacaacattcactatgtttgcaaggaattaacacaaataaaagatgcctttttacttaaacgccaagacagaaaacttgcccaatactgagaagcaacttgcattagagagggaactgttaaatgttttcaacccagttcatctggtggatgtttttgcaggttactctgagaattttgcttatgaaaaatcattatttttagtgtagttcacaataatgtattgaacatacttctaatcaaaggtgctatgtccttgtgtatggtactaaatgtgtcctgtgtacttttgcacaactgagaatcctgcggcttggtttaatgagtgtgttcatgaaataaataatggaggaattgtcaaaaaaaaaaaaaaaaaaaaaaaaaaaaaaaaaaaa

SEQ ID NO: 24849 - DNA, 3152 bp, Homo Sapiens
  misc_feature (2077)..(2077): n is a, c, g, or t
  misc_feature (2085)..(2085): n is a, c, g, or t
cggcggcggcggcggcggctgcggtggccaagcaggcagatactgcctgacccgttcccgggagcgtgtctgggtttgggggcgggagacaggctgagccgcctgggcggcctggcctgtacggggcgggggaggccatggcctcggctgagttgcaggggaagtaccagaagctggctcaggagtactcgaagcttcgggctcagaatcaggttctgaaaaaggtgttgtggatgaacaagcaaattctgcagctttaaaggagcaactgaaaatgaaggatcagtcattgagaaaactacaacaggaaatggacagtttgacatttcgaaatctgcagcttgccaagagggtagaactacttcaagatgaactagctctaagtgaaccacgaggcaagaaaaacaagaaaagtggagaatcttcttctcagttgagtcaagagcagaagagtgtctttgatgaagatctgcaaaagaagatagaagagaatgaacggttgcatatacaattttttgaagctgatgagcagcacaagcatgtggaagcagagctgaggagtcgactggccactctggagacagaagcagcccagcaccaagctgtggttgacggtctcacccggaagtacatggaaaccattgagaagctgcagaacgacaaggctaaactagaagtgaaatctcagactctagaaaaggaagccaaggaatgtcgacttcgaacggaagaatgtcaattacagttaaagactcttcatgaagatttgtcaggtagattagaggaatccttatcaatcatcaatgaaaaagtaccttttaatgatacaaaatatagtcagtacaacgctctgaacgttccactccacaataggagacaccagctgaagatgcgagatattgctgggcaggccctggcttttgttcaggatcttgtgacggctcttctaaactttcatacctacacagaacagaggattcaaatttttcctgttgattctgccattgacactatatctccattgaatcagaagttctcacaataccttcatgaaaatgcgtcctatgtccgccctcttgaggaaggaatgcttcatttatttgaaagtatcactgaggatactgtgactgtcttggagacaactgtgaaattgaaaactttttcagaacacttaacctcctacatatgttttcttaggaagattcttccctatcagttaaaaagtttagaagaagaatgtgaatcctctctttgcacatctgcgttaagagccaggaatctagagctgtcccaggacatgaaaaaaatgacagctgtgtttgagaagctgcagacttacatagctcttcttgccttgccaagtacagagccagatggactccttcggacaaactacagttctgtgttaacaaatgttggtgctgctctgcatggatttcatgacgttatgaaagatatttccaaacattatagtcaaaaagctgcaatagagcatgaacttccaacagcaacacagaagctgataacaactaatgactgtatcctgtcatcagtagtggcattaacaaatggagcaggaaagattgcatccttcttcagcaacaatttggactacttcattgcttcactgagctatggacctaaggcagcgagtggattcattagtcctctttcagctgaatgcatgctacagtataagaaaaaagctgctgcctatatgaagtctttgagaaagcccctcttggagtctgtgccttatgaagaagcactggcaaaccgccgcatccttctcagctctactgaaagtcgagaaggccttgcacagcaagttcaacagagtttggaaaagatttctaaactggagcaggaaaaagaacattggatgttggaagcacaattagccaaaatcaagctagagaaagaaaaccagcgaattgcagataagctgaagaatacaggtagtgcccagctggttgggctggcccaggaaaatgctgctgtgtcaaatactgctggccaggatgaagccacagctaaggctgtgttggagcccattcagagcaccagtctaattggnactttaancaggacatctgacagtgaggttccagatgtggaatctcgtgaagacttaattaaaaatcactacatggcaaggatagtggaacttacgtctcagttgcagctggctgacagtaagtcagtgcatttttatgccgagtgccgagcactgtctaaaagactggccttggctgaaaagtctaaggaagcattgacagaagaaatgaaacttgccagtcagaacatcagcagacttcaggatgagctgacaactaccaagaggagttacgaggatcagttaagtatgatgagtgaccacctgtgcagcatgaatgagacattatctaaacagagagaagagattgacacactaaagatgtccagtaaggggaattctaaaaagaacaagagtcgatagttttgaaatagctggttggcgactgttctttccagacctgctcctgctgcacagagccgcagggctgagaccacgtccatgctggctgccttcaggaagctaaagtattgttggacctagtaaactagtcagtgttggaaacggccttgaaatatttaaaacatatttgtaaccagtgaggcaaatacagaagttgatgtcggcagtaaatggaaaacaatacgtatgtcatggatattgtaggtttccttatgctgtttttactgtgcactttttaaaattaggttttaatttcagtatgtaagaacaaatattttgtatactttcaaactcaattatatggtaatcgatttggtatcctatggaatagatatatgtttctggaaaaaaatgcttaaattgtcaaactgtcattacttcttattatagttgaaggcattctccagattctttttaaaagatttgttcatatttctctctctctctctctctctctctctctctctctctctctcttctttctctctgagggagagggagccctccaaacttcaagatcctgtgggtttagtatcattatcttcagctctttgataccctgtgttagagtaatagctaaaggaagttcatgtcaataaattcatacttatatcacaaaaaaaaaaaaaaaaaa

SEQ ID NO: 24850 - DNA, 2007 bp, Homo Sapiens
ctatggcctgggtcgcctctgtcgtcttctaggtctgtttccccacttataaagtgggacttgggttggctctgcttggcggagcagggtggaccgagaatgttctgaccagctctcgtcctcaccacccacaggcaccacctgtgccgtgcccggcgctactgccacgacttgggtgagcgcgcaggggccctgcacgcccaggtggagcggttggtgcagcaggctggccgccagcccgactcccccaccgccctctaccacttcaacgcctccctctacctgctccgggtcttgaagggcaacactgctgagggctgcctgcatgagacacaggagaagcagaaagctggcactgaccccagccacctgcccacgggcccgcaggtgccagctgcttggacttgaacctggtgacccgggtgtactcgacagcactgagctccttcctgaccaagcgcaacagccccctcacagttcccatgttcctcagcctcttctcccggcacccggtgctctgtcagagcctgctccccatcctggtccagcatatcacgggcccggtgcggccccgtcatcaggcctgcctgctgctccagaagaccctgtccatgcgggaggtgaggtcgtgctttgaggaccccgagtggaagcagctgatgggccaggtcctagcaaaggtcaccgagaacttgcgcgtgctgggggaggcgcagaccaaggcgcagcatcagcaggcactgtcctccctggagctgctcaacgttctcttcaggacctgcaaacatgagaagctgaccttggacctgacggtgctcctgggtgtgctgcaggggcaacagcagagcctacagcagggggcacactccaccggctccagccgcctgcacgacctctactggcaggccatgaaaaccctgggagtccagcgccccaagttggagaagaaggatgccaaggagatccccagtgccacccagagccccatcagtaagaagcggaagaaaaagggattcttgccagagacgaagaagcgcaagaaacgcaagtcagaggatggcacgccagcggaggatggcacacctgcagccaccggcgggagccagccccccagcatgggcaggaagaagaggaacaggacaaaggctaaggtcccagcccaggcaaacgggacgccaaccaccaagagtccagcccctggcgcccccacccggagccccagcacccctgccaaatccccaaaactgcagaagaaaaaccagaagccgtcccaggcgaatggagctcccgggtcccccacggaacctgcaggccaaaagcagcatcagaaggctcttcccaaaaagggggtcttgggcaaatcaccactgtccgcgctggcacggaaaaaggcaaggctgtctttggtcatcaggagtcccagcctgcttcagagtggggccaagaagaaagcacaggtgaggaaggcagggaagccctgagcacaggtacgggcccccctcagcccctgcctccatctgcctgagacgcctatttttttttttttaaaaccatgattttaatacgcaagctgtttctaaggcgctgccactggggagggtggctgttgccgcctgcccgggcatcctgctctggcaagcacagcctgagccattcctgcgggggtcccagggtgcagagacctccccacccccagttctgggctgggatcctggctccagggccatgtccagggctctggtgtttgcctgggttggtgcatgttgatgtgctggctgcaggcaggtgtgaccatctctcgtgcctgccacctctttgcccccaggcttttttgctgtgagggagccaccagggggtgatttaaataggtttatttcttcatttacaagaggaatatatttggcttctctcttaagactctgagattcacaatcagcagctctaaaaaataaaggagcagtttggcttccggaaggaagaggaggctaaaaaaaaaaaaaaaaaaaa

SEQ ID NO: 24851 - DNA, 27951 bp, Homo Sapiens
ttagattctcacaggagcctgaacgctactgtgaactcgcatgcgagggatctaggttgcatgcttcttatgagaatctaatgcctgatgatctatcactatctcccatcaccccagatgggacagtctagttgcaggaaaacacgctcagggctcccactgattctacctcattatctattaaaatgtaataataatagaaataaagtgcacaacaaatgtaacgcacttggatcatcccaaaaccatccccctcccttctgtctgtggaaaaattgtcttccatgaaaccagcccctggtgccaaaaaggttgggaatggctgctttaaagggtttctcaaggttctaatattttatttgataagaagtagaatcatataaaaaaccaaacatatgtgttaatttgggtatttatacagatatagtgtatatacatacatacaggcatggaggaatttccaaatttcctctattgtaaaacatacacatacacacaccaacacacacatgcacacatggtatcctaatagaaggcaaggagaatagacatttactgagcacttcctatgtgccacatgttttatatacattaggatattacagtatatggtagcttttatccattcattcaatctcaatacttttttttttttttaagagtagagcaactgaggctcacagcagttatgtaacctgcccaaagtcacacagcatgatggagggtctggattggagattttgtctgactacaacactcatgtatcaaatcctattcagttttgatgttaaaaattctgtggttgaattcgtcacagtgtctttaaataaaacaacaacaaacaaaacacagcaaaccttaacatagttgctaatcatatgagtttacaaggccacctgtgtctttactatcagttacactccttcccaccccatcacattaatcactcaggtctagggatttgcaagtttgctaacagccgaatggaacaaagacaaaacgctaaaatttgtgatgtgggcctaactccaaagccttcaagaaaaaaaaaaaaaggccaggcgcagtggctcatgcctgtgatctcaacactttgggaggcctaggagggtggatcacctgaggacaggagttcgaaaccagcctgaccaacatggtgaaacctcgtctctactaaatacaaaaaaattagctgggcgtgatggcgcatgcctgttaatcccagctacttgggaggctgaggcaggagaatcgcttgaatccgggaggcagaggttgcagtgagccggtattgcgtcactgttgcccactccagcctgagcaacaagaacgaaactccgtctcaaaaaaaaaaaaaatagccatttgtgctttcaatctctccgcttccggcctccacccggcgggaaaaaactcccgcacgtgggcctccacgattccttggcatgcgtgtcactctgggcaacaggctggtcggccacgactgcgcaggcgagaggcacagagcgactggagactgtagtcccccggtttccctggagaccaggcggaagcggccggaagtagcgctgcggttggcagcggcgggatggagaagctgggggtggagccggaggaggaaggcggcggcgacgacgacgaggaagacgccgaggcctgggccatggaactggcggacgtgggggcggcagccagctcgcagggtgcgccgcagccagaggagccagcggcctccttgggtgtaaatgagaagggtggggcaggcggacgctcggggcggcggccactggggcgcgaccgtccccgccccactcggctcctctaagagagggctgcctccctctgccttgtgttacgcggcgggtacctctagaggaatggcttcacccagcaggagtagggtggggcgcgtccacactacaaatacgtgtcgagggtttatctgcgccgtcctttcctctgtgaggggcgaggtggggcgggaatccctcagccagcccgacgaaaactgcagaggcttctgggccttttaactttggagaagttgaggaccttgtcgctcatttggcagaaggtgggacccggatctcagtcctggcaggaagggatggctcagaacctaggcggagtcaggtccgctgtggtcacgtctccggtgacccacttccagctctggtctttaccttgtaccgcccacctcagggcctggatgtaaaggcaccggttctcatttcctgctggttttgtttcattcattaatttagagacaaggtctccctgcagcctcgaacccctgggctcaagtgatcctccgccccagcctctccgtcccgagtagctgggacagcaggcacgtgccaccacacctggctgattttcagatttttttagatcaggtgtagctgtgttgtccaggctggtctcaaactccagccacaagcgatccttccacctcagcttcgaaaagtattgggattacagtagttagccatcgtgcctggccttttaaattttggaactttaggtttacctgaaagttgcagagctagatccccctagtgttaacataaactcagtacatttgtcaaaactaggaaattaacattggtataatactattaattgaactacacgctttattaatattctaccagtttttctgctaacgttcattttctgttccaggatcccaaccagaatattgtattgtattttgcctgtcttgtttttagccagtgttgagagaaggagtcgcctctgtcattccctccccgacaaataatgacctaacaactttttaaaatcaaagaactattcagtctttcaatttagtgaatatttattggtggtctgttatgtcctagacactgttttaggcactggcgatttagcattaaaccagataatcctgctgccatgggagctaaaaatagcccacacttgtacccactggttgtcttttgccattttgtatttcagtttttgttggtttgtttgttttaaatgtaagggcatgctgcttagaataattttcaagctgtgtgaaaatcaacgtcatttcaacttttctgccccttctggtttacactaagagctactataaacttccaggtgatagtattagctctttcatcatccattatttatcacattttttcccttcaaacttattactatcctgagaaaaacgcagtgcacaaagaaacagtaattaagaggactgaagaccctaccctaagtggagtttcatgtctttgtaatttttcgatgctttcacacataatccaggagaaaactaacgtcactctgcattcttccttcacaggtaccatgttttaaggaactgtcagttgctcagagataataagcagcctgaatttctttttatttctttgcatattgtgcaggagttcatgatcaagtgttgcccacaccaaatgcttcatccagagtcatagtacatgtggatctggattgcttttatgcacaagtagaaatgatctcaaatccagagctaaaagacaaacctttaggtaactgtagatttataatatttttaattgcataatgattagattagcaactcatcatgctcattatatactgatttattaaccttattaagaaagattttggaagcagttcttacagtgctttatagctggtcatttttgcttcactaccaagtgtaaattttacaagcctcatttaataagtggtgaatctgagaatagtgtagtcggcagaacaaatgaagagaaagcagaataaatgttacttttctgtgctggttagtagcttagtttgctggtcagatttctttttctcactatttgaaattttacaggctttgttctcaaaaacagcctcttattacattttagtggaagtgttcgtctgtcctcccctttctgaaattatctcttaaattgtgtaacatctaactaactagttggattttgaacataaacctaagtattattaagacagcaaacttgccgtaaaaacataagcatctttttaaataaaagccaaaataaattttatattggatatttgttgatatgctagcttgttttatcatttttattattcatattttaaattgagaaagataaagagattttctttcatgcatgcaggaaagattcctcttttagtgtaagcataaagaacatttttggttcacttgctgctaccctcttgtgcccactttggcttaataaatcccaatccagcctagctgatttactgaagaacaaagggatgactagtttttgctatgccaaggtgagtctaggatcttaaaacttttctaagggtgccaaggagttagaatcaggggacctaagttttttctcctgaaggcatttctgagtagtagcactgtgttataagatgttctgtagataatgcttaataaaaaaactgtaattaagtacgaatgaatgattattgggaagtgagggatatgaatgctccatgtttttgggggaaaacgaaagtagtctttcattttgtttttgttgttgttgttgagaaggggtctcactctgtagcccaagctgcagtgcagtggtgcgatcttggctcactgcaagctttgcctctggggctcaggtgattctcctgcctcagccttccaagtagctgggactagaggtgtgcgccaccatactcggttaatttttttgtatttttagtagagacggtttcaccatgttgccctgggtggtctcgtatgcttgaattcaggcgatccacctgccttggcctcccaaagtgcggggactacagacgtgagccaccgtgcccgaccagtagtgacatgcagtgatgaggccatataatgtaatgctctattaaaggactcctttttttagttaagaaatctagcaatctgattttttatgtagttcactgaggaatctcaaattattattacctttggttccatgattatatttttgggcattacctgatatatgaaaaaactttatataaaaataatgttgtttatgatatcaaaattttagaaacaatgtctaatagagaagtggacataaccttttttttctacatgtttgtattttacatattttaggtgaacattactcttacagtggtaagcaagtagtcaacttgtataaaaaaagagcaaataatttttagcaatcttgagtcaccaataaactagaattttttatgcagtctgtaaataaatgatcataatttaatcatttttgatagaacagttcaataagtagtacataactgttagatccctaaaaattgctgtagcccagcacttgttttatatattttatatacatattatattttatattgctttatattagcaagttacggagaagagaagttgagtttttctagcagcaaccagtatttagttgtactcaattattttcatccgttttttttttttttggtagaacatgccctattatatggcagtataaattaatctgcttttatattgtctggaaaaaaatcctagagagatttgatttgtatcttatcactgaagattccatagaatatattgatttaggttcatttttaaattttagaaatgtaatacatagattgccttttgtatatgaataattgatctatcgtctaacttttaattctgtgttattcagtgttttgttatttaataataactttccttcttcaaggagacaaaacaactagagattaaaagtggggtatggaaaaataatacattggtatattataattcataattaggagatagcttgaaaacctaatgtttctgcattatagagatttgatatatggaggctatgttttttaattgagacagggcttttgattcttatcaaaactgattgtcttacaatttagacaaatgtaatacggaattaataatatctttaaatgttttcttcaattgtgcttgggtttctcataaaatattttttacaggggttcaacagaaatatttggtggttacctgcaactatgaagctaggaaacttggagttaagaaacttatgaatgtcagagatgcaaaagaaaagtgtccacagttggtattagttaatggagaagacctgacccgctacagagaaatgtcttataaggttacaggtacaaatgataagcaatgtacttttagcattaatttttatgtaggatgcctgttcattacatgaattttttaataaatgtaaaataacataagtcaagatgctttttcctaataacttcttattttgggtcttgtcaactttaaaaattatgtgaaaggataactgtatgctatgaatagtatttttaagaagatgtatagttggaagtaattttaactcttattattgatgtttatataacagggaaaagtggaaaacaaagtttaaaagtgagaaaatgggaaactgtactgtaaaagatgccaggtctttaaaattttaagtttaaatgaattacgaagaaatatgttgttttctaatgcactaatgataattgaaagaggcttctgtaacatttgatcaacataattaaaaactgatttcttatgaaatattaataaaaatattggatatattaatattttcttaggttttatatatatactaaatattacaatgtagctaaactttcctatgctaaggtttgggtttaaatcttagtgttatagtaaattacaggaaaaatgaaaatgagtgtgcactggcacattgcaaatatagtaggttgatgcaaaagtaattgtggctttcacaattacttttaattgcgaaaaccgcaattacttaatatatagtgtaaaaatgtataatgatcagctttgcaattatttgtcttttttactttttttgttttttttttatgatagcaattttcagatgactggattaaatgtctataatatacaaagacctcttagaaattaacaggaaaaataaacctaataacaaaggacaaaggatatgaataggcagttgacaagaagagcctaacccagtgtctaacaattatagggaaaaaatgctcaaattcattagtggccaaggaaatttgaattagtaagatattttatatctgtcatacttgcccaaaattaaaagcaatgtgagaaaaaagtatcaagaacacttactgagtttaaagatgaatgttcttcaatccagtgatatcattgctgggagtttatcaaatagaaataaaatcataaggctgggtattgtggctcatacctgtaatcccagcacttttggagctgaggtaggaggattgcttgagcctagaagctcgaggctgtgagccgtgattgtgtcattgcattgcagcctgagtgcgcatgacagagtgagactcttgtctctaaaaaagaaagagaaccacaagtacataaagacatatgtacaacaatgtttatcatagcatggtttatgattgtcaaaagtatggaaggaaaaatgcccatcaagagaaatagccaaataaactaaaacatctgtataatggatattatatagccattaaaaagaattcattggtgcaatactatttgactgatggagatagggcttgttgagtgaataaaaggcaaggtacaaagtcatgtatcatgtttttccaaatgtgtaaaattatggcctaaatgcctcctctcatattcatcatatagatgaagaagagtaaatcattgttttgatttgcagttttccatgagtaaggttgagtattttttcatatatttttggtcatttatgtatttttttctgttaacgtattcacttgcacctgtttttaatttgggttgttcatctttttctaagtactaagtacctagtactttttgtgttaggtattttttgaaaaaagttactttatcaatttttctcacagtatttttctgagttgaagtaggcgcgtagccagttagtcctttactgtatttatctctgatctgtttataaccttattatttatttcatattttgatgctactgcatatatacctttcttcaaggtattttttttttctgtaattacagactcctcttttgggccctatataattatatgtttaataaatgtatcttgcttatgaagttgataccaagaaagaggttaacttcaggaatggaggctgggcatggtggcttatgcctgtaatcccaacactttgggaggctgtggtggggtatcatttgaggtcagtctgggcaatataacatagcaagaccctgtctctacaaaagttaaaaaaaaaaaaagttagctggtagcatgtgcctgcagtcccagaggccgaggtaggaggattgcttgggcccaggaggtcaaggctgtactgagctgtggtgtgctactccactccagcctgggcaacagtgagaccctgtctcattaaaactacagcaacaacaaaaaccttcagggacgggataattagggatttgtcctgtgacctaaaatcagtcaatatttagtgatccaccagcttcgtgcatgattctgtatttaacttgcttttctatttagtgcttaaagccttatcctttatttttcttatgtagtattcttttgataaactcttgttttctacatgttactttgcatatcaggtatatacttttgaaaataaattgccgaaattgatgaaggaaatgcaaaacaatcattttctttgattagacatattgtcagtctgtcctgaaaggaggtaatagttttctctaggtaatagttttctcaggagtgatttttggtgtttgccatgtcacattgttacctttattggtttcccctcacattgtcaatgttgacatcaacaaaacaaaaaagcacctttggtgtttgtgaaaaaacatgatctatgtggaatgagatagtccttttatttctgagcttcagattatatgaccttaagaatctatgcatttttgtatactaagagacttgcatttgttttctcttatccagctggtgtcagtagaaagtgattcagagggaagtgaaaaactttctcaatgattttaaagttattagtctcaatgttaatatatgaaaattgatagtttttttgaatttattttgaattttggttcagcttaatctagtaaacatttgacttgaggactagatattgtgctagacgctgggcatttgaatacctgtaagttgtggttcatctctgcctctctgtcctaaggaatattcttgggaatggctaataaaaataccacgttatagtatattttgaaagttgactgactttctgttttattcagtaataattggacattttaaatattattttgttttgcctcttttaaactcttggagaaaatatagctaaaatatactattacttgtttttaactttcctgagcagcctatagtttattctttgacacatttcttcaaggtcaccaatttactataagcattgatatttaatgtactacagatataaaaattataggtgtagaagattgagctagatatattgccatgaataactgccctaggaatgtcatttttagacttttttgaaaatattgcctttatacaagatgtggtacagaaaaaacgtcaattaactgagggctttattaaagatattatggaactatgaatgtatataaaacctttaacaataaatttgataaatttttaagcactagatagttaaatttatcctagttataacttcatttacatttgtgctccaatattatttcaatttagaattactggaagaatttagtccagttgttgagagacttggatttgatgaaaattttgtggatctaacagaaatggttgagaagagactacagcagctgcaaagtgatgaactttctgcggtgactgtgtcgggtcatgtatacaataatcagtgtgagtgggttcttattcattctacctactaaccaaaagtacatacatttcttaatgttcagtgagttcgctgtgtgattctgaaagattcatgacttttgttggaggtatagttatatttagtcagtaatctgtctaggacagctaaaattaggtgctgctattccataataagtgttaagattttgatgacatgtagctcaatgctctgtgcacttttcatttgcacagagcattgttcctgttcatctgcacagagcattcatctgtgcagagttttcgtctgacacagtgcattggttcccattttagaaagccatacccagctgggcacagtggagcgcccctgtagtcccagctgtttgggagactgagctgagaagattgcttgaacccaggagtttgagtccagcctaggcaacagagcaagatcccatctcttaaggaaacaaaaagccatacctctgtaggtcattcttaagttgtaagagttggcttcttaatatgctttttggaataattttttattattctaaaacaatctctaagcagagttttcaggtaggctagatttgcctttgatgtgtcttttacatgttcccttcgattcccctttgatgtgtgttttacatgttcacttcgattcccctgagaccctcatgttgctctctgaattcccaagttagcacttttggaatgttgtccagggctatctgccatgtgctagaatcttctccaagctcctatttaatctgttcaaataatctttgtcaaagttagcaagaaagcagaatggtttgtctccttcatatattgagatatgaatgactgatggtgtttccagtgatatttacatttgaaaataagctgcagtaagcaccagtgaatatctgattaggctttcagacatcttatgactctgctggtgactcccctatcataccacatacaagacaaggtactctgctgttgtgtaagacttgtctgacccttttgctcttaagcctccccatgcatttcctcttatcctcttttttgagaactagacatcggtctacagaatagttctccacagaagaaaagcagtagaaccacagtttctagaatacatggagcttttcctgtatcttttgtacttgtgctcatttgtaacttaaaagggctaactagcaagaatatttcaaatatatttctgtataatttttaaggcaaacttggattttattggttagagtacattatagagagctaggttttatatcccaaaaagggaaatgtggaattattgattaattcttcctctttcatacagattttattaaaattttttgtaaacctacagaaaagttgacagaatagtacaaaaaatacccattatgtcttttctttttttttttttttttttttgagacagagtctcactctgtcgcccaggccggagtgcagtgatgtgatctcggctcactgcaacctccacctcctgggttcaagcaattctcctgcttcagcctcccgactagctgggactacaggcatgtgccactacacccggctaatttttttatttttagtagagacggggtttcaccatgttggccaggctggtcttgaactcctaatctcagatgatccgcttgccttggcctcccaaagtgctgggattataggcatgagccactactcctggcccattatgtcctttcttgtagataaaccagttgttatcgttttgccacatttgctttctcttgttctctctatggattgcttggttggttgatgagctatttggaagtaaattgcagacatcctgacatttcatctctaaatacttttagcgttagtctctttgaggttaggatggtttcatgtcattccaacactgttttacacctaaagcaaatttatttttatataattttcttacacttttcataaaagagctctaaaactgtgtacaggtcagagattgtttctagcagcatatactgctagtgcgtggttaagatttagatctttaaagtataatgttagctttcttgttatataataatacttctatgcctacttacgggtaaatatgagtaaaagttttgccaatgtcagtaggaatttttttatgagatcagttttcacaatgtgttaattattaagcactcccactacacagtcactatcacaggcccttggaatttgcttattgaatttgtttacagtattcctatgaagcatgaaagagattagtcaagtggataacagggtggcagtgatctcttagtccatttagtgttgctttaacagaatacctgagactgggtaatttataaagaaaaaaaggtttatttggttcatgattcttgtggctggaaaagtcaaggttaggcctctggtgagggcctcaggctgtttccactcatggtggaaggcaaaagggagccagtgtgtgcagagatcacatggtgagagaggaagcaagggctgggggaggtgccaggctcttttaacaaccagctgtctttggaactaatacagtcagaaacttacccctgagggagggctttaatctattcatgagggatccacccctgtgatcccaacacctcccatttgaccccacctccaacactggggatcaaattacaacatgaggtttggaggggacaaatatcacaaccataccaggtgatgatggtggtggttgtggtggtggtggttgttggatatagactaagccctctaccttttaaaaattattttgtgaaaaagaaaaaggtttttcttgtgactttgaatgacatttgttgtttttaaagctataaacctgcttgacgtcttgcacatcagactacttgttggatctcagattgcagcagagatgcgggaagccatgtataatcagttggggctcactggctgtgctggagtggcttctaataaactgttggcaaaattagtttctggtgtctttaaaccaaatcaacaaacagtcttattacctgaaagttgtcaacatcttattcatagtttgaatcacataaaggaaatacctggtaagacaaatatatttgaaaagtacatatacgtcttattttatttcttttaatttaaaaaattatagatacaatgtaattaattcttaggtagagttgtctgtgagtttgtgtgcatgtgtgtgtgtgtgtatacttggttcctggaaaaaactaagaaaaattgtaatgttttctcaagcaaatttggattaagaaatatgtgaaggtacttttcttattttatctacttttgtatggttagaatatggtcatgaaagttatagcctagaaacatatggtcctttatttccagtccctgggtcatactcttatactgtacattgcctctagagaggggagttcgtcttttactaactcttttgggattacatataaaatattaaggctacaatggactttccaaaacatctaggccaaggtcctcattttaaagattaggaaactgatttccatgaggagttcggtgacctgtttaggtcatggggcaagtttgtatctttgaagattaaatacccaagtttttataggccatcaatatgttgaactacatttctgtggtattgctagggaataagatgttataaaagagttctgtggaagtgaatttctaataccactgaaacttagatgtcatacttcacatttttaactgatacttgcgtgattccaaaatgtattatacactgccttgccttccttagtatagtataactataatttgaagttttttggatgactttggtagtgcattctgaagaacaatgtcaggttgtaataaactgaggactatatactggtgcaaaacattcttacttggctttactttcgagttcttgtatctttttttttttttttttaacaggctttctcctttctcacttattgccaaattgccaaccttcttttttttctgctgtgaaaaatctgtcactctactttaatagttccccctacatagccatctcctccaacttactgcttttactgtgcaagaaaaccagataactgtggaattactgtttttgaatgaaaagaataaggagacattaaatagcctgttttctcttgtgaataaagtatgaccgaattttagtgcaagaactttgtgacagttttgctagcaagattttttgtttgtttgctttctggctcatagttgtattctggatggtaaatgttagatatgacttatggataaatgtgtggtggtgcgtataggaatcagttaggttacctaatatgtacacttaatttattttaattgctctagtggcagcctttttgtatattaataataatcatgatttctgaatatttctggaatattacataacaggtggtaaaatttttgttttagtaagacagcatttattggctgtctctgtattcattttattttactgcattttgtgaggacttcaaagaggtgcatataattcaggagccctgagtggaagaacagcaacctagtttgcaatggggtttgatctttgcaaaatacagtagtcccccattatctgcagtttcacttttcacagtttctattacctgcagtcaactgtggtctgaaaataataagatattttgagagagagaggcagagaccacattcacataacttgtatattgtatattgttatagttctgttttattattattgttaatctcttactgtgcctaatttataaattaaactttatcataggtatatatgtaatgggaaaaacagtactgtatatatagggtttgatactgtccatggtttcaggcatccactgaaggtcttagaatgtatcccctgtggataaggggggactactgtataaattatagaacttaaagataagattgatatatttataatattttaattagctttgttttaaggagaaaagctattttaacattgtatgcatttctttttatttaggtattggctataaaactgccaaatgtcttgaagcactgggtatcaatagtgtgcgtgatctccaaaccttttcacccaaaattttagaaaaagaattaggaatttcagttgctcagcgtatccaaaagctcagttttggagaggataactcccctgtgatactctcaggaccacctcaggtacatgatgatacttattttaattaagtactggttatcacattatttgagataaagatttctagttttagtaccatgttcttactattctagtttgcttagtatgtgatccctttcctattagaaggctgatttattattaatagattggattaataagtattcttaaatggaatcttaagcattgatattttgatatcttaagttagctactatgattgaagacagtgcaacttaattttaatagcctataatgcatatatgaggcaaaatattttaatctgttaaaaatcttgttttcagagtagtccagtgatttagcaaatgggaaaggtataatcacccagttaacattgactgatttttttgctatgggacaagcactttactgagtgctttaaatatgttagtccatttaatcttcacaacaaagcatcaaggtaggtagtactgttgtttgtccattccttcttacttctcttctttccttccttccttccattctctctctctcaagatgaggataccgtactttagaaaggttaaataacttgtccaaggataaacttagattcaagtcctaggtgattaagaactcttgccataatcatacaataaagcttggagttggtactagagctttagagttttcataactttgaattattttatattaactgttttatattaactgttaatacagtaatattttatattaactttctagtgagtacaatagcttgcagataaaaaactgttaatataaaagtgaactaaatggctcaaactaaggacaagaggtaagttagtgaagaatgtattgaatatttatttgactgtacactgataataattagatatagttatttgagtttgtgctaatccttatttatgcttctttgatagtcctttagtgaagaagattcatttaaaaaatgttcatctgaagttgaagctaaaaataagattgaagaactacttgctagtcttttaaacaggtgattttcaatccattttgccaagtcatcctatgtattcattctatatacggtatgtggaaagaatatttgatgttccatcttggaactgacagattatctggagactaaacaatgtaaaaataatttatcatgggatttctctgctttataaactgttgtaaagatggtaatagggggtcttacctaaattgaattcattggtcttaattctgttaacactgtggttatgctatggatctaaagctgcagatagttacctaaaggggttttatggatatttctaacatttctagacttattctggtcttcaggtgagaagaagaagttttaatttttccctgtggcaattgcaaagcctctgccctcaacctaatagttagttgcatttcattaagttagtaccatgctaaatacaaatacatgcgaaatacaaaacccgtgaaattaaccatttatctgtgcctctgctaatagttacttgcatttcattaagaagaaaaaaatgcaaagaggaataatactgtcataattctaaaactcctgatacaggaacaactatataaatttgtgattgttgaggataggaaattattaaagtaacagtgatggaagaagcagaagaacccttgtatctcttttgcctcagactgtaaaataaaatggagtcgaaggaaagaatggctagctggcgctgtgtgtgagtagggtgagtgactgcaggtgtgtgcagggtttctgatctgtatgtaaagagtatcaactggggttataaatatatgagtagtacaagataaactgaaaaggaaatttaattttgtggtgctccttgtcattatacatgtatttctcaatattccatattccacagatgagtattatctgttttcgtcccatttctttgtttctcctcttcttgttagaaatttctcaaattgtggtttcagggctctaacagtttagagtaggtgtgcttctctaatgattctaggaggactaactgtatttagagaaaatggtttttggttggttctaagtctgagaaaactgaagaagtgaaatttcctccaactttgctgtcgtgtgcaatgtggcactcaaatgtcttgagcagagccatgcagctcattgttggctgcatgcagctggggctggctgtatgactggcctccagtgatatgactcaggctgggcctgcgagtatgctagtgaaactgggtcatttgcttcagctaaatagaagactaccctgaaatgcctaacctttggagacagttcttcacatagaaaaaccacaagaagtataagttttacaggttctcttatttgaagagtcaacccagaagtgagaccaggtgctctaaacctgtgaaatacaaaacctgtgaaattaaccatttatctgtatctctgcttcccggctccttttctcccacaccacgggcccttatttcagtgactgaattataacaccatctaagtgacttgcaaaaaaaaaaattacaggagtgtgtgtgtgtgtgtgtgtgtgtgtatttgtgtataattagttttgttttctctagagtatgttatgattaatactataggtatgtaagaaatgtaaaaccgtattatttttaatccatcctctaggcactagtttaagattgcttacgatacagcctttttctaatgtgtcttaattagcatatcatactctttgaattgcataattaatataacacgtttaactggaagatatttaaactagtaaccatttaaggtattttatcctagttaagcagccatcgagaagttttgtcacaaagcagtaagagatagaaaaaattatttactacagaactatttaattttttatgtttttgcgatagggtcttgctctgtcacccaggctggatggcagtagtgcagttagggctcactgcagcctcagcctcctgggctcaagcaatcctcccacctcaaccgccagaatagctgggaaggcacctgccatcaagcctagctaatttttaaatttttgtagatgaggtcttgctatgttgcccaggctggtcttgaactcctgggctcaagtgatcctcccacctcaacttcccaaagtgttgggattacaggtacgaggcaccgtgcctggcccagaactatttttttcagatcagaatcttcaagttgagtgtgtttaacaatgtgcaatacttgcattttatgtttgagatttggttttatatgcattgccatgtgtataaaaagggaaatgttatcctttaatgacattttttccagtactacttaagtgaatttgtcatatcactaaaacctttgtttcaacaccaaaaccaagacatttgcatgaaactcttctaaaaaatgcatgtactcatattgtatattaattatatactaaatatagtatatgctcttttaagatattgctctaataagctatcatataatggtaatagtgattactctttaacaaaagtaatgtcattttgtaaaaaaaaatcttttttttggtaatctcgtaagaaaaaagtttgaaaaaagttcttttgttatttttcacttatttgcttttgtcagtgaatgattcagtttcttaaatttcctgctgattttaatttgttgccttttggttaggtgtgttggcttacgtctgtaatcccagcattttgggaggctgaggtggggggatcacctgaggtcaggagttcgagaccagcctggccaacatggcaaaaccacctctctactaaaaatacaaaaattagccaggtgtggtcacacatgcctgtagtcccagctactcaggaggctgaggcaggagaattgcttgaacctgggaggtgaaggttgcagtgagctgagattgtgccaccacattccagcctgggcaacagagtgagactccatctcaaaaaaaaaaaattggttgcttttagttttgttttggatctgtattataaaacagtttgttatgattgtatcttatatctcttctatttctgacagcactcaattctgagtgaggcctgagagcttgacatctaaacattcagagttttagtgcatagactttgtgatgattatttggatactcagggacctttattgcttactattttgttatctgctatatgtataattgtcatatttaacaaaatctggcacctttagataaatgagatgttacataatttaaaaaggtaatacttttctaattccttatttccactttctctttatttttagagtatgccaagatggaaggaagcctcatacagtgagattaataatccgtcggtattcctctgagaagcactatggtcgtgagagtcgtcagtgccctattccttcacatgtaattcagaaattagggacaggtatggactagttttccaacagtttcattagcaggttgaactcttaaataagccaactttgaatgagaaatatgctccaaaaatggagggtcttcacagggaattagcaagcaattaaatgcttttattctatcaggaattttcactggaaaactttgttgtttgtttatttatttatttattttttgagacagggtcttgctctgcaccaaggctgaagtgcagtggtgctgtgatagctcactgcagcctttgtctcccaggctcaaacaattcttctgccccagcctcccgagtagctgggacagtaggtgcatgctaccagacctggctaacttttttgatatttaggatagacagggtctcaaactcctgagctcaagcaatccttctgcctcagcctccgaaagtgctgggattatgggcatgagctactgcacctggccttgtttttaaatagataattaagtaaagagtcatttaagaatgttttccaagttcaaagagaacaaaactgtgataactgtatagcatgagataacttctttatgggcatttagattgtttccattttgaagaacatttaaatgcaagtcattggatgggcatatgcatatgttttcatttatcttgggtagatttcaaagagtggaattgctggatcatatggtaacatgaactgtttaagaagctgccaacttttttccaaagtttgtgtattaatttacattttcatcaacaatatttgaaggttccagtttttcatattttcgccaatatttgtattatcagtctctttgattatagttgttctagcggtatatagtagtgtggtttttcttttatggatagtgtttttggtgttatatgtaaaaattctttgcctaactcaaaggtcacagatatttttttctgttttctgttagaagttttatagtttttaagctttatgtttaggtccattttgagttaatttttttatgtgtggtatacggtaagggtcttcattctttgctttgcatgtgggtatccagttgttcctgcatcatttgttgaagactattctccacccactgaattaccatgacatctttgtcaaaaattaattgaccataaatataagagtttatttcctgactttcttgtttcattggtctatatgtttatccttaacactgattccaccctgtggtggtctctgctgctctgtttatttttctgtagtctttttttttttccgttttttcttacaaagtggataatttgtattgagctgcctgtaagttctctgattcatctgtcatctcataaccgctgttgcccctgtagtgatttgttggttttggttactgtactttttaaactctagaatttctgtttgtcttttgtttatatgtttggttttgtttctttatcaagattctcctttttttgtagtcattatattttactttaattctttaaacatggttgtctttaattctttggacatatctataataatgaatttgaagtctttgctaagtccacctcaaagtcaatttatgttaactgcttttcctcccaaatatgtatcacactttcctgtttctttgcatgttttgaactattttattgaaaactgaacctcatagataatgtattgtagcaactctggatttacaattttttcttgtagggttttttcttttttgtttcctgtacttctttttaggtaacttgtctgaacgtaatctgcagaatttacctcccctgtgctgtgtagccactgatttctctgctcaagtgttttttttttttttttccattcaaatttttattttaatactggcttctgggaagttgcccatgtctgtatagtttcatggttagccagtgattggcaaaggttttgctcaaacactagagtctggaagccgtctacctctgccagtggataagtgtatgggttggagagggcttaaaaaatttaggccattttcccatactgcccaaagtaatttataggttcaatgccatccccatcaagctaccactaactttcttcacagaattggaaaaaaatactttaaattgcatatggaaccaaaaatgagcccctatagccaagacaatcctaaataaaaagaacaaagctggaggcatcatgctacctgacttcaaactatactacaaggctacagtaaccaaaacagcatggtactggcagaaaaacagagaatacagaacaatggaacagaacagaggcctcagaaataacaccacacatctacaaccatctgatctttgacagacctgacagaaacaagcaatggggaaaggattccctatataataaatggtgctaggaaaactggctagccatatgtagaaagttgaaactggatcccttccttacaccttatacaaaagttaactcaagatggattaaagacttaaatgttagacctgaaatcataaaaaccctagaagaaaacctaggcaatagcatttagtacataagcatgggcaaagacctcatgactaaaacaccaaaagcaatggcaacaaaagccaaaattgacagatgggacctaattaaactaaagagcttctgcacagcaaaagaaactattagcagagtgaacaggcaacctacagaatgggagaaaatttttgcaatctacccatctgacaaagggctaatatccagaatctacaaagaagttaaacaaatttacaagaaaaaagcaaacaaccccatcaaaaagtgggcaaaggatatgaacagacacttttcaaaagaagacatttatgctgccaacagacatatgaaaaaatgctcatcattgctggtcattagagaaatacaaatcaaaaccacaatgagataccatctcacgccagttagaatggcgatcattaaaaagtcaggaaacaacagatgctggagaggatgtggagaaataggaacacttttacactgttggtgggagtgtaaattagttcaaccattgtggatgacagtgtggtgattcctcaaggatctagaactagaaataccatttgacccagtgatcccattactgggtatatacccaaaagattataaatcatgctactataaagacacatgcacgcgtatgtttattgtggcactattcacaatagcaaagacttggaaccaacccaaatgtccatcagtaatagactggataaagaaaacgtgtcacatatacatcatggaatactatgcagccataaaaaaggatgagttcatgtcctttgcaaggacatggatgaagctggaaaccatcattctcagcaaactatcaccaggatagaaaaccacacaccacatgttctcactcataagtgggagttgaacaacgaggacacatggacacagggaggagaacatcacacaccggggcctatctggatggagggctgagggagggatagcattaggagaaatacctaatgtaaatgaagagttgataggtgtagcaaactaacacggtacatgtatacctatgtaacaaatctgcacattgtgcacatgaaccccagaacttaaagtataaaagaaaaaaaattaggccattttcaagtttttcttgaattttaatttctgctaggccctctttatctccccatgatgtgcatgtagccctttcagtaaggagtgtatggggagcttgggccctctgtggccttccatttatttgcatgtagcctcctagtcaactagggttgtaaggggagcctatgtagtccctctttggttctctcatttccaaatctcctggtgacatatctggctggtccactgatctgtccttcacccgaaccacgactgaagcttcagactagcagagctgtgggatcttcccattcgtttcctatcaaatttgctcattttactggcaacactgctgagtgtgggcttttgcccactgcctcaaatcaggtctgtcccctctggaagtgaaactgctggcttttgcagccttcaccctgtaccaactgagctatgtaaagggacattcgaacagtcccagacagtgaagctgctatctcctactttcttagctaacatatagcagctgttcatagatcagtacttctcactttgtttgcctttggttcatttccagatttccaccaaaatgattgtttttgacaatgttgttcagttttatagtagctttttgagagaggattttctgaccatatcagtgtagtataaccagaaatcccatatttcaaatcttttgaaaatttttaaccatttagtattaatattgaaatgtcttaatttggtatataatgtcaagatgcccagtgatatttaggattttaatttcttaatctcagcaatataaaatatattatgctcttaatattaattataatgtttattcttaaacattttatttaggaaattatgatgtgatgaccccaatggttgatatacttatgaaactttttcgaaatatggtgaatgtgaagatgccatttcaccttacccttctaagtgtgtgcttctgcaaccttaaagcactaaatactgctaagaaagggcttattgattattatttaatgccatcattatcaactacttcacgctctggcaagcacagttttgtaagtacactcttttttgttcagttttctaagtatactcttatgggatttgtgtggttacattacaaatctaagtgcttgtctttttgatatagtttagagattcttttgggtgatattgtttaggtgattaacttgtttataatacctatcttatggtttctggccttaaatatgctgtgatctaagaagaaaacataagcatcactggataaaagagagaaccattatggaggttctctattttggaattgttaacacattttatagtatataaaaatatgatggattagctcataagtattaaaatatttgcagatattagaaatcacatctttttgtcttttagctgacacatgagctactagtacctttcccatgattcttttgttaaagtatttacattttcttcattttgaaatagtattgaattttgatagcaatattgatagatttgactactgatttcatagttgtaaagttaacagtgtggcaatagaaaggcagaggccagtcacattttcagacgactaaaacaaaacccttttattaatagacaaaccactatttagtaaatgtgggttgccttaaaaacaattattttttactaaattgttcatgcctataattaactcaatttaaaatacttttgtgtttgtttagtcagtataattttagtaaccttttcattttcatttaagtttaaagtgagaacaggatagtgtatggaaatagtgaattaatgctctcttcaaattacttttttctgtgacccttcttattccatttattaaatttaaaaaagtgttttctttttacattttaattaatctgtgaaattggaattaaaagtgctcatttatagtggcattagaaaagtaaatataagtgaaagtaccttgtatgtatttgtcacacagtaggtagtcaataaatataagggcctgaatcttttctactacttttacttttttggagttcatattgtgttgatgtttacggagttatatttgactatgtttatatttttatggtgcttgaaactaaaggatttaaatgaaaaactgtatagaaaaattatgcaagttagagttgaaagtgtctttaaatttttattttatataaatataaactagtactatatcttgatgatgttgggttttgttataggctttttttttctttttgttaaaagttaccctttagaatagtaatttttggaaaactagcccttgatgctatatgtgtatgtttttttgaaaaatacccttaggtgaacttgcttttctaggccgccattcttttatttatagaattgaaagtttggttgcatgattgttacaatcttcccaggtctccaaatgcatatttacctctgtctcagtgctatctaggaaggaaacctcttcctggaatagtgggtagagattcacaaaatagtgtgaataattgtggtagtagatctctagttgtttggaactggccacaaagagttgtatttgttgagtaggttagaaacatgtcagataatagctacaggcacacagcagcagcagcgatatttaaaagatatcagatatgtaaattagtctgttattcttgtgttctagaaaatgaaagacactcatatggaagattttcccaaagacaaagaaacaaaccgggatttcctaccaagtggaagaattgaaagtacaagaactagggagtctccactagataccacaaatttttctaaagaaaaagacattaatgaattcccactctgttcacttcctgaaggtgttgaccaagaagtcttcaagcagcttccagtagatattcaagaagaaatcctttctggaaaatctagggaaaaatttcaagggaaaggaagtgtgagttgtccattacatgcctctagaggagtattatctttcttttctaaaaaacaaatgcaagatattcccataaatcctagagatcatttatccagtagcaaacaggtatcctctgtatctccttgtgaaccgggaacatcaggctttaatagcagtagttcttcttacatgtctagccaaaaggattattcatattatttagataatagattaaaagatgaacgaataagtcaaggacctaaagaacctcaaggattccactttacaaattcaaaccctgctgtgtctgcttttcattcatttccaaacttgcagagtgagcaacttttctccagaaaccacactacagatagccataagcaaacagtagcaacagactctcatgaaggacttacagaaaatagagagccagattctgttgatgagaaaattactttcccttctgacattgatcctcaagttttctatgaactaccagaagcagtacaaaaggaactgctggcagagtggaagagaacaggatcagatttccacattggacataaataagcatattcagcaaaaaggtctgaaaagcaagggaataccattattttcggattagcggtttattaagctcttctatattaaacactaatagatattcaataacggagtaaactgttccagataaagcaagaatagttgcaagaagtaaattctggcacaaagcgtaaaaatataacagaagaaataatgtaaaatactatcttttatgtctaaagccattttatattacttttcaataaaaagaatatcatggtcaacatagaatatttttcatgaattggtggggagatgtatatgtttatatataaaaaatagccaaatcgttgcaatgatatggtaaaggacacattttttttttttttcctgtgaaatgtggaatatctcaaattcagcctcttaggctgaatagcaaatcctactgccaactaacctattaaaaatatagatagttttgactaaagtactacattacatttagtatgttgacttttaaaataccaaagcaatttatattcaattaatgcttcttcatacaccaagaatctaccacaatacacagcacacaaaggccgttcaataaacattgaatgaatgaatggtttggctagggccagggtggggagttaaagtgagaggagggtatatgttatagagaacagtggtagaaggaactctccgtgcaagtaaattaagggaaagatgggacaccagaaaggcaaggtgatgggcctataagcatactggataatggaagaagtccatttctttctagctagtttgaagggcctaaaagcactgagatgtttttgtatcttccctacatttggagatgatattaggttgtcataacaaccacaaatatagaccattactaaattggtggatgtcctctttctcccattgttattgccttcctcttttgcctgctaaactaaaaattggatataagattgagaatgtattatataatttgcaagacatagaggatgtttatagaatatactaaagtatccctcagcaccaatatgggagtatcctggtctcaagtttataatttttgcacatataatctaaagaagagactttaaaaataaagtacacaaatatgaaccaaagagtagcttaaaaatactttcttctaggtctgaaattttcttttctttctttttttgttttggagacagagtctcactctgtcgcccagggtggagtacagtggcgcaatcccagctcactacaacctccgcctcccaggttcaagcaattctcctgcctcagcctcctgagtagctgggattacacgcatgccctaccacacccagcaaatttttgtatttttagtagagatgacatttcaccatattggccaggctggtctcgaactcctggtctcaggtgatcctccaccttggcctcccaaagtgctgggattacaggtgt

SEQ ID NO: 24852 - DNA, 3846 bp, Homo Sapiens
gccccacgctgaaagagagtgatggagtgcccagtgatggaaactggctcactttttacctcaggaattaagagacatttgaaagacaaaagaatttcaaagactactaagttgaatgtttctcttgcttcaaaaataaaaacaaaaatactaaataattcttctattttcaaaatatctttaaagcacaacaacagggcattagctcaggctcttagtagagaaaaagagaattctcgaagaattacaactgaaaagatgctattgcaaaaagaagtagagaaactgaattttgagaacacatttcttcgcctaaagctaaataacttgaataagaagcttatagacatagaagctctcatgaacaataacttgataactgcaattgaaatgagcagtctttctgagttccatcagagttcctttctactgtcagctagcaagaagaaacgaattagtaaacagtgcaagttgatgcgtcttccatttgcaagggttccattaacttcaaatgatgatgaagatgaagataaagagaaaatgcagtgtgacaacaatattaaatcaaagacattacctgatattccctcttcaggaagaacaacacaacctttatcaactcaggataattcgggagtgttatttcttaaagaaaataatcaacatgtatatggtttagatgattcagaacatatttcttctatagttgatgtacctcccagagaaagccattcccactcagaccaaagttctaagacttctctaatgagtgagatgagaaacgcccagtctattggccgcagatgggagaaaccatctcctagtaatgtgactgaaaggaagaagcgtgggtcatcttgggaatcaaataatctttctgcagacactccctgtgcaacagttttagataaacaacacatttcaagtccagaattaaattgcaataatgagataaatggtcatactaatgaaacaaatactgaaatgcaaagaaataaacaggatcttcctggcttatcttctgagtctgccagagaacctaatgcagagtgcatgaatcaaattgaggataatgatgactttcaattgcagaaaactgtgtatgatgctgacatggatttaactgctagtgaagtcagcaaaattgtcacagtctcaacaggcattaaaaagaaaagtaataaaaaaacaaatgaacatggaatgaaaactttcagaaaagtgaaagattccagctctgaaaaaaagagagaaagatcaaagagacagtttaaaaatagttcagatgtcgatattggggaaaagattgaaaacaggacagaaagatctgatgtcctggatggcaaaaggggtgcagaagatcccggtttatttttcaataatgaacagctggctcagatgaatgaacagctggctcaggtgaatgaactaaagaaaatgacccttcaaactggctttgaacaaggtgacagagaaaatgtactgtgtaataaaaaggagaaaagagtaacaaatgagcaagaggaaacatactctttatcccaaagttcaggtaaatttcaccaggagagtaaatttgataagggtcagaattccctaacttgtaataaaagtaaagcttctagacagacatttgtgattcacaaattagaaaaagataacttactcccaaaccaaaaggataaagtaaccatttatgaaaacctagacgtcacaaatgaatttcacacagccaatctttccaccaaagataatggaaatttatgtgattatgggacccacaatatattggatttgaaaaagtatgtcactgatattcaaccctcagagcaaaatgaatcaaacattaataagcttagaaagaaagtaaaccggaagacagaaataatttctggaatgaaccacatgtatgaggataatgataaagatgtggtgcatggcctaaaaaaaggtaatttttttttcaaaacccaagaggataaagaacctatctctgaaagcatagaagtttccaaagagcttcaaatcccagctctttctactagagataatgaaaatcaatgtgactataggacccagaatgtgttgggtttgcaaaagcagatcaccaatatgtaccccgttcagcaaaatgaatcaaaagttaataagaagcttaggcagaaagtaaatcggaagacagaaataatttctgaagtgaatcatttagataatgacaaaagtatagaatacacagttaaaagtcactcactctttttaacgcaaaaagataaggaaatcatccccggaaacctagaagacccaagtgagtttgaaacacctgctctttctaccaaagatagtggaaacctgtatgattctgagattcaaaatgttttgggggtgaaacatggccatgatatgcaacctgcttgtcaaaatgattcaaaaataggtaagaagcctagactaaatgtatgtcaaaagtcagaaataattcctgaaaccaaccaaatatatgagaatgataacaaaggtgtacatgacctagaaaaagataacttcttctctctaaccccaaaggataaagaaacaatttctgaaaatctacaagtcacaaatgaatttcaaacagttgatcttctcatcaaagataatggaaatttatgtgattatgacacccagaatatattggagttgaaaaagtatgttactgataggaaatctgctgagcaaaatgaatcaaaaataaataagctcaggaataaagtgaattggaagacagaaataatttctgaaatgaaccagatatatgaggataatgataaagatgcacatgtccaagaaagctatacaaaagatcttgattttaaagtaaataaatctaaacaaaaacttgaatgccaagacattatcaataaacactatatggaagtcaacagtaatgaaaaggaaagttgtgatcaaattttagattcctacaaagtagttaaaaaacgtaagaaagaatcatcatgcaaggcaaagaacattttgacaaaagctaagaacaaacttgcttcacagttaacagaatcttcacagacatctatctccttagaatctgatttaaaacatattactagtgaagcagattctgatccaggaaacccagttgaactatgtaagactcagaagcaaagcactaccactttgaataaaaaagatctcccttttgtggaagaaataaaagaaggagagtgtcaggttaaaaaggtaaataaaatgacatctaagtcaaagaaaaggaagacctccatagatccttctccagagagccatgaagtaatggaaagaatacttgacagcgttcagggaaagtctactgtatctgaacaagctgataaggaaaacaatttggagaatgagaaaatggtcaaaaataagccagacttttacacaaaggcatttagatctttgtctgagatacattcacctaacatacaagattcttcctttgacagtgttcgtgaaggtttagtacctttgagcgtttcttctggtaaaaatgtgataataaaagaaaattttgccttggagtgctccccagcctttcaagtaagtgatgatgagcatgagaagatgaacaagatgaaatttaaagtcaaccggagaacccaaaaatcaggaataggtgatagaccattacaggacttgtcaaataccagttttgtttcaaataacactgctgaatctgaaaataagtcagaagatctatcttcagaacggacaagcagaagaagaaggtgtactcctttctattttaaagagccaagcctcagagacaagatgagaagatgaagtgaatttatggattctggtttttct

SEQ ID NO: 24853 - DNA, 3464 bp, Homo Sapiens
agcggcggcagtcgggaccgactgcaaggcaggttgagatgatggatctgaggcttgcagctcgcagtcccaacgagccttagggaccagggctaccaaaagggtggggagaacggtggtggcatctgtctgttgcctgggatccaggcgcccggttggggaatccttacttcaggaagcgcagccgcggctctgtgttttgagagtgcaaatgtcatttgtcagagtgaaccgctgtggtccccgagttggtgtaagaaagacaccgaaagtaaagaagaagaaaacttcagtgaaacaagaatgggataataccgtgactgatctaaccgttcatcgggcaactcccgaagatctggtacgccgtcatgaaatacacaaatcgaagaatagagcattagtacactgggaactccaagaaaaagctttgaagagaaaatggaggaagcagaaaccagaaactttaaatcttgagaaaagaagattgtctatcatgaaggagattctttctgatcaataccagatgcaagatgtgttggagaaatctgatcatctaatagctgcagcaaaagagctgtttcctcgtaggcgcacagggtttccaaatgtaacagtggctcctgattcctctcagggtcccattgtggtaaatcaagaccctatcacccaatctatctttaatgagtctgtcatagaacctcaggctcttaatgatgtagatggtgaagaagaaggaactgttaatagccagtcaggagaaagtgagaatgagaatgagttggataactctctaaactctcagtctaacacgaatacagacaggtttctccaacaactaacagaagagaattttgagttaattagtaagttgtggactgacattcagcagaaaatagcaacccagtcacaaataactcctccaggaacgccatcatctgctctttcatcaggggagcaaagagctgctctgaatgctaccaatgctgtcaagagactccaaaccaggcttcagcctgaagaatctactgagactctagactcaagctacgttgtgggacacgtgctgaactcaaggaagcaaaaacagctgttaaataaagtgaaaaggaaaccgaatttgcatgctctttccaagccgaagaaaaacatatcatcaggtagcacaacctctgcagacttaccaaataggactaattccaacctggatgtcctcaaacacatgatacatgaagtggaacatgaaatggaagaatatgagcggtggacaggtcgcgaggtcaagggtctgcagagcagtcagggtcttacaggcttcactttgtcgctggtgagctccctctgtcgcctggttcggtaccttaaagagagtgagatccagctacgtaaagaagtagagacaaggcaacaactggaacaagtattaggtgatcatcgagagctcattgatgctctgacagctgaaattcttcgtcttagagaagaaaacgctgctacacaggcaagacttcagcagtacatggtcacaacagatgagcaactgatatcactcacacatgctattaagaactgtcctgtgataaataacagacaagaaattcaggcatcagaaagcggagccacaggtagaagagttatggacagtccagagcgtccagttgtaaatgccaatgtctcagtgccattgatgttcagagaggaagtggctgaattcccacaggaagagttgcccgttaaactgtctcaggtgccagaccctccagataacatgaatctggccaagaattttccagcacatatttttgagccagctgtgttgttaacaccacccaggcagaagagcaacttaaaattctctcctcttcaggacgtattgagaaggactgttcaaactcgtcctgctccacgacttcctccaactgtggaaataattgagaaggaacaaaattgggaagagaagaccttacctattgatacagacattcagaattcaagtgaagagaatcgtctcttcactcagagatggagagtctctcacatgggagaagatttggagaacaaaactcaggctccttttgttaacctctcacagcccctctgcaattcccattccaacactcaacagtcaagaagccccacattctcagaagagctcccagtactgggagatgggcagcagctgagaacaaatgagtcattaatacaaagaaaggacataatgacacgaattgctgatttgacattgcagaattcagctatcaaggcacatatgaataatattattgagcccagaggagagcaaggggatggactccgggagttgaacaaacaagaaagtgcaagtgacatgacttctacttttccagtagcacagtctctaacaccaggtagtatggaggaacggattgcagaattgaatcgacaaagtatggaggctcgtggaaaactactgcagttgatagagcagcagaaacttgttggtttgaatctttctccaccaatgtcacctgttcagttacctctcagagcatggactgaaggagcaaagaggacaattgaggtatctattccaggagcagaagccccagaaagctcaaaatgtagtactgtctctcccgtcagcgggataaatacaagaagatcttccggggctactggtaattcttgttctccactaaatgccacctcaggaagtgggagattcacacctcttaatccaagagcaaagattgagaaacagaatgaagaaggctggtttgctctttctacccatgtatcataagtgaagtcaagtctcactgagtttgttcttaataatttattacttccctttccctgctctgacttttaagtttttatatccttctttcagataaaacctacaaagatcctgtgaattagtactaatgaaacagagaaataaagcaattattttttgactttctcaaataagttttcaacaaccaactgacctacagctccctgtgaatgaaactttgactgtagagaagttaaagttttgtattttaatactttcttaagtattttaagggttttttttattaatacatttttacctttatctttattcagggttttttgaggtttagtatatcttagttgatccatttatttatttattttcctgaagaactaatttgctttgcatgtaacttacaataaaattcctctgtgtgattagagtctggctttcaggaatatgtaacacccacttttctttcttttttcttgggaagtcattgctgttcatcactttttccatcaagtgaaatatacagccttaaaaacaataggcctgggagtgtttgtttatatttgcttaagcaggtaagagtggttgcatttattataaaatcttatgtagtttttaaatgtgaaaatgtcatcaataatggtaatgcaaatcaaataaatatgattctagagctcaaaaaaaaaaaaaaaaa

SEQ ID NO: 24854 - DNA, 2801 bp, Homo Sapiens
acctgcgactggcccagtcgccccctggggccctttgccactcccttggcaaggagagccgagatcctccccggcgcctcccagatgggggctcccggaggtggcgcccaggctctgagctaccctaggtctgcagactagcgggcattggccagagacatggcccagccactggccttcatcctcgatgtccctgagaccccaggggaccagggccagggccccagcccctatgatgaaagcgaagtgcacgactccttccagcagctcatccaggagcagagccagtgcacggcccaggaggggctggagctgcagcagagagagcgggaggtgacaggaagtagccagcagacactctggcggcccgagggcacccagagcacggccacactccgcatcctggccagcatgcccagccgcaccattggccgcagccgaggtgccatcatctcccagtactacaaccgcacggtgcagcttcggtgcaggagcagccggcccctgctcgggaactttgtccgctccgcccggcccagcctccgcctgtacgacctggagctggaccccacggccctggaggaggaggagaagcagagcctcctggtgaaggagctccagagcctggcagtggcacagcgggaccacatgcttcgcgggatgcccttaagcctggctgagaaacgcagcctgcgagagaagagcaggaccccgagggggaagtggaggggccagccgggcagcggcggggtctgctcctgctgtggccggctcagatatgcctgcgtgctggccttgcacagcctgggcctggcgctgctctccgccctgcaggccctgatgccgtggcgctacgccctgaagcgcatcgggggccagttcggctccagcgtgctctcctacttcctctttctcaagaccctgctggctttcaatgccctcctgctgctgctgctggtggccttcatcatgggccctcaggtcgccttcccacccgccctgccgggccctgcccccgtctgcacaggcctggagctcctcacaggcgcgggttgcttcacccacaccgtcatgtactacggccactacagtaacgccacgctgaaccagccgtgtggcagccccctggatggcagccagtgcacacccagggtgggtggcctgccctacaacatgcccctggcctacctctccactgtgggcgtgagcttctttatcacctgcatcaccctggtgtacagcatggctcactctttcggggagagctaccgggtgggcagcacctctggcatccacgccatcaccgtcttctgctcctgggactacaaggtgacgcagaagcgggcctcccgcctccagcaggacaatattcgcacccggctgaaggagctgctggccgagtggcagctgcggcacagccccaggagcgtgtgcgggaggctgcggcaggcggctgtgctggggcttgtgtggctgctgtgtctggggaccgcgctgggctgcgccgtggccgtccacgtcttctcggagttcatgatccagagtccagaggctgctggccaggaggctgtgctgctggtcctgcccctggtggttggcctcctcaacctgggggccccctacctgtgccgtgtcctggccgccctggagccgcatgactccccggtactggaggtgtacgtggccatctgcaggaacctcatcctcaagctggccatcctggggacactgtgctaccactggctgggccgcagggtgggcgtcctgcagggccagtgctgggaggattttgtgggccaggagctgtaccggttcctggtgatggacttcgtcctcatgttgctggacacgctttttggggaactggtgtggaggattatctccgagaagaagctgaagaggaggcggaagccggagtttgacattgcccggaatgtcctggagctgatttatgggcagactctgacctggctgggggtgctcttctcgcccctcctccccgccgtgcagatcatcaagctgctgctcgtcttctatgtcaagaagaccagccttctggccaactgccaggcgccgcgccggccctggctggcctcacacatgagcactgtcttcctcacgctgctctgcttccccgccttcctgggcgccgctgtcttcctctgctacgccgtctggcaggtgaagccctcgagcacctgcggccccttccggaccctggacaccatgtacgaggccggcagggtgtgggtgcgccacctggaggcggcaggccccagggtctcctggctgccctgggtgcaccggtacctgatggaaaacaccttctttgtcttcctggtgtcagccctgctgctggccgtgatctacctcaacatccaggtggtgcggggccagcgcaaggtcatctgcctgctcaaggagcagatcagcaatgagggtgaggacaaaatcttcttaatcaacaagcttcactccatctacgagaggaaggagagggaggagaggagcagggttgggacaaccgaggaggctgcggcaccccctgccctgctcacagatgaacaggatgcctagggggacggcgatgggcctcacgggcccgcccagcaccctgagaccacactgttgcctcccagtgaccctgctgggacaccaggacaaggaagacagtttcgcctctcgaaagccgcagctgcgcctaggctggagctggaagggtgggtgaatccggcttgggcatccccaatgaactctgccctgcctgggactctatttattctgattaaagggggttttgc

SEQ ID NO: 24855 - DNA, 6655 bp, Homo Sapiens
gatcaagttcgtgaaactggtcttgtacaggttgaaaaatgccttcctaacaggaggcgccaaggagcttaagtgtaactcacacacagtaaagaaaatgacgaaagttcctccggcgtttgatttcagtttcttaaatgacgaagaggccgggaagatccttcaggtgctggaaaggaatgaggagttacagagggccgagaaggacaggatcagcaaacttcagaagacaaagagggatatcagatggcttcagggagtgactggtgaatggtttgaagaaattcaaagaaaaaagttttgcaatgaaacagatgttagccaaatgttaaaacaaccacttacatacaggctaagtaaggagatggcaaaaaatgatccgatagaattacctacatcaagatctaaaaatgtaactaatcaaaaaaagccgacacctttttcttcccggatgagcttcagatcgtcatttgcttccctgttctcattcaggaaatctggaaaggagacttcaaagcttccatcactgggacagaaaggatgtgatggccatgcaggacctcctatgcctgtgaggggagctgctgtgcaggcaaaaatatacaattcacctctggaaaatcatctagttgacagtacatttgtcccaaagccagcagtcatgagggaggagagtggcatgcctccaccgtgggatgcttcactgctggagaatgagtttttccaagttttagatgacttggatagcaaattggctcaggaacagtctgcaagctcagtgaataccagaacacccctcaactatggatcaagaacacagttcggtcacttttattccagtggtaacagacatggtaatatcacagaaaggcacaaaaaacactataatgaaacttccaatatgtctatctatgacatcctaagaccaggaactcctagggaaggttttaaaaccttttctcctaggacaagcacaatttatgatatgtataggacaagggagcccagagtctttaaagaagattatgtgcaaaagaatacttttggcagtacttcgctgtgttttgacagcaggcaacggtcggccttaccagccacagggcatttcacagcaagaagcttacattttccagccacaactcagagcaagagtgggtttataccaccaaggcaccagcagagtccaaagagaactcctttatcatccatcatatggaacagatcagattcctctagagacagggagaaccaggaagagttcctgagggcaccatcaccaatggaaattgatcccgctgacaagtatgtgtatcccaggggttttcaggagaataagagatatgaatcgtaccattcacagaatgtttaccaacgtgttagtttaaatgctcccatggagaatgcaatgagtcccgacacttttgagaactcagagaacatgccattctaccatcaaagcaacacatttaccagatctttcttcagcaatacctttggacgaagcggagaacagaggagatttggacaaggtcctttttggggccaagagaaaggacattctttctggtctgactttcatcgaagcaggaaatcattcagttcttctgacagagactttgaaatgatttccatggaagcaaatagtgtatcagccattcatggccataatgtttcttctgaacactgggaatcattttcttctggttatggaacagatgtttccagaggccaagaagagccacatccttggcagtttgattttcagagatccacactggatagcatggtggtatcacatggtaatgagacccagttgactcctcattttggcacaccaaatgtttgctccatgactggttcaagctatcacgtcaaatctagtgagttggtaagtcaacaggacagttctcctgtagaagtacatataaacaaagaagcttcctcatttggaattgctcagactctagcatcctcattcaaaacttccttttcccagatttctgatgacagaaggaatcctcagagtcccaacttgcagaatcccacagtcactttgcagaaaatttttccaaataagcctgcctctcatccaatgagaagccatacagaagtcactgtgaccaacagcaattcagttgactctctgcctcttgccaaaagccagcccaatatcttggtcacagaagtaaataatgagaaagacttaaatgaatctatttcagaagaagacaaacagctaagcaagatggaccagacaaacaaggcaggtgaaataccccaacctgtttcacagacagggatctcaaactctttacctgattttcaaaatcccttatcccaggactcagccaagagcaacgggtttggttttaatgcatctaccataataagttcaaaaaagtcacccagagtcttttccaggaaagatacctccaaaatgtatataccgcacacagataaatccaatgacattaaacaagataagaggtttactgaaaacagaaaacttggctcaacagcttcccttcctttcattcaggaacacagaacaccaccatctttccccaggacagaccaaggttgtcaccaggaattaactgtaaataatgaagatatttcaagaattattacaaataaccactggagctctgcactgactgatactcaaaatgcacaatactcaaaatgcaagttaactcctggccacaagacctcgtgtgattctttagatctgtcatcagctgcactaccagattcctcaccatcaaagaattcttcccttgatgctcctgtggttccatctactacagtgttctccaggagaagtccttcagacaaagatccatcgctaggagaaagagaagaaaaagacaatgctgggaagaaccaaaagaatcagtttattgtaagccactcagaaaaccaagagagaaatgatagtcctgtgcctacacatgatgaagtggttgatgtcaaatgccattcacactctccttttaggaatgaaagaggaaaaggaaaaataaggcatcatatatcctgtattgaaaagttaagcaaaacagaaagtatatcagtacccaccagtgatcacaggagcctcattgaagcaaatcaaagcaattccaaagtttctgaacttgacacaatttattgtaccttgccaagaaaatcaagcagttttctcatacatggcaggcagtcaggaagtaaaataatggctgcttcattgaggaatgggccacctcccttccaaatcaaaaataatgtggaagatgcaatggggaactatatgttaaacaaatttagtcccagttctcctgagtcagcgaatgaatgttccaaagtcctttcagactcagccctggaagcacctgaagccacagagagaatgacaaatgtaaaaagcagtggatctacttccgttagaaaaggaccacttccattcctcatcaacagggctatgtcatgtccctcaggggagccacatgcctcaactggaagagaaggaagaaaaaagccattgacctcaggcatggatgcttctgagctaacaccaagggcttgggagagaatcattagccctgtggaaagtgactcatctgttagagattgttctttaaccaaaagacaacaccaaaaggaaaacttccaagaatacactgagaaagagggtaaaatggctgcctccaggagaagtgtatttgctctttcaaatgaagaccctttacctttttgctcagacttgtcaggaaaagaacgtgggaaaacattacataaagttaagacgactagtacgttttctgtttctggtgatgaagataatgtaaaatgtctggaggtggtctcaatatattacactctaccgaggaaacccagcaaaaaattctgtaacctccttcaacagtatacacaaaatactaatttacttatagaatcacctcaagtggagactgaaacatttcctaacgctttagaaaaagacaaacagaattattctacacgagagcagtcaggaacaccttcatgtgaaaatctaaagatgtccgtcaactctgatcagacgctcaccactgaaaatatgactgccttccgattatcaaatagggggcccctagctcctacattacaggaaatggcttctgttgaggcagctgtttctcttcctgaagaggaatctaaagctagagagattttttcagataatttagctaaaacacctctaggtgattcagaaaacaagaaggaaagaggcaaaaagttgcaaagtgaaaccctgcatacttcattgatgcttcagagaaaaaatgtatccgaagaaaaatctgaaaattgtcaacaatccattaattcaagtaacagtggtccctctagtcttccagctctttcagaagttaatattggaaattcccaaactagaagaagttcttgggagtgtacagggagtggtagagccattccatttactggaagtggcaagtgtccccagaaagatcacacatccacagctgtaggtgatggctccagtggatcacagcctagggaaggcagaggggacattggaaccaactgccaaaaaatgactaataaaacactttctcactcagagagtcaagtctttgcccttactccagcattgcataaactacagcttggtgaggagactcagtcagatgaaccaaacttagagagtctgcagtctgaaccaagagaattacctcaaagaagtcaggaggcaaatatgacagagagcaggaaggctgaagatgaaatgcagaagtcagcttgggatcaaccttcacttcctgaaggaaacaaaaataaaaccaacttggatgacctagtaaagggggaaaatagatcttcagttaaacacagattggcagccatgtctaaagccagcagaaaattcccagctaaagatgtaagccccagaagacatgtagctactatcttcccccaaagtggaagcagatctggctttgaccatttatctcttggcacagtggagtgcaacccactgttccctgagcctactccaaaatctgcagagtccattggcgaaagcaggttgagtgagaacagaaagcatgtgaagaaatccgagaaccttctccccattactgtactacccaacagagaaccttctacacacgtcagcaaccagaagtctaacagcatttcacaacgacatcagaatgagtttaaaaacgtctcagaatcaccatcaaagcatgagaattctaaagacgtcacagcagctcagaatttagtaagagaatcaggagccccatcacccatcacattcaccagcctcagggaagcagaattctctgacaatcagaggaggctgagccctccttttccactggagcctgcacagaaatctagagtaagcagtccactggccagttttctgcagcaacaaaggagtgcttcatctctggagtgggaacctgagccacacctctatcgttcaaagagtttaaaaagcattaatgttcatggcgatctactacgaaaaagccatcctccaaaagtcagggagcgccatttttctgaaagcacttctattgacaatgccctgagtcgactgacccttgggaatgaattctctgtcaacaatgggtacagtcgaagattcagatctttttctgaactcccctcctgtgatggaaatgaaagttgggcttatcgcagcgggacaaaaacaggtcccaggtctgcaatatctatatacagacctatcgactatgggatctttgggaaagaacaacagttagctttcttagaaaatgtaaagaggtcacttacacaaggaagattatggaaaccaagttttcttaagaaccctggcttcctaaaagatgatttgaggaaccctcccaacccctcagagtcattaagctcaaattctcccagtagtcaggtgccagaagatggcttatctccaagtgaaccgcttaatatctatgaggatgacccagtggactcagattgtgacacagacacaaccacagatgatgaatactacctggatgaaaatgacaaagagtcagaactgtgaggctttttcaataaaatgctttacttttttcaccaaaagcttataatggaactaaggtgtacatgtgcatgtgcatggaaggataaaagatctagtctgggcagtgtctgctctgaaatgtcccacatctccttttttttcctccacaccctatatagacacttcctgaatgctagaacaatgaattcttgttttgagagagtctctgctattttctatctctgtaaatgttcttagcctgcctttccaccactcccacttaatccctgattcactgtctgatttgggctttctgctttacttccctcctaacatttttcatctttaattgtgatttacaaccctaatatcccaggcacatacaaaacttatgaattacccagcacaactgtgaaactctgtattgcttcttccggtccacaccctatactcatgacattaaataaaaggtagggatgataacagtggggtaaatattatcatcctgtttgactcatgaacatttaggaagtttaaggtggtgatcttctctttcaaacaaagataaaggaatttattttttaacctgagaaactgattgcaaaaagg

SEQ ID NO: 24856 - DNA, 4279 bp, Homo Sapiens
gggccatttctggacaacagctgctattttcacttgagcccaagttaatttctcggggagttctcgggcgcgcacaggcagctcggtttgccctgcgattgagctgcgggtcgcggccggcgccggcctctccaatggcaaatgtgtgtggctggaggcgagcgcgaggctttcggcaaaggcagtcgagtgtttgcagaccggggcgagtcctgtgaaagcagataaaagaaaacatttattaacgtgtcattacgaggggagcgcccggccggggctgtcgcactccccgcggaacatttggctccctccagctcctagagaggagaagaagaaagcggaaaagaggcagattcacgtcgtttccagccaagtggacctgatcgatggccctcctgaatttatcacgatatttgatttattagcgatgccccctggtttgtgtgttacgcacacacacgtgcacacaaggctctggctcgcttccctccctcgtttccagctcctgggcgaatcccacatctgtttcaactctccgccgagggcgagcaggagcgagagtgtgtcgaatctgcgagtgaagagggacgagggaaaagaaacaaagccacagacgcaacttgagactcccgcatcccaaaagaagcaccagatcagcaaaaaaagaagatgggccccccgagcctcgtgctgtgcttgctgtccgcaactgtgttctccctgctgggtggaagctcggccttcctgtcgcaccaccgcctgaaaggcaggtttcagagggaccgcaggaacatccgccccaacatcatcctggtgctgacggacgaccaggatgtggagctgggttccatgcaggtgatgaacaagacccggcgcatcatggagcagggcggggcgcacttcatcaacgccttcgtgaccacacccatgtgctgcccctcacgctcctccatcctcaccggcaagtacgtccacaaccacaacacctacaccaacaatgagaactgctcctcgccctcctggcaggcacagcacgagagccgcacctttgccgtgtacctcaatagcactggctaccggacagctttcttcgggaagtatcttaatgaatacaacggctcctacgtgccacccggctggaaggagtgggtcggactccttaaaaactcccgcttttataactacacgctgtgtcggaacggggtgaaagagaagcacggctccgactactccaaggattacctcacagacctcatcaccaatgacagcgtgagcttcttccgcacgtccaagaagatgtacccgcacaggccagtcctcatggtcatcagccatgcagccccccacggccctgaggattcagccccacaatattcacgcctcttcccaaacgcatctcagcacatcacgccgagctacaactacgcgcccaacccggacaaacactggatcatgcgctacacggggcccatgaagcccatccacatggaattcaccaacatgctccagcggaagcgcttgcagaccctcatgtcggtggacgactccatggagacgatttacaacatgctggttgagacgggcgagctggacaacacgtacatcgtatacaccgccgaccacggttaccacatcggccagtttggcctggtgaaagggaaatccatgccatatgagtttgacatcagggtcccgttctacgtgaggggccccaacgtggaagccggctgtctgaatccccacatcgtcctcaacattgacctggcccccaccatcctggacattgcaggcctggacatacctgcggatatggacgggaaatccatcctcaagctgctggacacggagcggccggtgaatcggtttcacttgaaaaagaagatgagggtctggcgggactccttcttggtggagagaggcaagctgctacacaagagagacaatgacaaggtggacgcccaggaggagaactttctgcccaagtaccagcgtgtgaaggacctgtgtcagcgtgctgagtaccagacggcgtgtgagcagctgggacagaagtggcagtgtgtggaggacgccacggggaagctgaagctgcataagtgcaagggccccatgcggctgggcggcagcagagccctctccaacctcgtgcccaagtactacgggcagggcagcgaggcctgcacctgtgacagcggggactacaagctcagcctggccggacgccggaaaaaactcttcaagaagaagtacaaggccagctatgtccgcagtcgctccatccgctcagtggccatcgaggtggacggcagggtgtaccacgtaggcctgggtgatgccgcccagccccgaaacctcaccaagcggcactggccaggggcccctgaggaccaagatgacaaggatggtggggacttcagtggcactggaggccttcccgactactcagccgccaaccccattaaagtgacacatcggtgctacatcctagagaacgacacagtccagtgtgacctggacctgtacaagtccctgcaggcctggaaagaccacaagctgcacatcgaccacgagattgaaaccctgcagaacaaaattaagaacctgagggaagtccgaggtcacctgaagaaaaagcggccagaagaatgtgactgtcacaaaatcagctaccacacccagcacaaaggccgcctcaagcacagaggctccagtctgcatcctttcaggaagggcctgcaagagaaggacaaggtgtggctgttgcgggagcagaagcgcaagaagaaactccgcaagctgctcaagcgcctgcagaacaacgacacgtgcagcatgccaggcctcacgtgcttcacccacgacaaccagcactggcagacggcgcctttctggacactggggcctttctgtgcctgcaccagcgccaacaataacacgtactggtgcatgaggaccatcaatgagactcacaatttcctcttctgtgaatttgcaactggcttcctagagtactttgatctcaacacagacccctaccagctgatgaatgcagtgaacacactggacagggatgtcctcaaccagctacacgtacagctcatggagctgaggagctgcaagggttacaagcagtgtaacccccggactcgaaacatggacctgggacttaaagatggaggaagctatgagcaatacaggcagtttcagcgtcgaaagtggccagaaatgaagagaccttcttccaaatcactgggacaactgtgggaaggctgggaaggttaagaaacaacagaggtggacctccaaaaacatagaggcatcacctgactgcacaggcaatgaaaaaccatgtgggtgatttccagcagacctgtgctattggccaggaggcctgagaaagcaagcacgcactctcagtcaacatgacagattctggaggataaccagcaggagcagagataacttcaggaagtccatttttgcccctgcttttgctttggattatacctcaccagctgcacaaaatgcattttttcgtatcaaaaagtcaccactaaccctcccccagaagctcacaaaggaaaacggagagagcgagcgagagagatttccttggaaatttctcccaagggcgaaagtcattggaatttttaaatcataggggaaaagcagtcctgttctaaatcctcttattcttttggtttgtcacaaagaaggaactaagaagcaggacagaggcaacgtggagaggctgaaaacagtgcagagacgtttgacaatgagtcagtagcacaaaagagatgacatttacctagcatataaaccctggttgcctctgaagaaactgccttcattgtatatatgtgactatttacatgtaatcaacatgggaacttttaggggaacctaataagaaatcccaattttcaggagtggtggtgtcaataaacgctctgtggccagtgtaaaagaaaaaaaaaaaaaattgtggacatttctgttcctgtccagataccatttctcctagtatttctttgttatgtcccagaactgatgttttttttttaaggtactgaaaagaaatgaagttgatgtatgtcccaagttttgatgaaactgtatttgtaaaaaaaattttgtagtttaagtattgtcatacagtgttcaaaaccccagccaatgaccagcagttggtatgaagaacctttgacattttgtaaaaggccatttcttggggaaaaaaaaaaaaaaaaaaaaaaaaaaaaaaaaaaaaaaaaaa

SEQ ID NO: 24857 - DNA, 2897 bp, Homo Sapiens
taaacccatctcctcctatgccacctgcctgggcccctcctgggactttatcactgtgccacactttttggaactactggttagaaggtgagtgtccatccccctccaagacacagaggtgcctctgtcccctactggctctgtcttgaagatgcacctctcggagcctcggttggctcctctggaacagggagtagtgagaagacgaacctcacagggttcttgtagggactcaatgatctaagacacagcaaacaaaggggtccctagagcctaaaactctggaaaatctgctgggggtgctgtgattcatgtttgttacttttctcttccccctcacttgaagcagctctcagcattctgcctcaatggcctgtatcactcactgtttggaaaaacacatagaaaccaagtctgcgatggcactggtaaaggatgtctgagattccttctggctggtctttctccttgacacagacagaagaggggtcccttggtgctgaaaaaggagccacaggcccactcagacatctggagaggctcactggggttctccaaaggttggggttcactcattcaacacatacattcaaaacacctcatttgtgcatcgctcttcttggggcttggcataatttcataaacaaagcagatgacaatcccccggccttgattctactcagagtcaggcactcacagtagacagaataaacaagtcatatctacagaatgttacaggtgagaccctcatggcctcctctacgtatggtggcatcctcccagattctgactagaatgacgcagcccagcaacaaatataaactgggtggatttagggttctgaagggccttttcacccacaaaacatgggggaaaatatgtggactctggctggggagagactaaaggagctctggggctcatacttcttataattcccacgagaaggctgacatctggggacttcccccacaagaggcaaatagtgagttctgtaaatggagacttaggtcccctgcaaagcagaggggaggctggggtcacagctggccactgagagacccatccccctcagcaccgtggcttcccagctctccctgtcctcctccccccgacatctgccccttccctcctaaccccaggaccaggggacccagatctggagctttgatgaggaagctgctcacaaatctgcctgcagctgcagtcttgagtgcccaggtgtacagtgctgtgctccagggcctttgggaagagaatgtctgtgggacgccagggcgcacgagggtctgtacagccctgctgtatggccaggtctgccccttccaggacagcactgatggcttacgcaccatcacctccattttgttcaactggccccccgaaaacacttcagtttactatcagcccccgcaacggtcatctttccggataaagctggccttcaggaacctctcctggcctggactgggcttggaggaccatcaggaaattgtcctaggccagttggtgcttccggagcccaacgaggccaagccagatgatcctgctccacgtcctgggcaacacgcattaacaatgccggccctggagccagcaccaccactgctggcggacctggggcctgctctggagccagagtcacctgcagccctgggtccaccaggatatctacattcagcaccagggccagcaccagcaccaggggaagggccccctccagggacagtgctggagccacagtcagccccagagtcctcctgtccctgtcgtgggtctgtaaagaaccaacccagtgaggagctgcctgacatgacgaccttccctcccaggctgctggcagagcagctgaccctcatggatgcggagctgttcaagaaggtggtgctccacgaatgcttgggctgcatctggggccaaggacatctgaaggggaatgagcacatggcacccacagttcgtgccaccatcgcacacttcaacaggctcaccaactgcatcaccacctcctgcctcggggaccacagcatgagggcccgggacagggccagggtggtggagcactggatcaaggtggccagggagtgcctaagcctcaacaacttctcctcggtgcacgtcatcgtctctgctctgtgcagcaacccaataggtcagctacacaagacgtgggcaggagtgtccagcaaaagcatgaaagagctaaaagaactctgcaaaaaagacactgcagtgaagagggacctactgatcaaggcggggagctttaaggtggccacccaggagaggaacccccagagagtccagatgaggctgcggaggcagaagaagggtgtggtccccttcctgggggattttctgactgagttacagaggctggattcggccatcccggacgacctggatggcaacaccaacaagaggagcaaggaggtccgagttctgcaggaaatgcagctgctccaagtggctgccatgaattacaggcttcggcctcttgagaaatttgtcacctatttcacaagaatggagcagctcagtgacaaagagagctacaagctgtcctgccagctggagcccgaaaacccgtaggctggcaacatcctgcagtggctgggaacccaccgggatgctggccagaacaccggctctgcaccatccctcacccagaccgtagacaccagggaaccacatctaggaggctggcagctcagctgcatcttgccctggatcctcatcaccaactgctcctgctggccaggatcaggccatgggacttttgtgagtcaggcgggagaccattttatgtttattttctttagtgtataagtaagggttttttcttaactttcgttaaaataaaattttaaaaaactattcaaaataaaaaaaaaaaa

SEQ ID NO: 24858 - DNA, 939 bp, Homo Sapiens
cccctcccatttgcctgtcctggtcaggcccccaccccccttcccacctgaccagccatgggggctgcggtgtttttcggctgcactttcgtcgcgttcggcccggccttcgcgcttttcttgatcactgtggctggggacccgcttcgcgttatcatcctggtcgcaggggcatttttctggctggtctccctgctcctggcctctgtggtctggttcatcttggtccatgtgaccgaccggtcagatgcccggctccagtacggcctcctgatttttggtgctgctgtctctgtccttctacaggaggtgttccgctttgcctactacaagctgcttaagaaggcagatgaggggttagcatcgctgagtgaggacggaagatcacccatctccatccgccagatggcctatgtttctggtctctccttcggtatcatcagtggtgtcttctctgttatcaatattttggctgatgcacttgggccaggtgtggttgggatccatggagactcaccctattacttcctgacttcagcctttctgacagcagccattatcctgctccataccttttggggagttgtgttctttgatgcctgtgagaggagacggtactgggctttgggcctggtggttgggagtcacctactgacatcgggactgacattcctgaacccctggtatgaggccagcctgctgcccatctatgcagtcactgtttccatggggctctgggccttcatcacagctggagggtccctccgaagtattcagcgcagcctcttgtgccgacggcaggaggacagtcgggtgatggtgtattctgccctgcgcatcccacccgaggactgagggaacctaggggggacccctgggcctggggtgccctcctgatgtcctcgccctgtatttctccatctccagttctggacagtg

SEQ ID NO: 24859 - DNA, 2090 bp, Homo Sapiens
cgctgtagagctccgatgatggctgttggccgaatggatgaatggcttcattaacttcactgcaacacgcaggagtccttgatctccccccttgaaaggctggagcacagtggcatgatctcggctaactgcaacctctgcctgcctcccaggttcaagcaattctcctgcctcagcctcccaagtagctgggattacagcaaacaatggactattgactaagctttcagagctgtgggtgttctcagagggaggccagccagaacaccagcatctccggcttttcttccaactcccaagttggagctccatctatcagaaatatgaaaccctggaatcttcctcctcctcacttctctgccttaagatcctagtccactgcctggaacatggaagatgctccataattgtttgctgaaggaacgagtgataaccagagaagccagctcctgcttcctgattaaggcatgcagtcaggccagtggggaaatgggcctcatggtggagcttgcctctgctggaagactgacggagccagggctctgcctgccacaattcatgagctggccagaggtctttggattcctcccagtcattgctgagatgagtgaggattgtttcagaaaatcaggcctcctcctggggaatgtgcctcagcttctggctgcatcagtgatttggacaccccttaaggacaaagagcgtggttgggagaagagcgctttccacccctctccttcaggaccatcctggatgcagctgcaactctgctcttggctgtcctatggctggcaatagctttcttgctctctggcaggcaaaaagcagggtgtgtgtgtgtgtgtgcatgcgtgcacgtgctcatgtgtgcatgcactggaaagctaaggctgaggcatcgaatgacaagatccctgaagtaaaaggctccacagctgcttacccaacccctaatttgctggggctgggctccttctaatgggctgccagaccctggtaggcacaaggagactggctgtatatgtctcgtgtcccctgggcgactgtcccagtgagcaaggacaccaccaaccttcttcccccctacaccctccataggacagtgagatcctgcattggattatgcatgaggtgtatacactctgcttgtacgtatgtatggaagaaaggattttggcttgaaacattttttttattggcagagacagcacttctcttaaaggaaatggcggaatttgccaaactaagcctccagaagaaaatataacggagagtgtaaaagaaatccatgttcaaacattggcaagtgtgaaacattcaagatttttgtgtgaacatcacattgtgggagcaaaattaaattaagctggtctctggcaagcattggaatgaaagcagaactggagcaagcggatggtgcttgggcattttttgcaagaagccaaacagagcataatcagatgacaaccagggatcccaagggctgggttcttttcttcatctcattaacacacaagaacttaactgctttgggtccggagggtcccaaggaagtgccaaaagaacctgaactttcttcacctccacaactcaatgacaggcagagaaggaatgaatttcattcaaaaaatatttattgagcatcctcagaatatttattgtgcaaactactgttccaggcaccaaaggaggggatggtcccagctcctttatggagtctgcagtccacagacttgaactcaactaactagaaggaaaggcagctcagagcaagtgccctgctggagattgaagcaaagtgccagagaacgtgggggtcattcaagaatgaggttggaagagatcattctcctgtttgcaaatgagaaacaagtataggtgtgaagagacctgtccacagccattcaacaaatgaaaagtccaatcgaagatgggacctgatttcttacaccccaggtatctgctcatcatcttgggtaagaccacagggaccaccaagacacccagaagagacacttgattgtttcctggatgttccagttttggggcccatagatatatgccatttactttacatgctttctaaaaaa

SEQ ID NO: 24860 - DNA, 707 bp, Homo Sapiens
cagagactcctcccctgtcgcccagatcccacccgcaggaccccaaaacccaatgatcctgcagcagcccttgcagcgaggcccccagggaggggcccagcgcctcccgcgggccgccttgggggtgacttggggcctggacgccagctcccctctccgaggagctgtgcccatgagcaccaagcggcgcctggaggaggagcaggagcctctgcgcaagcagtttctgtctgaggagaacatggccacccacttctctcaactcagcctgcacaatgaccacccctactgcagcccccccatgaccttctccccagccctgcccccactcaggagcccttgctctgagctgcttctctggcgctatcctggcagcctcatccctgaggccctccgtctgctgaggctgggggacacccccagtcccccctaccctgcaaccccagctggggacataatggagctctgagtgctggtggacagtgcccctcccaccttccttcttccccacaacagaagagaccagcgactcccgcaaagggacaaggttcctccctctcctgcagagtaggcatctgggcaccaagaccttccctcaacagaggacactgagcccaacggagttctgggatgggaggggtgggagcatgggaagggaggcatcccacccccaagaagaactgaataaagattgctgagcaaaaaaa

SEQ ID NO: 24861 - DNA, 2361 bp, Homo Sapiens
gcggaattgtcgacggccattaccaatcgcgaaaccggtttcgcgattggtaaccaatcgcgaaaccgcgcttccggcagaccagtgagagcaccaaccagcgggtgctgtggtggtccattctgcagaccctcatcctcgtggccatcggtgtctggcagatgcggcacctcaagagcttctttgaagccaagaagcttgtgtagctgtcccaggcgtcacaacccatcctcccaggctgggggagaaaggacctcctggaactgacttcttctgtcaggaggactggtttccagccatacctgttctggaagggagaggggctggaggcacccacaggcacaagctgaaggcagcagcttggctaatactgagcaggtagtggggcaaattcctgccctctctctctggcctctgggccgtttggtagtaatcacccaggggctggtaaagcccctcctcttggcacctcagaatcacagtgttactgatcagggatgtgaggctgctgttgggggtggggggaggggaatgggcaggcaagccagtcttctgtcttcctttgctaacttagggttttgagcaggttggggtatggtgcctgtcatacccacctgccaccctgggaacctcactgttctctctttcagcctagacctgctgatccagggtgtgtgtgagttgagggtgggtggaggggtttgcagtgtgggaatgtggccctgcagttgacctgagctgcttcacatggttgtccattctggggcttaaagaactgggaccagaccaagtagaggccttggtgctggttggggtggggcctgcagagtcttagttactgatttcattttcaataaatgtaggtttgttacatgagtttcccaataaaaaaaaaaatgacttctaaaaaaaaaaaaaaaaaaaaaaaaaaataaaaaaaaaaaaggccgcctcggcgcgtgggtgggggatggcgtgtgggtctccattcgcttggattctacgctccgtctctatcatgcacacacttatcaacatctacaggatgtggacattgagccttatgtaagcaaaatgttaggtactggaaaactgggcttctcttttgtgagaattacagctcttatggtgtcttgtaatcgtttgtgggtggggacaggaaatggtgtcattatctccatcccattgacagaaaccgtaatcctccaccagggacgtttactggggctgagggcaaataaaacctcaggtgtaccaggaaatcgtcctggaagtgtaatccgtgtatatggtgatgaaaacagtgataaagtgactccagggacatttataccctattgttcaatggcacatgcacagctttgcttccatgggcaccgggatgctgtgaaattctttgtggcagtcccaggtcaagtcatcagcccacaaagtagcagtagtggcacggatctgacgggtgacaaagcagggccatctgcacaggagcctggtagtcagacgcccttgaagtctatgcttgtcatcagtggaggagagggctacatcgacttccgaatgggtgatgaaggtggagaatcagaacttcttggagaggatcttccacttgaaccttctgtcaccaaagcagaaaggagtcacttgatagtgtggcaagtgatgtatggcaatgagtgagcccatgggaaacaggtggagatggggaagccgtctcttctgcatggtttattttccctctatccttttatttaatgctcttttgtgagataagtttcaccacataatgtgtgagcattttttcctgttaactttatattacaaaatccgttctaccataacaatacagaggaactagctgtgttactgcaccagtgttataggtaacttcagtatattatgaacaaatcaaagaatgtttacttcctgcaaactggtgaattatagaaagcaatccagatgtggtttactctgccacagtctaatgtcattcacttcatttgatggggtcacttgttagctgtcactaataatggaattaatgggaaacacttgataaatgaaactgtaccgttaaatacaatagctgagttttccccagtgtattgtaaaattgacacacactaatacaagatggattatcaggatgtatctaaatgtcccgagagggttaaaagctaactgtaaattactttaactttcactttcaaatctgacaaatcttgtttatatggtatataaaactttgttttcatcagatttgggggggttttatattaaagaaattaagactacactatttaaataaacgtttcctgtttctgaaaaaaaaaaaaaaaaaaaaaaaaaaaaaaaaaaaaaaaa

SEQ ID NO: 24862 - DNA, 23160 bp, Homo Sapiens
gtatgttctagtgtgtgggccatgagggctgtgagcaagaccagggctctgccccaaggttgtcaccatccttgcggagccagaagagtcaggcatggcagctggcacgactgctcccacttccggccctgccgatggccgggtggggcattgacttgctgtgtcggatggaatgtgagcagacaagagtgagttagttcccagtgtggcctcgtgtgtgcttttggccgcatcgtttccagtttcgccatccccaaagaggatcatctcccaggaagcttactggtccaaggaggatgagacacccatggagcagacttggaccccatctgccgctcagagccaggcctaaccctgccaagtttaggttaaccaacttccatcttgcccacagacttgtgagcaagagtgaacgaccgttgtttcacaccattcagttctggggtcgttggtttgttaagcagcatcgttgtggccgtggttagcagacacagggaacacttgtgatagtgtgagaaggtcatcagggagacgaggagggcatctgacactccagtctttggggggcatgggggaggactgcttcataaacttgtacaagctatttctgttttggatttcttgttgcttttctccctgggatgctgtagaccagagtgttagcaggacaccaaatctcttggcgcatgtcagagttgtatgtaaaacaggagttaatccgtaggggatatagggaaaattctctgacaagtgaaatatgaggactcttgggctttgagtgatccattaactcactcattcattcattcaaaaaatgagagttagggacagaactgtgaataagataaagcagggttctgtcaaccaaaaagtatctgacagtcttaataatttagaagcttattttgccaagattaaggacaatgcccaggagaaaaaacatggaatcacagaaaaagcagtctgtggtctgtgcctttctccaaagatgattttgagggcttcaatatgtaaagtttttcccctattgaaaagcaggctggagggcagagagggagggtgcagtcattactgaatccatgtgttgcaaaggaaaagaaataggtagggaatagtcaattatattcctcttatactcagtaaatctgctcttcacatatgataaggtaaacatagagtggctacctgtggagaatttttaaaatcttttatctgtacgctctctgcttaggaacaaaaggaaaggcagcttcttgcaggactcagacttcagcttatttttttccttttggcagagtgaattgggggtcccaagtttttattttcctttcacagtccttccatcagtggagcctgaattctggagaggggagacaaggctgatgatgaatgccacagagaatgacagggaagggaaggaaaacatggagtattgggattaaaggtggtgcaattttagatagggaggtgagggagacctcacgaagaaagtgaagtccgagcagaaagggcactggcagtggccttagctgaggaagcagcatctctggccaaggcgcaggaatggctaagggaggtctctgcagagacagcagcttatggggcagagcccctctgccaagcacgcctctaggtgctacaaggattcgactttagatatgttcagtgaatatagctgcagagaaacaaatccaaaaattttgagttttgttcttaaacagagtaggccaaaaggttcccattatccagtgaagcttccagaccctgcccctaccccgtcttcaagggattctctctgcagggttcttggttcctggtgacacctctgtttcctcccctaggccacgtgctgctgggtctcagtcctccacttcccgtgtcctctggaagttgtcaggagcaatgttgcgcttgtacgtgttggtaatgggagtttctgccttcacccttcagcctgcggcacacacaggttagaagtaaacctttcagatgcaaaaaggcttgcctgtagcttcgctggggaaagatgttatctagagaagtttccttgtcagaaagcaaagtgtgggccgagctcggtggctgccggctgtaatgttagtacttgagagccctaggcgggtggattgcttgagcccaggagtttgagaccagtttgggcaacatagagagacccacgtctctacaaaaaaaaaaaaaaaaaaagtagttgggcgtggtggtgcgtgcctgtagacctggctacttgggaggctgaggtgagaggagtgcttgaacccagggaggttgaggctgcagtgagtggagattgcatcactccactccagcagggcaacagagtgagaccctgtctcaaaaaaataaaaaaggaaaaattaaaaaaaagaaaaaagaaaagaaaaggaaagaatggtgcgaatgtgcttgtcaaagagcaaactgaagaagtgacgtgtttgcccttaacaaagttgcctttggagtttaaccatacgacgtgccagaactaaacttttaccatctaaactcagctcagatttacttttaatgatgagaaatcagccagtgaaaactatggccatagtttttaatctttaattttttgtcaccgtagaaacctgatttaactttcttcacaaaacataagttggaatggatagtagcactgaacttgttatttggaaattttgaaagtataataacggggtagggagggagtttaatagtaccccagggtgtaggtctttttgttagggacaaatgacatctttctcaaatgtgctccaggtttccctgccagaatcaggatcagtcccaggtgcagggaggttttatgatctgagcaagttttggacccaaagcctgaccatgggctctctgtccttcaggggctgccagaagctgccggtttcgtgggaggcattacaagcgggagttcaggctggaaggggagcctgtagccctgaggtgcccccaggtgccctactggttgtgggcctctgtcagcccccgcatcaacctgacatggcataaaaatgactctgctaggacggtcccaggagaagaagagacacggatgtgggcccaggacggtgctctgtggcttctgccagccttgcaggaggactctggcacctacgtctgcactactaggtaagtctccctgtgcggggctggggaggggatcctggcaggatggaggcttgtgagggtcttcagtcatgatccggatctcagaatccagtgtacaaaatacaaatccagtgaatccacattgcatcccgtttgctgttcctgacaccccccccaaccctacagtctcattctgtctccatttagtctttgctcaaatgccacctctttggagacaacgtccctagccattttagctgacaccgccctctgtcactctctccttaccctgctgtagtttccttgcgataagattttcccatctgacacatttgtgtgcgctactgtatttaatgtttgtctacccattagaatgtaaactctgcaagggcagggacttggtctatgttgttcactgttgaagccacatggtaaggaaccaagaaatagacatagaataggattttactctgaataggattttagagctgggtgagaccttaggattaaattagtccaacactttgggcggccgaagagggtggatcacgaggtcaggagatcacgaccatcctggctaacacagtgaaaccccgtctctactaaaaaaatacaaaaaaattagctgggcatggtggcgggcgcctgtagtcccagctactcaggaggctgaggcaggagaatggcgtgaacccaggagatggagcttgcagtgagcggagatcgagccactgcgctccaggctgggcgactgagcgagactctgtctaaaaaaaaaaaaaaaaaaaattagtccaactgctcgttgtaaggatgagggaaccaagctggcttggaaagttccccaggtggtgcgtggtagagctgactctggagcccgagtctcctgaccctgggtccagtcctcctccctctttgtcctgttgctttcttcccctttaactgtagaaaaaatacacataacaaaaaatttatcatcttaaacagtttttagtgtacagatcagtggcaccatcaccattatccatctttaggagtttttcatcctcacaaactgaaactctgaacccattaaacaataactcccctctcttcttccctccagcctcaggcaaccaccactgtactttccgactctatgattttgacgactctaggtacctcgtttaaatcgtttaagtgaaatcagtctttctgtgactgaattatttcacttagcatagtgttttcaaggttcgttcatgttgtagcatgagtcagagtttccttcctttatgaggtggaatattattattccgttttatgtatgtaccacattttgtttatctatttatccatccagggacacttgacttgcttcctcctttcagctattgtgaatccaatatgaacatggatgtgaagatatctgttcaaatctctgctttcagttcttctgggtatagaccccaaagaggaactgctggatcatctgttaattctatatttaattttgaggaactatcatactgttttccatagtggctgtaccatttttcattcccaacaacagtgccgacactcaatttctctacatactcaccaacacatgttattttctattatttttgataataatcatcctaatgggtgtgaaggggtctctcattgtggctttgatttccacgttcctaatgattagcgatgctgagcatctttttgtgtgcttattaaccatctgtgcatcttcgctggagacacagacatatctcctttatggactctaagtcctttgcccattttaaaaactgcattttgctgttgttgttgagttgtaggagttctttacatttcctggttattaaccccttgccttatcagatatatagttagaaatattttctcctgttctctaagttgcatattcattctgttcatagtgtcatttgttacacaaaaggttttaattttgatcaagtccagtttatctatttttttcttttgttgcctgtgcttttagtgttaagaaatcattgcccaatccaatgtcatgaaggttttcccctttgttttcttctaagaattttatagttttagctcttttgctttttgatccattttgagttaatttttgtatatggtgttaggtaagggtcctgcttcattcttttgcatgtggatatccagtttctccagtactatttgctgaaaagactgtcctttccccattgaatggtcttgacatgtcctactccttcttgatggatgaagttttaggcctagtgttggtgatcttaaaaagtttcttggcttcgttcttctgaactaggacaaccctcagcttgattgggaactagtgttttggcctctctcttcagctgcttcatctgttcctccaataaaaacttccttggctttgttcttctgaactaagacaacctttggcttgattgggaactagtgttttggcctctctcttcagctgcttcttctgttcctccaaaggcactgcttgctccttccaccagctggcttcagagtctccagatttcataaactcatttgacttaagaaggactgtacccaggaatatgtacatttagaaaaagaaccggagaagtgagattcttagcacagtggaagtactggtgaatggaaaaatttcagaccacgtcatccccagtcctaggctgggtgtgtgtgtggcagggtatgtggggggtgggaggagatatgaggtagagggtgccctctgtgtgtgtgtgtgtgtgtgcatgtgcgtgcatgtgtgaaattaagaatcttttcaaattaaacccagcttgacactaccatccatatgtctagccccaactataagcaatttagggacaggtttaatcctgtcaatgaaccttgcctaagaagcaggcaaaccatcttctattcttatgctaggaaaatgtggatgcctggttttacaatagctataaatgcatatttcttctttcttttccacagtaaaaattctaattttctctaaggagtactactaggaaaacttcatagcatagtaagaaaacatgaaacctgaagtcagaaagaaagatgggaatcttagctctctcatttcctatctggtgggaccttgggcttatcacttgacttttatgggtgttagttttcctgtaaagaagtttgttgagagggttatgtgagatcacagaatgtgaaggaactagcgtggggtctgccatggtaggtggtcaatatatacataaaaattccctctccttcccaaaaggcaatcctcatgactactgaaagtgagactgtgcaaaaatcagggagatgtgagctgagttctgtttgtcttaaagtttgcttttatgatcaatttttgtaggaaaaaaagagctgagattgagggggcagtggaaatcccagtgtatgtcaaactttctttgcatgatgggaaggtttacctggctgacctttaatactctttgtcaactgtaagattgggattctaattgagtgagaatcaccagcagttgccataatactctttagcgttgatagtcatgaggcaagagactgccctgttctcatgattgtttaagaccttgtgatctagaaccacgtggtgagtcagagtaggcaaggatgcaagccatcagagaggccaagatttgagcagtagctgcctgggcctccttgcttggtgctctgcaaataaatgccttactttctatcactgcaaaaaaaaaaaaaaaaaaaaaaaaaaaaggaaagaaagaaaagaaaagaaggaaaagaaaaagaaaaaaaaaaaaaaagagaaagagtaggcagtcaaggttatgctgctgtaacaaatagctcctaaatctcagtggcttaaaataacaagggcttatttcttacacatgcaacaggtccattgtgggtttgcagacagttagggacttaggctgaaggagcagtcacagtcactatttcaaatgttattggttggttgctagagcaggaagcctgctttggagggtctctcatggctgttacaactttcatgtagaagggccacacatataactcatgagctaggaagagtccccacagtggggacgaggacatgtgatacaccatgtgctcagaatagggagaactgggcctatttggtgagcagcactacgaatgactatcacgcctttgccatgggggtgccacactacatggggagtgcaagtggtgatcaaattgcccctcacccttctctttcttttgagttatttttatgaagtttcttgctcaaggggaattaccagatcaataatgtgaacagccttgtaactttcaatatgtctactaagcttggtttctgaagatagtacttatgggtactgaagatagatttatgggttttcccagagccttgctgggcttcccattttggtttgacctctttgtagctgtacagcccacttaatttctgtacacctacctttttcatataaaaatgatataatagtaattcctacttcatgggggctggactataagtgaaataacgtgtgcaaagtacacagcacagggtctggcctgcatctactcgctgctggctacctgctgtgtgactgttactcaagtaggcccaggtctttagatttgtcctcagttgcctttattcaacatgtagtgacattacgcatttttcaaggtgagagttaacattctgtatttctttatgcacaaaatataatatttgttcatctattttccctttttaagctaaatataaacagatattggcttcatatatttaaattaattcttcttactttcaagtggtaagcttttatcacatttctttcaccttttttttacattttgttacttgtttggatatggatggtttagattttgctgtgcaagtaatttttacccctatatgtaaaactcgtccttattgtctctgtcaaagtctcatgtgttttaggtagccagaaatttagctgagataattatatttttatatttttctacttaaaagagtagttttaattactgttttctgtcctccatccatttcccacaagtttccagcaaggttttcctcttccctttttccagctctaaggtcttgatagaattatggcagtgaaataatgattaggctagtaaaataataataataataataataataataatcatataataataaagcaaacttaccaagttaatttccccatgcagtattacaaaaatcttttatgggtcttacactaagtttccagcagttttctaaaactagacttcagttggtaaatcattccccaaaggagcaaagggaatattcctttttacggaaacaatggctcttgggaaacaatctctgcatgtggatatggtttcctggatcatgaagttggagtatgcgggggctgggctcaaggagctccagaacctggaaggcataagcccttttgaagaggacttggggatttcttaatgaaccttggtggcattagaatcgggcttgtagacagtcctttgtgaaaaacacagaatatgctttttctgtacaattatgttacgacacttgttgccccccaagtgttcgaaaagatcagggacagaagtattgcaatatagatgttcctcgacttacaatggggtaaataccaataaacccattgtaagttggaaatagcgttgtcacttaacttaccacttaacacttaacttacccaacatcacaacttagcctagtcttccttaaatgggctgagaatgcttacattagcctacagctgggcaaagtcatctaacacaaaacgtattttgtaataaagcgttgaatatctcatgtgatttattgaatactatactgaagtagggtttctattgaatgcttgttgtgtttgcagcattgtaaagtcaaaaaatcctaagttgaaccatcttatgtcgggaaaccatctgtactaatccagaaaatgcagatgcagattttaatagagttggggaaatgatgcttaatttcatttagctttacttttattttgccttgccatttatcttttttttcccttttaaatcagaaatgcttcttactgtgacaaaatgtccattgagctcagagtttttgagaatacagatgctttcctgccgttcatctcatacccgcaaattttaaccttgtcaacctctggggtattagtatgccctgacctgagtgaattcacccgtgacaaaactgacgtgaagattcaatggtacaaggtacggctttaaaaaatgccattttactaaaatgtgttttctttttttactagccataaaagaaagacttaaaatatcgattttctgaagacagtgcacacacacacacgcacaaacacacacatggtttgcctttcatatctgtgagttccacatcctgggattcaaccaacctgggattgaaaatataaacaaataaacaaataaaataacagtacaatacaaataatacaaataagaaaccaacacagtgcatcatctactgtcacatgctgcatgacaaagtttcagtcaacagtaggctgcatgtacaatggtggtcttgtaagattataatggagctgagaaatttctattgcctagtgacatcatagctgtctcaacatcatagtgcaaaatattaccttttctatgtttagatatgtttatatgtacaaaaactgaccactgtgctccaattgcctacagtattcaggacagtaacatgctgtacaggtttgtcgcctaggagcagcaggctgtatcatgtcacttaggtgtgtaggaggctctaccatctaggcctgtgcgagtactctctatgacgttcacacaacaaagaaatcacttaaactgtttctcagaattatcccattgttaagtgacacatgactgtatttacacagggcatttacattgtattagtaatctacaagtaatctagagatgatttaaagtatatgggaggatatccgtaggttatatgcaaagatgacacccctttatataaaccacttacgcatctgtgttttggcacctgtggggaatgtttgctgaaaccaatcccccaaagaaactgagggatgactgtattttaaagaatttaaaagggccgtaattaatatgttctattagtccttatgtgggttgagtaaaggtacttgaaatagtgatttgtgaagacagagtacataacagctgaaggaaataactttttactgtaatttgtctacaaaaatgtagaaaaaagcttacataacaattttatagacatattaaaggagtttttttaaaaagtacatgacagctgggcgtggtggctcacacctataatcccagcactctggcaggccaaggcaggtagatcacctgaggtcaggagtttgagaccagcctggccaacatgtcaaaaccccatctctactaaaaataaaaaattagctgggcgtggtagtgggtgccagtaatcctggtgactcgggaggctgaagcaggagaatcacttgagccctggaggtggaggttgcagtgagccaagatcacgccattgcactccagcctgggaaacacagtgagactccatctcagaaaaaaaaaaaaaaaaaaaaaagcacatgatagcaaacttttgggttaagggagcaaatatgaacacaatttattcccttgtctggttgaatagatgttatttgatgtgctcattgctcctagtgagaacatcagatattgtcattagatattgcttatgtagaccggggttggaaaaccatggttgggccctggaatcaagttgtctcctggatttgaatggctcacaagccaacgatagttgtcacttttttaaatgttggaaaaaaagtaaaagaaggatattttatgatgtgaaaatcacataaaattaaaatttcagggtcggtaaattaagtttcactggacacagccacatcctcttgttgtagtactgtctgtagccgctttcacatggcctagttgtgatggagaccctgcagactccaagatccaaaatacttcctatttggccctttcctgaaaacattggtcaactcctgatagagaccctagattgatactgaaaagtacagttattggcttaatcattaatgagaattaaccctttaattgataataggttaagtagttggctggtttgtaactacagcatctctatataggatattgatttaatattagaaactttgaaatgattttctgaaagtagaggaaagtagccagctcctatgaataagctggctgagctctagaatgcattctctctctctctctctttttaatagagatagggtctcaccatgttggccaggctggcctcgaactcctgggttcaagtgatccttccacctcagcttcccacagtgctgagattataggtgcaagcccccaagcccagcctagaatgcattctcttttggtttgggaaaagcataaagaggacaaatgaaagtttttacctggagaggaaagagcacaggctctggcgtcaatgggtctgggtttgaaactctgttccttctctgatctgttgtgcagccgtggccgagtgactccacctctcgaacctgtttcctctgtaaagtggcaattaataactttcaccacctgggattgtttcaaagattaaatggaatcatgtgtatgaagcacccggtgcagtgcttgacatataaatggtgctcaataaatgtgcatggacaaagatgtcatggtgatgcttagtaatatttattcccttcataataatgatacctattactgcgcatgtactatatccaagcctgttctaaactccctgacatgcaacccgatgaagtaggaactgtaaatatcccccctttttacagttaaggacccataaggatgttcccaagatcacacagccagtagatggtgaagtcaaaactcaaacccaggaggccagttcccatacaccactggaatgactgtggtgctgggctctatttggcatttttcatatttgactactcatgcttagaacaatgaaatatctcctttcaattaaatatgttctaaagtggtacttcatgagccatgtggcaatttcaattttatctgtgttctcgttcggagtaagattctgaagtgactcaaggttatatttgactgttgcaaacgttgaataatcatgattttgaaagtgatgtccctgagaacattgtgtgctcattagggtgtttttagaaatcccattccgctctttctatttcctggaggccttgatcttgaggattctattctgcagagaccccagagaaccttgtgtccatataaaaagtgtggactcgtttcccctatttagtttttcttataacagagatttttctgttactgactcacaaaattgaaatgctttttaaagtaattactgcaacgtcatctcttctgagcattgttgtccaggtcatcatgacgatttatagtgctcttcccagatacttcctaaggcctgaaggtagcagtcaggacataaacatatttgtattttagatggcttactttgtcaaagaagagttcgtctcttttttttccccttggacaaatatgctctaactattgtagttaaccaaatctagcaattttatttgtttatatgttaacaaattccttcccctaataatacagtcaaacgtatgcccaaagtacaaaattggcaaagtaaataccaggacaattcttggattgcaaatcccacattggttgataatgatgatgtaattcatagcctttgagatgtatattggtataatgtcaacttaaaaaaacattttcccttaaggattctcttcttttggataaagacaatgagaaatttctaagtgtgagggggaccactcacttactcgtacacgatgtggccctggaagatgctggctattaccgctgtgtcctgacatttgcccatgaaggccagcaatacaacatcactaggagtattgagctacgcatcaagagtaagtacttgccattgaggcacctatctatcctggttcaataacaagcatgcagagaacaaatgacggtgcacgtagaattccttgcaggtctttggaatgaaggataacggaaaacagatccatcagctctcctgaagcatcaggttaataagacgtgtgtgatactttgaaaggtataaatcagggtgttgttctgagaacaggtgaacgaattgggaaggttatagggttgcaagatgaaggctaaaacacaccactcaagagagtcaaacagtggcttctgtagaaggtacccttggaaagtgtcctgtgaagctttgcacctatagggctagaggtcaccacatgctgtaactttatgttcaattttaggatacttcaattttattgggtattctaaccagagagctagccttgcacatccagtggaaattgccttttatttgtcttccctaaggtgggtctagctgcccttaatagcaatatttcaaatagtcagagctgccattgattaaaaggagtttcgtttgaaaatgctgttttgagcagtattggctattgtttcacatttgttcaacatttactccgtaccaactgtgtgccggacatggagacaggtgtaaccatgtgtaaatcctggactttgccttggagagtgggccacacttctttgttttttatactgaataatgatcacaactggggtcttttgaggggatttcagagagcttcagagacacgctaagtttaaataattggtctataaggggaaaatatatttttctcacagagcatccagagattcagttgcaccgcattttcccacggactgaggtgtcctgattgtgtttgttttacagtcctgtgaggattcgttcatatcagctccttgcttctggacaggccactgactcaggtctcctgaggctttccgtggaccggcacggtcctgtctctgcgatactgtgcatgaacactagggggcagccgccctacatgcctgtctgtgttgtgatcctcccaggatctcagtggctctcaaggggtggtcctgggccagcagcgcctcatcacctgggtactcaacagacatgcaaatctcgggtcccgtggagacctactgattgaaactggagtctgggggctgtcatctgtgtctcacaagcccccgggtgatgctggggaccctcaagtctaagaagcactgagatcctggaggcttctttctctccctggatgccccagctccatagggcagcgcgtgacttggaggaggggaggaaaaggcgtctggccgtggtcgaaaagccgtctgcccctcaggctgtcctgccatgctgtctaatgtgtactcatgtcaggatttcaaaatgctgtttcgtggaagtgaggatgatgaggcccgtcgtggagacaactcacagccctcaccccccaggtgtcctttttgctcatttcaggggcctcgtttctttctttcttttcttttctttttttttttttttttggtttttttttgaggcggagtctcgctctgccacccaggctggagtgcaatggcgcgatctcggctcactgcgacctctacctcccgggttcaagcgattatcctgtctcagcctcctgagtagctgggattacaggcttacgccaccaagcccagctaatttttgtatttttagtagagacaggggttcaccatgttggtcaggctggtctcgaactcctgacctgttgatccacctgcctcggcctcccaaagtgccgggattacaggcgtgagccactgcacccggccacctcctttctttacgttggctctaatcccttggagatccacttctgcctctccagagagtttatctcttcaattaacaaggcctctgtggccgaggccaggttacacactagccttccaaataggtgtttcttgagccctgtgccttttctagaagaactgagtcttgagtattttgtggcaggcactttggagaggtggagaaggtattttaggtcaggtcaagtttcggggaaaatctatctcgtggacctcataaacatgattgttttcaggaagtctgggagggaaatggttaattgtttatcatagagcaaggactgaagacctcctgtcagcggaatgtgtgtttggctgtggcctcttccagtaattgctctgctgggaaagtcattggccaaggatgctcgattttgtagagagcctgtttcctttgccagacaaagcctgactctcataatgactggccatactggaaaggataacttagttgattagccaaacaatgacttgaaccacagcgtcaaatgaaggctttcctaacggaatctcttttccttacatctttctcagaaaaaaaagaagagaccattcctgtgatcatttcccccctcaagaccatatcagcttctctgggtaaggcccacaaggaccatgcattccacgcacctgtgggggtgcctggtatcccaatgcagggggcttgggacccttgcgtctgctgatcatacctgctccttgggtgcaatgtgcctgggtggagaccttagaactccagtgtgtgaggctggaataacaagtgtgaggaaatatttccctttggccagtttggttagaaatggcataatctgaaaacaggtatactttgcttcatgcaaagcctacctataaaaatctgaatgtgaaaatctgaacgttctggcagcagttatcaactgcatgagaagatgaacagcatgaaccccaggcagagccagcaccctcagtgtatttaaaataattcacatcaccaaaacttggctggcgctctgcctctctctaagactccatttgtaaagtgggctcagctgtggtcagtttcttgttgccagaagagctggtaagctggttgaatggtgccatgaaaatgaccaatggggctttctgcttttcactccatgtggtacagtccatcctggccagcacaggtccacactagtggccagtgagggtacgtaagtgtactgtactaacaaccaactgatgctagtggtggggcggaattgatgtttattgaggatccactatgtccaatgggatcccattcaatctcaacatagaccctgtaggttttattctctcaattttccaaaaggaaaaagccacccagggcatcacgttggctcagtggaggccaaaaggccatgctcagagtcaggctggagttcagattcaggtctgtgtgcctataaaacctgcatccttttatgtgtttgtttctgggtagtgtttttgtaggtctgttactcatttatgaaaccctggctgcacagtcttttaaaaaacaatttatttgctttttccttttgtttagtgctggtttaaattttaaatttgaattggaggccatagaggaggagggcttttgtgcagttgctgggactgctggctggcacttgggttgccactgccacagtgcagtccccatggctgcagctctaggaacaaccacctggaaatctggggcaatgggcacatgggtgatacctactggagccccagtgttctggctccctggggcttcccagccaagttccaggcccagttcccaatcagttgctttggatgcactggaatgggtggtggggccacgtgacactgattagtaggttgttacggctgaggaagatctttaaggtcataggagtggcataggatggagaacggctggcattctcaacccgtggtggggccaggtgcattaaaagacacaccacagggagccatatcacccacgaggaaaaaacaagtgagaaggttttcttcttcttttccttctactcttctttgtgaatgaaaaaaaaaataatttcctatgattgaggcagggggacccagtacatcacactgcacaactgcagagggcaccatctatagaaaacacagagtttttggctgggcgtggtggctcatggctgtaatcccagcactttgggaggccgaggcaggtggatcacgaggttaggagatcgagaccatcctggctaacacggtgaaaccccatctctactaaaaaatacaaaaaaaattagccgggcgtggtggcgggtgcccgggtcccagctcctcggggcgccgaggcaggagaatggcgtgaaccggggaggcggagcttgcagtgagccgagatcgccccaccgcactccagcctgggcgacagagcgagactccatctcaaaaacaaaacaaaacaaaacaaaaaaaacacgagtttttaaagaagggttgatccccagtcagagtcatctgggaatggagagttcccaggagaaacattagagccaagaccagcctcaggcaaagagaaagaatccacacattgatctggattttctgaggtaactgaagtgaggggcagaggaagtcggcttgaatttagcatgtcccgtgggagcgcaggggccctggtgaagccatttaacttcaggtgcctcttggtttttgcctgccatgaagaccagttgtaggaaccagaggtacttcgtaaacagtaaagctctgtgtgaacagaatcatttgagaaaactaaattttctaccaaggaaagaattgggtggtgaggggtgtttgagaagccgaggagggactcagggctcaggtttgctggtgggtgggaggtgctggttctgcagttgacgtgctgtgccttgccatccacagggtcaagactgacaatcccgtgtaaggtgtttctgggaaccggcacacccttaaccaccatgctgtggtggacggccaatgacacccacatagagagcgcctacccgggaggccgcgtgaccgaggggccacgccagtaagtgggccagggtcttctgttgagaactctgtgggtttcgctcttccttttggagacagttatcactatgacccacataccacattaaaagttactttttttgattccaaactgttggatgtttagaatttaaaaaattgtattttgctaaaaattatcttgagaatcaaactttctctgtaaatacttaaaagttgagttgcagttgacatgttggtattgatgttgcattttgtagctgtttcattaaacattgatccttttattttcgcaagttaaaaaatattttggagttcatatctttccattttccactctgcaacctgactatcaaacattttcataaacccttaaaaagaccctgagacctagccacagtatctatagtacctcttctgtttctcagggagctgtgggctgccacaatctctaagggaggttaataattaaaaaaaagaaagaattcagttctcataagcagtcatctctagaaaatgttttcttactctgagactcgaacaatcagaccttttgtaagtgggaacttgttgcctgtgagggagaccattcaacattccaaattgtaactctttttaaaattacagttttgatactttgaattagcctgagcttttgcttgccaaatggttgtgttttttgaaagacttatcacaaaagatctttctggatgtaatttagtggataaaaactatgtgtgggtagcacaatcatgtgcttgcaagttctcattgcaaaagacctggccacaactaaatgcccatctcagcttactcatatgatccacttacttaaaggaacctatattccccctacaaatagaacaaaaatattcctagtggatccactcatctgtgtttttattcacactaacagttagtagtgaggtgtctacagattcctctaacactataaatggcagctatcctggccacagccattcccctgggctgtctgcaggtttccagagtgagagtcagcagtagagatgagaagagacggcaccactgagggctggagtcctggaaactccctgcccttcaatatacaagtgatttaatggtgagggactcaagtttcctcaaactagacgtttctgttcccatgactgtttttttttgttgttgttgttcattaagagacttaaaagatgaacttccccattatctaaccctgtagtgtaacaactgtttgatgccagtgaccgccaacttcagtgacactaaggccttcagggacaggcttagaaactgtcccaaatgaatcacaagtatggtggcaagagctcctaactttatgaaacttgaaaacaataaaagcgcaatgggtacttctaaaggagagtgtttagatgtctacattgtgaaagacaagcttgcattcgatacaatcataattaagtgaatgttttttttaactcagggaatattcagaaaataatgagaactacattgaagtgccattgatttttgatcctgtcacaagagaggatttgcacatggattttaaatgtgttgtccataataccctgagttttcagacactacgcaccacagtcaaggaaggtatgtatgtattttggggagcactataggagaatataacatgttgaatgttccatggatactagacaaatctacttgttctccaaatgattccatagaaattcccttgcattgtctgctagtggagagctgaaaagaaacctcccatttttaaagagttttggtagggtggaggctggactttgggagattatactcaaatgaaaaatttaaatagcaagctgatttttggaaaatggatgaaatggttctacagtaaacttcgaaatactctgtctgcatgtggctctgccttgggtcactaatcagctgtcttcgcatggcctctagaagagggtggattgttctttatcctgaagatgagaaacttcatcctctaagagctggggattgggagctacccagggttcagggcagctttagggtcaaagtcattatatgaccggaaataggtacaaggctacagccaaatcaacccagtgttcatttaaggacatttaaaaagaagaagaggaaaacccacattatcatttttgattaaattgatttcatatcaatgtttaattgttgagcaggagggagagctgccttgaatgtagtctctgttgacagcctgtagctaatggcaggcaagccaaagtgattcccagcatctcagtgatggctcgtggacaatcttacagcaataacataaatacaaattgctccaggtctccatgttttgctggggaggcagccacaaacacagtgtaaactggaaagccaatgatgtgttccagcctcaggacagggaatggcacccaactttcctccaactgtgcgctgtgcaccaccagcctcacactcacctgagccactggtcacaaacacagatctcaggacttactccagatccaccctgtcaaatattcctagggagaggctgcagcctgtgacacaaaaagctcctttcacagtgaagtttgagaatgagggcacacatgtgaagggtggcgtttcagatcatttccagatgagcaggctgggagagatggtggttgtacacatttacccacaaaaatcagaatgttccctctcggggtcagattagtgagcccaaggaacctgtggtttgtctggccctgatgctgggaacctttaaaattttccataacatgagccttgtccctgcatgtggctggccgtgactgatccagggaacacaggctgtaagtctttcaccaggactgagaggtgtattcaaacagctgcccagaatattacagctgaacttatttctaatctttgtggggttttaaaatgtgagaatcctctggagcaacaggctgaggtcatgtcgattcctggatgactaaacagactgtgatagataatagcttaaaaatgcaggattctagtctcatcaacaatgtgtctgataacactctgttctcacatttgctttttaactttttattcagagtctcttcctgtatttccataacacagagacgccaaggagcagaacataaaatagctggacccaagcaatcgtgttggcccctgcagctccattattcaaaatttattttcctttgctacttcctttgatcctcatgacacccatgctcattagaaaagggcagattgttcctggctctgtcacagttggccaactgtgacataaacagacagcatcttaaacgcacagtgtcccactgttggaacaaagttaaaccctcagcacttgcccacttaccctacgatgtttctaacagattttgccctatcacgctcgtttctctaatgccacagacatcactctcaaatatcctccatgttggtgtgagggatgtgctttctgaaaatcaatgcacatttatcaagaaaaacaaactccaatttctttcttatcttgtacacctgcattgccctgtcctcttgtacagtgagagactgttcagctcctgatgtgactctgttcttcccacagcctcctccacgttctcctggggcattgtgctggccccactttcactggccttcttggttttggggggaatatggatgcacagacggtgcaaacacagaactggaaaagcagatggtctgactgtgctatggcctcatcatcaagactttcaatcctatcccaagtgaaataaatggaatgaaataattcaaacacaaactccgtacgtcttctcttatggaagtggctgtgtctttttgagggactctgttctttgcctcagttgtctaccaaaggtgccacatttatagtggctttgtagtaaaggactaaagtcttacattctgttttttttttccctaaaaatcagtgacaacagtagatgtgcctgtgagtgggtgtgagtagctgtctgctacttgtgacctatttaacagaatgaggtgctcttaggcctgcatgagagtggaaaacatctacatgagttttgacattcattcaacaaaaacatattatgagtctattttgactagactctatgggagatgttgtacatacagtgatggttaagacatagtttgcctttcaggaagctggttgttcattttgagactgaaaagaataatttagtgctaaagcagaagaatcagcaagaattggtgaacttttttggaaagggctatccaaaaaatagcaattaaaaatacacacattggaatgtattagtgaactgagaattagacccaacttcataacaacatgtctgaaaatagaaggaagggcattaaaagaattgtagacaaactgaataaaatgtacccagagcctctttcatatcatataccaaaaataaaatccagatagataaatgagttcaattaaaaaaaaaaaaactccaatggcaggaaaatcagcacggctggtgactccacctttcaggtctctgttcaaatgtgaccttcccagagggaaggtccccagagaggaccttccttcctctctgtcccctcaccctgctttgtaccattgtagcttttatcaccaccagaccttccagtatagatttgcttgttgattttcaatttatgtttcccacccaaatggaagacccatgaggtcagagagattattttggtcccagctgtatttccagtacctcaaagcaggcatttaatgaatatttgcagaataaatgaagatgggatgaactctctcttgttcattaccaaaagacttgcaagagtaaaggtgagtaggcttaattacattataatttctgcacaacaaaataacaaaagcaaggtttagacaaaattgtgtcagacaagttcaaggaatgagtaactatcatgtgtagagttattcaaagtcatagaaaaggcatgtgtcttagtctttttgggctgctacaacaaaataccataactagggtggcttgtaaacaacagaaatttatttctcacagttttggaggttgagaagtccaagatcaaggtgcgagcagatttggtgtctggtgagggcccacttcctggctaatagacggcagccctcctgacttaatcacctcccaagggccacaactcctaataccattgtattggaggttagggtttcaacat

SEQ ID NO: 24863 - DNA, 6950 bp, Homo Sapiens
  misc_feature (782)..(782): n is a, c, g, or t
  misc_feature (1651)..(1651): n is a, c, g, or t
  misc_feature (3918)..(3918): n is a, c, g, or t
  misc_feature (6468)..(6468): n is a, c, g, or t
ggatccaagaagcccatgaagccatgcgccagggccagagctggcctgcctggtctggatggtatgtcatccttgtgttacaagtgaggaaactgaggctcagggagtaacaccaccggttcaaggtcttaaagccgagaagtggcccctctgggttcggaaggcaggctgggccctggggcagcctctatccccagcccctcttccccaggaccctacggccccaagaggcttcactggcaattcggtcagccctctctagccccctccccagctcccctttgtcctgtccagggctgagcaccatcccacagcccacttcctaccagggctgtgtggcccattgggcccctagagggagacctggggtctggatggggagggaagtgtttcaggctgaagctgagcctggggaagcgggcgggggtggctaggcgggccaccccctcaacagttttcagacctcaagaagtcaccacgaaattccattctcctgacagcaaagaaattgattcactcttgccaaagcctgcggcccccacaagaatgctgtaaagcttcctcccgctgcttccagacaggcagcagcatcaggtcccccactcctcccattcctggctacagagagacgcgggaaccccccctacccagttctatgcatgtgcccctgccaggctgggccatccacctctgtatggtcactcccttggtacaatatcccccttgctttctctacaatgggcacattgctcccacgacctgctgggtcaaaggcaccgcantcaggggtagctggggagcaggagttgcgggggtggggcggctcagggcaggaagccccatcccctggcctgggaactgtggggagacggactcacagcatcttgtcaggtggggtgcagggtggcatggcacccaccatcggtgccactgatgtaaagtccaggtacagagcacaacccgtgcacatatttgggggcttggccatgcttggctgcaggggattgaggagggattgggcctcaagaaacggggctgggactaagtcacgaggtgcgtgaatatcaggcgggactttaactcagccagtggagagctatggagggttttgctctttgtgtgggtgtgtgagtggctatgatcctagttgtccagctgctgcgtggagaataagtaaagcaggtaggataggagtcgggtgggatgggggtggaggctgcccaagtgattcagggaagagatgatggggatggatgaggctccgtctctgaaacaattcagatatgggagagcctgaagtcagcggtgtgactgaagcacgtggggtcatggacacccctcagtccggaggctggggctgggctgggactcagctgactttgtgggggcagccaacccagtcactgtgtccttttctccccggctcaccctcaagcctctccagctgcatggaggctccagggctaggctctggctgatcggaaggggtttatggcaggaggtgacgccatgggagacttgtcacttgggcacagccagcaccatctgctggggcatctgctttcggaggtggtgactgctaattacctggggccaggaagaggcctgggaacccccatcccccacaccacccaacgggtacaggggctanggggtggggcccctggggccctaaagagcaaatgggctacagcgtccttagcggggggagaagggtctgacagtggggccagacatttatccagtgaattttttcagaacacctactatgtcccaaaacctgttccaggtctgaatgacaccaggtcgctgctgtcttgcggctgacattcaggtagaggtaaggagaggggctccaagggcacttaaagaatttaaaatgccatctcaggcgtgaacataactccgaggggggcagtttagccacggtggtggcggtggtggtcgtggtggtcgcagagaccctgcttaggagggcacgggaagacagcgcagccacgggcagagccgcctccgtccacgcttccggaggacgtggcgggcagggggctcacaccctgctcaggcgacccttggccacttccgggcccctcgcccctcaccctcggctgccggcgcgcattcctgccgcccccgctcgtgcgaggggcgggcccgggcccgtgggaagggccggggatgggggccgtgtgccggggaggcggggtggggagggcgcacagctgggccgcatctggcccgagcgcaaggagaccaaatgggacagaaggcggcctttcatccggcgagggaagtggcggccttcgtttctcctcgccatggggcgcctgaggatttcggggagccaaccctcccgacggagggccaggatcgaggaaatcagccagggaggaaggagtggaatttggttctggtgctttctcgttagaacctcgtgtccccacctgcggcacaggtggccaagctcttgctctgtacaaataacggctcccctgaaccgagcgctcgggaagacccaggcgccaccccagtttgcaaggcctgccgcgtcccaaggggaggaagccgtgctcaggaggggaagcgcacagcgaggaagtaggatgtcccccgcggtgcgtcggagcccagagcccgggtctcagcaccctgcccgctgcgccgagggcgcgcccctcccgtgccgggacgcccggtgcatccccggacggcgctggccaggctgggtttcctcttcagggacaccggcgcgggccgggcccgtccccaagcccctcggcggcccgcaggggctacccggggcggggggggtgcggggcgtgcacgtgcgcgccgggggcggggccgctgcgccctctgggcagttcccagcccccagccgcggccccacgtgggtctgcgggcgtggagcggcgaccggcgcgaggccccgcccccgagcccgggagccaatgagcgcacgggggcgggaccggggcggggaggtttaagagcgcgggacactggtgctgcgctgctggactgcgccgccggagcgacgggcttcgggtcggtgcaaggcaggcgcacggggaagggcgcgccgcgcggccgccaccccaccatgctcaagcgctgcggccggcgcctgctgctggcgctggcgggcgcgctgctcgcctgcctgctggtgctcaccgccgacccgccgccgcctccactgcccgccgagcgcggccggcgcgcgctgcgcagcctggcgggccccgcgggggctgccccggcgcccgggctgggggcggcggcggcggcgcccggggcgctggtccgcgacgtgcacagtctgtccgagtacttcagcctgctcacccgcgcgcgcagagatgcgggcccgccgcccggggctgccccccgccccgccgacggccacccgcgccccctggccgagccgctcgcgccccgagacgtcttcatcgctgtcaagaccaccaaaaagttccaccgcgcgcgcctcgacctgctgctggagacctggatctcgcgccacaaggagatggtgagccccccgcggcctggactggcgggcgagcggggcggggacccaccatctggtccagctggtggcagtgtcccatgggagtcaggctgcatccccatccagccactagggccatctgtgggcgacgccagtgcaccccggtgcacccagtttgcctgctggggccactctcccgttacagttgtgttactgtccccggggccccgcctcctgtccagctccagagtcctggatggctgcaggaccctacaccaagtctccatgcttggggttggtgccctgtgatacttctcaccccgtaaacattggagcgcattcatagggcattatgtcctcaaacttccacaagcaaattctgttcggacccaccctcagctcanaccccttcctggggagaaaggctcttcctttagagaagtgaggggttctgacctctgggccctttcctcatcacagtgttaaggtacggggagggagggaagtcattgctggttggtgggtcctggggaagtacatctcaaagaactccaggttttggggtctgtgtggggaccctcccgcacagtgcagtagtctctgaggcctgcaaccttgggcacagcccacttcagttgggcatcagcttcttacacacacataattaagacacaccccactttgaacatttccctcgaggccacagcaggacggttgggctggggcgggatggggacagtgtgtggggcttgcagtcggggactgggggggtgtctctgggctgggagatgcagaggcatttgctgtgagggtgggggctcagggaagaccctgcacgccttcctccctgctcaaaccccggagacccagagccttctgacctggcgctgtcctgttttggggcactgtgggtgggtgggagcagggcttggtgaggtcatgagggcgacggggaggggcagggtcctccctggtcctggcgtggggaaggggccctgggaaccccatggcagcctcctgggaacacagcgtcccattcccaggggctcaacgggctggcgggagggggcggcgggggccgtgggtttttgtttggcggccgggcccgttaggattcccagcgccgggcggctctcacgccggccccttgggcaaggtaacaaagcccctttctccagcgagaaaggcgtcgggccccttgtgtgcagctacgcgctccgtgggaaccgctgctggcgtgctggccactcaggttgcctggcgatgaggggaccagcgggcccccccagcatctcttactgacagtccttttggggcaccatccctgagcctggcccccccacccccagcactcaagccttactgctatgtgatcttgggcatccttcagccccactctgggctaccaccagctctgagcacctctcatcttggaatttggggcctttctccaacagaggggatgtggtcagagggctgggctgtgtgatcctgagcaagacctggggcctctcagaccctcactctgatctctgaaatgggggaacatggtccttccaggagcacgttgtaagagactggcaaagcctgcaggcatggggtgaacccggcgggcactcagggtcgaggtgggggccatcactcccttgagccctgaggtccctactggagggtcaccccaccaggggacaaggttgaatctgccctcagcatcagttcaccagcacacagcaagcaaagacccccttgtggtgggtgatgggcaggggtcctggaaacccacagaagagggcccccctctcccagccctgcacggaatgactcagacatggtctgatgggggagatagaaagatgtcagggctgtgcggggggaaaaccccgagaggctgtgtgaggcaacagtgggcatctgacccacatgctgggggaagggagggaggagggaagacttcctggaggaggcgccatttgagctagactaagagtaaaaaagtgcccagaaagggcactccatccgggcatggtgatgaccacagcatgggggttgtgcaggaaacttctagcaactggagtggtggctggggggagggtcggttggtcagcaggggcccgcgctgagatgggcctggagtccaggatgaagagcctggcctttggcccagaggttccccgcccctcccaggagcagccaggctgccgcgctgccaccacagcggccacaattgctggggagaacttggcatcctgtgtttctttgaatcgcggctccaggaacaatgctgcttcctgtgggtgtcccccggccccggcccccgcccccgtccaccctcatccacccggctcttcctcctgcagccccgtcttcgtctggaaagttaggtggcactggggggtctgggtccctagaaggcagggactgggctggtctagcaccgcctcggccccagggtatgacctcaggctggtgcctgcacctctctgggcctcagtttccccacttgggcctcagctggtaatggcacccacctccgagggctgtcagggagaggaagggagagaatctgtctttgcactttgttctctgcccaggggagctctgttatgcccattttactgaagacgagactgaggctctgagcggcaggtgaggcctatagcccagcagcgcctttttcctcccctcctggtggctcaggtgtcgggagacagttcgaccggcacccccgcaccccatagccccgccttctcagatgctgttctagaggcctccctgctccctgagctgaacaaaggtgactttaatctccgtagccttgggctgggtttttagggcaccaccaaatctcgggagaacaggcctcccttgatctcattaagaaagcattttccttttaacccagcggcgcagtggagcgtctgcaggggctggccctccgcctcccacggcattcntgggctgagattctggggagccaaggggctgggtgcgagtctgtgcgtgtggcttgccctggggtgtctatgggtgctgcaggaggggtgcatgcatggagaggcggagacccagcctgccacccccttagctctgggcctcaccctagtgagcatgtgcccagggctgggtcaggctggataaggatctgagactaccaaggtgttccagggcctctgcgggacctgtgtgtacagggaaggaaactgaggctgggtgggcatcagggggttgtcccttggtcagagcattgcccgtacaccctgggttttgcactcagccatgccagggtgcgccgggcggcacgcgctgggcgggccgggcagaggaaggaacattcctccccgtgtgccggcaggcccaggcgggcgccggcgactcctggccccgccctggcggccccctcctcttccgcagagcgctcctggcagggggcggccgc

SEQ ID NO: 24864 - DNA, 912 bp, Homo Sapiens
atggctgctgttcatgatctggagatggagagcatgaatctgaatatggggagagagatgaaagaagagctggaggaagaggagaaaatgagagaggatgggggaggtaaagatcgggccaagagtaaaaaggtccacaggattgtctcaaaatggatgctgcccgaaaagtcccgaggaacatacttggagagagctaactgcttcccgcctcccgtgttcatcatctccatcagcctggccgagctggcagtgtttatttactatgctgtgtggaagcctcagaaacagtggatcacgttggacacaggcatcttggagagtccctttatctacagtcctgagaagagggaggaagcctggaggtttatctcatacatgctggtacatgctggagttcagcacatcttggggaatctttgtatgcagcttgttttgggtattcccttggaaatggtccacaaaggcctccgtgtggggctggtgtacctggcaggagtgattgcagggtcccttgccagctccatctttgacccactcagatatcttgtgggagcttcaggaggagtctatgctctgatgggaggctattttatgaatgttctggtgaattttcaagaaatgattcctgcctttggaattttcagactgctgatcatcatcctgataattgtgttggacatgggatttgctctctatagaaggttctttgttcctgaagatgggtctccggtgtcttttgcagctcacattgcaggtggatttgctggaatgtccattggctacacggtgtttagctgctttgataaagcactgctgaaagatccaaggttttggatagcaattgctgcatatttagcttgtgtcttatttgctgtgtttttcaacattttcctatctccagcaaactga

SEQ ID NO: 24865 - DNA, 220803 bp, Homo Sapiens
cagccacctctgctacctacagcggggaggtcctgggaatgggaaaaggttcgcgagtccgggccccgaggacagagaccttctctctcacccctggaggcgcaggatttaaccccccaccccccaccctttgaaagggaggttgagttttgctcaggtcgaaatcagtttaaaacttaaggacgaggcgcgattatgctatccccttcctgaagttattctttaaggagacgacaagcgaaattgtggcgaacacccctttctcccacccttgggatcccgtgggggacggtgtctcccctcccccaggaccgctcgctcgcccacccccgataagccccaaccctccccgaccagatggctggtcttcccaaggtttccaccagggaggtcctcccagccggagagagaattccgtttccaaccgagactcctttaccccaaaaagaccatttgtgtatgcgagtcgtttttaaatgtctcctcgtagaaaaactgaaagtagaaagaaaggaagcaatttctgagcagatgtctgaccaccccttctcgcacactcccagcatcgggttacagggtcctgggagcccccacccacattctgcggccccacacggatggacccacagtccttccgctccagcttgtgcgcgacccctgaacgccctccggcacccctggaccccgtctccctgcacgtccgggcctcaggaggcggggagggtagcggcgcaacacaatgatatagggataaatattaagccgtgacattgacgtgcccggcgcctcccctcccccgcgctcccggcacactctgggctgctcggcacgccccctcccgttccactgcgtcccgcgccgctcgctcatccccgaggggcccctgcaacctctccgcgcgaagacggcttcagccctgcagggaaagaaaagtaacttcgcttttctcggaggaaccaggaaggattaagcggcttgggagagggcaggagcgcgcggagggtagcgatggaggcttcgtaaaggaggaggaggggagtctggaggaaccccgaggaaggcttctgggctgtctgattgcactttcttcttatcctcccgtctcctcctttaggtgcaatgattctggactgagacgcgcttgggcagaggctatgtaatcgtgtctgtgttgaggacttcgcttcgaggagggaagaggagggatcggctcgctcctccggcggcggcggcggcggcgactctgcaggcggagtttcgcggcggcggcaccagggttacgccagccccgcggggaggtctctccatccagcttctgcagcggcgaaagccccagcgcccgagcgcctgagccggcggggagcaagtaaagctagaccgatctccggggagccccggagtaggcgagcggcggccgccagctagttgagcgcaccccccgcccgccccagcggcgccgcggcgggcggcgtccaggcggcatggagaaggacggcctgtgccgcgctgaccagcagtacgaatgcgtggcggagatcggggagggcgcctatgggaaggtgttcaaggcccgcgacttgaagaacggaggccgtttcgtggcgttgaagcgcgtgcgggtgcagaccggcgaggagggcatgccgctctccaccatccgcgaggtggcggtgctgaggcacctggagaccttcgagcaccccaacgtggtcaggtgagccagggagctgcgccctcgccatctggggcctcgcgcgcgcggggagggccgagccgggaatcctcaggcccagaaaggtgcggggcagagggcgactggggaggtcctgcgcgacctgttggtcttacagagtgagagttaagttttgtcgacagagccgcgagccagagccggtgaccttgccagacagcgagccgaaagacaagtcaaaaaaacatgacctgagcaggcttccctgcagctgtgcaacttagaagcgttttctccctgcccaccctgaaggagggtctgggggaagtgggtgcgttttagggacaggataagccaacctgagacatgccccgctagcccccgcatatttttcgtggccatgccgttggggaatttttgaaagacagagtaggtgagactggagaatgaggatgccgtgtgataatcagtgggaactttatgggtggagccaagtgtaaatcaggttaacaagatgcagaaacatcataatatttttgccagtcatactctcagtttctctttattaaagttgcgtagtaagaatgactcctggtggtctaaggagtttgagtgctgatgcccaatctcaaacagcgtcataaaaatttcttccaaaactgttatccctgtgtctgttttactttatatctctgggcggacatactctttagactaattctccaaagggttaaatgtgagtccaagatgtggtatggttagatcataaatgttctgcccatgcttttcccagatggattgtgcgagtgggtggggagacagcagttcttactctctcctgtgtggtaaccagtattaaatgaaaatgtgtgacttaggataatggtgttttcttagtgatcctggaatttccccattgtgtggttgacattgtttggttgtgtcatccttttcttttttaaacagagatgcatagctttacattgaaaaggaatgcctagaaacttctgcaaattgggttgtgattttacctttctcgatcttgagaaaatgtgtagcagaaatatcttttttctcatccatttagggcttctgttcaacaaatacatgcctactgtgtgcgctgaggatgaaatgatgtaaataagcacagctaaatatttttgtaaaaagtcaaacaatttaacattagtcatcaaagtggagagacccaagactgacctttgaaataccaaactctctacagactcagagagaccaaatatctacagaatcttcttgggaggttttaacttgtctcctcttatcccaggctggtgatttgtgcggtgctttgttcccaacgcagtttagactcaagctagaaggcatcaaagaatcataaatatataaataaggcagtaaatggttataaagttaagaccgcattatacctcggcctagctagtgaaggagaatgagtgttttagaagatgagattatatataaaaacctatagatgactttttttcatgtgtattttatttgttaaaaacaacaaaatccgtttttggggctctttgtgatattggagggaaaaggggagggtatatttagccccctgtaactcagctgtcgtcctaggggaatcacctaatacatcccgaaggatgaattccaccactacaattttaagacggaagttcttgttttattttgtctgttacctatggagtatccagttaagggtgcttatcatgtatatgaatgaatagtgtccttccaaacgtagaggtactacagaggcacccctgtataacactattgtttacaaagcttacgccattcttataccagaggcacactttctgccattgtgcttgtagattttgtctgatccatcctattctcttgatttatcctcctgagattgatgtgtttctagacgtttctaactgacccatgacttggattctgtactgtgaatttcaggaggatattcttatgaactgaagacaaaggcattgttttctaaaattatttttacgtgttaaggtgatgatggcacctacctgttaaagtcgtgagaataaaatgagatggcgtatgtgaaagcactttgtaaatttgaaagtacttcagatatctaaaggattgtttgcgtttcagcagattgatggtctcttgccatggagcagcttcacagggaggggtcaattcacctgaccttttttgtagaacaaatcatattcaaacccagacattacaggctctggaaccaagaagatccttgaggataattagcctgtaagatgtcagaaaagactctcagtcacgagccatgaaattcagtgatacttgaggaaattattgatgatgtcaccctcatgagctacagatcttcattccctttttgtttccttcctgtttcttctcttctgcctctgccttgaaacaaccattggtccccatgacttgcttggccagactaagaattctggattttagaggctgcgaatatttgctcagacagggtcaggaaataaggacagttgacagcaattcttttctttccaagggagagttgtcaaagttgggtccccaaacctgtgatttactattgcccctgggattagttttacagtcttaagcctggttctttaatggtttcttaaaagggcagatgcttttataagtaccttcaagtcataagtaattgatcataattataggccctcccccacagatagttaagcctctaagctaacaggagcataataaacatattagttttttcaaaagtttaagatttaattttgatggatttgccagaaaagctgacttgttattgctggcactggtactgcctgcatgcacagggataatgacttgaaattcttgcttacctgcatttgatgtatcccaggccctcgcctgatcagccagtgagtgtctgggaagtaaatttactctttttttacatttggtaatcccaaatcctggaacctttgccagaataggacttcactgtgaacctgtattggagtttctgcactgcacaaatggatcctgtttgaacagcctgaactaaaaacaatagagataaaattatagcatgttttgtcagcagtctgttcattcaccaaatatttactgagggtccactatgtgccagactcttctagaaggtggggatatagcaatgaacaagcctggaaaagtctccgcacttgtagaacttgccttgtaatgagatgagcagttctttcttctctttaaaaatttactcatctttgttttaattgccttgttttgttatacttaacctaaccagttttatagaacaactgatatttctgataattcggttaccaggaatttcctgattgagtaggcaacataaccaaaaggctaatcagaatcaagtgctttttgaagattaaattttacctccctaacatagggattgatctatatgagatactgacacatagctaatataagtgaacatttgagctccatttattcaaaaaggatttaggaagggcatatgctttaaaaaccatggggctaggtgctgggaaagataccagggtaaatcatacctagctactctcctgaagcagttcttcccatgtttgaaggaataagatgatcaccataaccctgatacatgataggatcatgtgctgtaagaaagatacaagccagtgcttacctgtattgtttctagggattatatttattagtgtaacagtaaaagcaattcaaattcaagtattggctctggaaactaaaagtcattacatatcagtgaataaacttgtgatgtttaaatattataattagaatagtcactgctttaaaaacaaaacaaaaaacccaaagaaaaggctgtaaagcttaatgattattcaaggagagttttctaattttctctcttttttaaagatcttagtaatatattgcataaaaggtgagtaaaaatgtgattttctctggaaaacctaattgttaacagggtaaaagaaacatgacatatttgactctgtaaagccaggtcttcaattggattagttcatgagaatccttctgaataaaattgctatttgtgtggttgaataatacatttactagggcttttttcaataaaagcaggaaaagcaggagtttaattctccttttaaatatcagtatgttaaaagtatgtttgttctttctgtctctgagagttccttgaaaagtttctgatttttcaaggttgtttagtaaataaacattttcacaatggtattctgctcattttttgttcctacagaagaacttgataatgctgaatttttgacattgcagttatatcccttttatacaaccactatcaacatagaattattagaatctctctatggaatcaaggacaaaaaaggtctataagaggaaaacttgtataaacttgaatatctttgaggatattttcctatgtttaagacatgggtaaatgaatatctatgcaaataggttcctattaaaaataaattatttcttttttaaaaaaacaaatgtctcactattaatgatttcttaggaaagttttttaagaaggaaacacagcatacatgcagcctatcattgtaaaaccatggatattagggttggaagacactctggaggtcaagctacttgtctgtcatgccattttaaagttattgacttgttcttaaaactaagtagcaatttttgtttgtttgtttgatggaagcagttaaatcgggtgagtacatttctagtttggaaaaaatgaactgtatgtagacaaaagtgacagtttgccaggaatgaatgacataacgataaatgaataaaaattcagtaaattcctgaattctgcagtatgccatactgaagtatatctctacaagagtattattccagtaaattcttcttttaaggaagttgtgctataattatgataatttaaattaattataataatttaaaatagctatagttaaatgatgatacaggtaaattatgcaggtaattcattaataatattgaattcattttagacaaagaggagtaggaaaaattgaaacacttagtacttgtctgatgaatgaaatattacataatgtggctctggcacattatgtaacattctggttaatgaaataaaaacatcataatacttaaaaattagatggcataataaccatcagacacataagcaaatatgtgttttccatgccttctgaggaactaatcacactattgttctttctcatgaggttcagatgagttgctctgtcttcataggaagtaaattaattgtgagcttcttgatgtaacagaacacagcagagatgaaatctgggtgtcagtgaattgttaacaggagaagttagtgtgtatgatgttgggctttgtccaagatccaggaggcagcactgaaaacgcaccggtggttgataacaagcatacttacatgaaggtcactatttgagtgatgatccatagatgctaggtttggtggagcaggcaggccagcaatcagagagatttttccaagagctgctgggtagttttcttgaatatcaccagtttgctgccatacctgatttttattttaccagctgcacatgtagctgctcttgcctgagaggtgaaccggagggactgcaaggcatgtggcaggaatctatgcaagtgtacagttgtagtctggaagtccatttgagtcaggattattattaaacatttttgaccatctcctttgtctatagtagtttgccgaaatttggatatctactggctttgtaatttaagtagccacttaaattattcctattctctggccttcctaaaggatttagttcagtagaattagaatcacagcataaggatttttttaattggaagaagtcttagatttaacctagtgcaaccccctttgatctgttttataataataaaatttgagttgttttatgaatgcaaaaaattatctcactgttagtgaacagttttattctgtgattgtatgcattgtagatataaactgattgaggatggctaagattcagacagaggtttatattaaacattggtaagacaggatgactgatggtcattggatataccagaaaaaaatcccttgagatgtaaaagtattttcagtttagtgactttatgtttgctgacttgagaaccaggattgtgtattttatatccataaataacatggtgtccataaccattggttaacccgtatatgtttcctgattgattgaaattttaaaccccttagataagcacttttcatcgttttagagttgtatactgcattagcaagtatcttggactattgacattgggagatctgtgggtattaactgtaaggcatacacatgtgaagtctatttagtaagagtcttcaaatacttactcatatttaaacttttcctgactatgcattttttatcttcaatattgtacttgctttggctttgacaggatattctcatgttcttcctctgtatttgttaacatgtatcctacagacagatggactactccatttgccctaatggatttcttgccatccacctctattactttaatttgaacagatctctgaatgtgcacttggtacctctcctgcaccactctccacctgttgaaattctgcttatccttcagggccaacctcaaatgtcactttctttgttctgtattccttaatacctcgatttggataacatttctgcttcctttgagtcctggtaactttggacctcctttatggcacttagcttgtatctgtccccttatattatttctgttatgtaagatggaatgttaactcccatgacagccctcttctgactctctactctttcacaccctatttgtaagctctttaaggcagagagtgtcttgtgattacattcgtttatatcctgtatccattggatataaggtgaatacgtaacaagtgagtgaaatcattgaaaaggggtccagttataaaggaagacaccatatgaattatttctatcatgtgaaataatgttaatactaaggagtgtcaaggagggagaacggatctgcatattggattacacttattgggattcctgggaaataatttaggaaatactgaaaaaaggaagtttcatttttgtcttactccaatctacatagtttatatgaaagtttaagtataattcattcttatagttaactgtgcaactttggacttaatttatatactgcaaagaagacattaacattaggaaatgagcatacattcagcaaaagctgaaaatgatttgaacatttcaaatgtaagaaagtaaggtattataaatacattttgatcaattgcttgagttcttttatttttcccattaattttaatttctttggctttcaatagtggaaaacctgttagcagaattaggtaaaaccttcctaataatttctataaaagatgatgattctgaatttcatttgagccttgtcttctactcctcttcataatttgtgtacagagaatttggattccatcttgacaaactggtaggtttaattaagaagtatacttccagtttgaattcattccagtttcttaagacacatatggttggggtgtgtgtgtgtgtgtgtgtgtgtgcacgcatgtgcatgcagaacagtggagtacaagattcttgaaagaagggactgtgttgtcttgttccttgcagtatcccaagcatttagcatgatgtctggtgtcttgtaaccctgaataagtatttctaaatgacagaatatgcgccatttagaaattcagaatttaattttttttagttagaaatgagtaatcatgtctgaaaatacaggtgaggtctctggcattcagcaagtatttatgagtatctgttatattcaacgctttgttaaatgggattaaggcagtagtcacaaaaagtgcatattgaaatgtttacccaaaaaatggtatgtggtctgcaatttgtttcacaatggggtagagatgcaataagaatgaactatgagttgatcactgttgaaactgtggagttttattgtactagtctctctgcatttatatatgtttgaaattttccataataagtttttcaaatgttcctgcttgtgggctaggagtcagaaaactgattcttatcctgattcctctgcttattatttaatagttgagtaacctagggtaaattcctcatgtctcttggctgccatatccccacaataaaaatagaaattactactgctctttagaccttagtggtttactctgatcaaatgaaattatgtatacaaagatccaatattatacaaatataaggtattattaacaaaatgaattcctgctttcaagtagtttataatttcctggaagaaactgacatgtacacagatatctgtattactgattggtagcactttcattccacctcacgttgtgaaagtatgaatggagctaggtacttctgaaaagatgtgtattgagtttatagtaattaaagtaaaaaataatctttcatttgggtattggatattggtgtcgtgtttacccagtggtctttcctgtttattaatgggtttattgtgagagtatctgtggaccaaatgctgctgagaacacattgtcaaaactgatgggagcttgatgatttcttctgtatttgactattcaaattaacccaaagaggagttggattctttgcttgttctttctttcttttattttttaatttcaaaatctcaaagagaattattcatttttgtcatactttggaatttctgcttgtttattttctgaggctgttcctatggcgtgactgacttatgacatttaaaattttgttctgtgtcctctgtttaaatcgttaagagttctattcacagcaatgaagcagttcttttttaggggcactaatctttagtgaatttgctttttttttttcctttgcttccttttattgcaaagtaatctcataatttctgtggtaggtgttcctaatgattaaaaaaaaacattcatttatcctaaaatacttttatttttagaaggttcaaagtataatgttaggaacattaactctcacacctttccagcagcagagcaagaaaaacaaaagaaggccaggcacagtggctcacacctgtaattctagcactttggaaggctaggatgggaagattgcttgagcctagaagttagagaccagactgggcaacatagggagaccctgtctctacaaataataaaaactttttctgaaaaaagacatctttgcatttcaagggtagacttttaaactttagtttaaaagtttagtttactcagaccagtacattttaaaactttttagaagaacccaagagactgtctgagtcgtttcaagttgggagttttagctgatatagtatacatttcaaccatgtagaatcactttaaaaagttattaaataatcttgggttaaaatgggatattttcttgttgaaccttgagaaaccaagagacaggtttggagattggggctagaagggactcccagtgctgatcatgaatgaaatacattcaaattatgtaagttcccttgacctgggagaacatagcttctttgaaatgacttttttttttttttttttttttttttttacatattaagactcaaaagaagagtggtaacattctgctaattcttacaaattattttaagcccatgaaacttaatcagtggctatttaacttctagctgattagatgagaactgatgccacttggttctcagctaaagttttgtgaagggaagaagtctgtttcacagacattactactcaagtattgactgactcaaagtgatggaactgatttcaaggagagctgtatgaatgtgactgactcggtggtaccaatccaatcctagaaaaactagacttttgagatgagtcaagagaaacatctttgtttaggaaagatggtataggtttggtttttttttttttcactttagttgataaaagtaagaggtgaatccatcattaggcaaatagaaaatggtctggagttgtatttatgtatctgaaaggacaacatgctcattaaaagaagggaagacggtggtagaagataagctaagttaaggtagcaatgagagagaaaatagaaaaaacagtaagagaacttgggatagtgagtagatctgaagtttcttgataaacttcaaactctgaaacctggtgatctgaaagtagatgaaaattctgccatatttagaaaaccctcaaaccagtgcttatggaacgagtaaactcagattatcattcttacaattctgcaaaaataaaatggcattgctgtctgctttttcttgggcaccttattttaatcatttttgcattgccccgtgtgcctagcactcaattacctgttgaatagttgtatgaattaatgttgaatgtcagcttcccattagaatataggctccctgagggcaaaaatttttgttttgctcacgcattatctccagcatccagaacagttcctagtaaatatcaattgagtaaatgactgagtgaataaatagttaagccatgactcaagattactgttttcacagcaactttattgacagtaaaaatgtaaattaacactacaatttattagatattttatttttctattcactcagtattgcatttaaaactcttcaaaattatgtagtctctaataggtagtaaattggattctgacctgggaattaggagttatttaataatgtaatgattggcaagtagattggacaatgagatataccctttctaagctaattcatccactactgttttcattaaattacgaacataattttatgccaataatattgatattttagtgatattttaaatcatcatatcagtttttgcagattgaatttacatgttttgatggaagtttgtgaacatggtttaagattctctgggctgtgactgctcatttttgttttactgtaaaattagttatattaaaatatgacttctaaagagtcatattttatatttccctaaagagccttatattaatggccatagctgtccttacaagtagggatgtccatgtaatatgtatgtcatattaaaatattgacatgcattcccctaaagagccttgtataaatggctatcactgcctttataagcagtgaagcccaagtggccagtcccattatgaaccttgtcccattacttctgtttggggctaccattccaagcaccttcctcctctgcttagaacagctgattgtgatcacgtaatgggttgtgacatcactgataatactaatatattattacatagcaataaactaattatatatataacataatttatacaatatatatagtaatgaaagaattaaggaaaagaaagggaaagaaggaatgaagagagggagtgagtaatagaatagaaaagaaaaaaaattgtggtgttcccagtcagttgtcagatatgtttcaaggaagttgttaataaagtagagtaccaaagtttgcaggtgaggagagttatttgcagttttttgtttaaaataattacatttttctattaaagcaatttttctggttaatattgcttgtagtaaattactccaacatgtaggggcttaaaacaaccattatcttatattcatgaatttagcaggtggggaattcagacagagcacagtgagaatggcatatctctgttccaagatgtctgggacattagctggaaattactcaaaaactggtagtttgattattctaggcgtcttcactttcaagcctggtggttcatgcaagttggttggcgaaggctgggatctgaactcaggtttttgagcagagcacctacactgacctacaccaggtggcctgggcttccctttcagcatcaaagcttcagaatagttgaatgtacatgttggctcatggctttaaaagttggtgtccctgagaacaagcagtgttaattatgccacgttttgttgtttatatttgagttcaaagccccagagattcaagaggtagagacatacaccacctcttaatggaaggaatgttaaagaatttccacccccccacccccagcttttttgtaatcatgacattaatactaatactaaatagtatgaaagggcttatgataaaaaggcaaagctcctgccccagttctcagatacagctattcctattcccagtactcagatacagcttcttttcactgtctgtttttggtgcttctgtttatggtctccataaatttagataatatgctgttgctctagttcttgatatttaaacttcagtaatatctattgactttctactctgaaaaatgaggacttaccttgttaatattactgtgtatttccttcgctttctgtgagatagggatatttttatttcatataataattttaaataatatccctaaacttcaatttttcatactttcactttgggcagtatctcttgattctccatttagtaagaggagaatattttatccccgtaacctttcttccacttatgttctccctttaacatcacaatttctatcagctactttgctaaaattgtttatttgcattctgttccgtactgcaacagaggcttccctgcttttctaaaggttgacccttgcaagttgaacactggtaaacagtgcttacattcttctgactatatagagagagttcagtgctaggccaaatattcagcccttatgtttccttctctccaggttcaacattataaccctatgaagctgatggagtccttcttttgtaaaaacagacatctggattctctttccttattctgcatcacttgtttaaaatatgccctattttcgtgtactttttattcaggccatgactttcttgtatcattttgtttttcctggagtttctaattgcctttttattttttcttgccatgtttgcctttatcacaatctgtgttctccagaaatactatgtgtctacatatggtgggtttcccgccaccatttaatttgctgggcattctgtggaatctttctaagtgcagatttgcttcgttttattttttttaatggctgcttcttcatcatttgttctattctctttacaaggttcttctgttagtcagatatttgatcttgcagttgggatctctgtgtctcttcttttaatcttttttctaattcatctcttttctctggtttttgctttgtattctaaagaaacttctatattattttccaaatgtctactgaatttactctcagtaattaatatttttaacttcaaaacatcattttttgttctccacttgttggtttttaaagcatcctcctctggttttctgtaatatttctttgaattactgtgaatttttttaaagtcctccacattatctctgtttctgtcagtgtttagtttttttggttaacttttttgtttttcctgtggctgaattttttaaatgcctggtgatctttgaatatcctttggcttttttaaagtcaaaacgagctaaaggtataatttttatacagtaaaatacacccattttaagtgtgtgctttttatgagtttcgacaaatttattcacctactaaccaccaccacaatcaatatctaaaatactcgcattatcccacagggccctttgcagtgaatctcctccctctaccaggacccctgccaacctaatcttctttctgtcattatagatttgtcctttctagagtttcatatacacagtatcaaagagtattatgttctattatatctggctttcattgatagtgtttttgagattcatttatgttgttgactgtttgagtagttcattttccattatatggatttaccacaatttgtttattcattcacctgctgatgatcatttctgttgtttccagtttagggctgttataaataaggctgttgtgaatatttgtgtacaggtctttgtattgatatgacatatgcttcatttgtatggtaaatacctacaggtagattgctgactggtatggcaattgtgtatttaatttttaagaaattgtcaaacttctccaaactggttgttccatttccagtgctagtgtataaaggttccatttgatttgcaccctcctgaacacttgggactgtcaatctttttatttttagtcattctatagtgagtgtgaactaataacacattgtgattttaatttgcatttacttgatgactaatgttgttgaatatcttttcatttggctattgaccattctgataccttctgttgggaagtttctgttcaaattgaccgttttttaaaattgagttatcttattgtattgtaagagttcttgagcagtcttttgtcagctacatggattacaaatattttcttcaggtctttggcttaccttttcatttccttaatgctttatgtcaaacagaatattttaatttaacctaagtccaattcatctttttttttctttgatagcttatgcttttttgtatcctatctaataaatatttgtttacctccagggcatataggatttttcctatgttttcttctagaattttatagtttttgcttttattttagatttgtgatgcattcaagtcaagtctttgtgtttggcttgagctaagagttcaggttcatttttcctgtatggatatccagctatttccgcaccatttattgaaaatactttgctttcttcattttgaattaccttggcagctttgctaaacattagttgagcatatacatttgggcctgtttttagactctttgttcttttgcattgatctatatatctatccttttgccaatgtcatactttgattactataatgtataggtcttaatcaggtagtatacattttccagctttgttcttgtttttcaaaattgttgttgctcttcttttgtattttcatataaattttagagtcagcttgttagttaacacaaaaattctcctattgggatagcatttaatctctattaattagggcgaaggcatagatattgacactgacttctgatcacgaacatggtgtatctcttcatttatttaggtctttaatttctctcatcagagttttgtagcttttagtgtaatgcccttgcttgcattttattaaatttatctctttgcatttaatgtttttggatgttattgtaaaaggcattgttttttctttttaagtgtttgtcattgagagctatagtcttttttgtatagtgaccttgtgtcttgtgatctgaaaaactcccttattagtctggtagcttctttgtaaattttagtttttttacatacacagacacatcatctgagaatagacagttgtactttcccccctatatatatatatgtcttttatttcttttcctttctttttttgccctggctagaacctctagaaaaatgtcaaataaaagtggtgagagcagatgtttttggcttgttcccaataataaggagaaaactattcagacttttgccctaaagtatgatgttagctgtaagttttcctaggtgtcctttatcagattgatgaagttcccttatattcctagtttgcttagagagtttttcatgattgggtactgaattttgtcagtgttttttctgaagaattgaattgattatttttttaaaaactctgttattgtgctgtgaattatactgattgaattttgaaagttaaaccaagctcacattcctgggataaaccctacttggtcatgatgtagcctttttatatattgctaaaattttgttaagaatattcatgaatgatattggcctataattttttttataataactctgatttttgttctgaggtaatgctggcttcataaaacgagttgagaagtgtttcttcctcttctattttctgaaagattttgtgtaggattggcattctttctttcttaaacatttaacagaatttactaatgaagtcatctgggcctagcatttatttttgagtaggttattaactacaaattatattttcttaatagatatgagaccttataggttagatcaccttttataattttgtatttttcaagggatttgtctatcctagggtttttttgggggggtggtagtttattggtatagattctttaactccttatcttttttaatgtctgtagaatatgtagtgatgtccactcttttattcctgatattggtaatttgcattttcctctttttatcttgacatacagatagagttttgtcagttttattgatgataatccagttttttgtttcattaattttcacttctgtttgtctgtggtctcttgatacttattttgtttttatcttcttttcctacttacattgggtttaatttgttcttagttttagcttcttaaaatagaagcttggatcttcaaatatatgcatcttcccacaaatttgaatatgttgtggcttaattttcattcaatttgggttattttaagccatttttagttatatattctttaatccatggattcttaaatttccaaacatgtaagggatttttctaatttctttctgtctaattctgttgtgatcagagaacaattctgtatgattctaatactttttaaagatagtaacacttgctttggtccaacatatagcttatcttggtacttgttccatttgattttttatttatatatttccaattttctcctcactgtgtccatgttttcctttaaggccttgggcatttttgtagtgtttataatagtttatttaatttctttgtctgctattccataagttctgtcatttctgagtctatttctattgactgatttttctcctgcttatgggtcatgttctgtatggctgcatgtctaataatgtgttattggatgccaaacattgtgactatgacattgtcaactgctggattttgttctactcctttaaagagaattggattttgttctggcaggcagtaaagttatgtgtggttcagttttatacttccaaggcttatttttagtttgtctcttttgttgttggggagaggatctagtgtatgtaggctttgcttccaggctagtttagccctactaagacattactcttttgtagtctctcttctttggctggtaaggagtttgaaacattttctgccctctgtgagctctggaatcattcatcttacaactccttggtgatcttttctcagaagctgacctttcttgacttcatgcagttccacatgtgtagcttaatattcagccagggactcaatagaccccatgtagatttctggagctcttcttcagtattgtgtcttccaaattttagccactttggcctccttgtcttctcaactctgatctctgcctacccagctgggcaagactacagaatttacagaactctgaggttcctccttcctgtacctgtggtctggaaattgcctccaaacagaaagctagggcaatctagggctcacctcatttgcttcccctctctcagggatcacagtcctctactacctatagtccaatatctgaaagcagttgtttcatatgtttatctagtttctagttgtttctggcaggtaagaagtctggaccttcttgctcccttactgccttgtatgtccattagtttttataaagactggttagctagtaagactattaaataggatcttttcctccctgctggctctcatttctgagtaaaatttttgggagacttgtttggcataggaatcttgggatgggagtatgcttcacaggctttacttttgggtggctggaaaaatggctgtcaggatgtggaaaaactctcaaatgtcacaataagaaatggtttactccaagatcttaggtacagggatggcaataggaatgctaactggtgcagttaccctatatacagacatttagttgactcccctgaatgtgggaagaaaatggctgcccttcttcctccctttttccattgcacctgttgactcgtagtccagcttctgcttcctccacggtgccctcatggcttgttctagggcagtggcctcccttctagtaaaaatatttgagcatgtcactgatattcactgaattataaaaattatgtacatatacagatatattattatatatttaataaaaataatgattttgaaatgaaggggtacaaaatacctaaaaatagaagatattttcttaatacatctcctgattatatgttcttcactttggagactactatctctttggtgacttcttccatcaccttatttctgtttattttcagtcacccagcaaatttactaaattctctcctttttgtgtatgtgggacgcccttttgtaattatgggtttatttcttttactgagaaagaatggaggcaaatatttgtgataggtccaccattttgaactggaagtctgattacacttcttaaaataaatttttgaataatcaaaatgtcttttttttttttttttttttgcaattcagtttgctttcctggttgggagcagaagggctgcagcccaagaattgcttattacctgcgggaagtttttgttatgcagcagttcttaaatttgggtaatgtcaaagggcatgtgaaccaaggaagttgtctgctaatttcaccagaagcaaaaaagtttaagaacagctgctctggagaaatattgggatcacatgagatatacttttcccctatttattccacattccttaatttagaggacagtataaccatctggagaggatccataattgaagaaagaacattgtttcattcttctgttgctgattgcacctggctatataaattcattgtcatcttctaggttttcatactgttgatataccatccctgaaaccaacagctgatataaattgtaacatagaaaagctaatttgacatcatattgggaatgttagccaattgatttttcttaagggaaacaaactgaaaaaataagcccactatgaattaattctttgcaggaaattcccatgtctgattatttaaaagaataaattctgcatgcaaatgaatcattacaagcttaattgaagcttgcgggatactcaagtttactcactgtggtgtgtttttgatggagacaggaagtgaaaaagcaaggtctatgagacttttttttcctatgaagtctcagccagtcttttaatgtttctcattgagaaactttggttgggagggtaaatgactcaaggtatctattgctgcttagccgtttttaagggggcatttccccccatgttcctcccctccccaaaatagctaattatgtactggaagtttcaatacattgttcacagtttgtgaagtcagcatatttctggaagctcactgtgaatgtaattcttaactgtacaaatgcttttgtttctccatctctgcagctagctctgtactgtaaggacacaattctatcgctattttttccctcacatttgatgtggtagtttgcatacagctgcagagtagacagttacctttgaaaggaacatttggctgctctaatttgattaaagaaaaccacctcaatcatttctagactgagaacgttttcattttaacttggcagtaggagttgggaatgtactcattgcacttagatatgtgggggaccagttagggaacaaaaccaactgcttgaatgaagaaagctttggtgcattttttttttaaaagcaagcagtatgattccctttctgtttccctctcaaattctctacaaccttgattttcacctccatcttcttttcacggttatttactttgtaattccagtaaacgaattctggcaggaatagactgctaccctaaagtgatttgtgatttaaaggacttcagggtccttaaaaattatcccattttacatagaaataaaatcccaaatcatgaattactatgaattgcatatattttcttggccactgttgagaaaggcaaaaaaagttgttagatcatgggtgtacagaccaaggctgggaatttagttgtaacttacttagaagaaaattgctccttgtcagaaggctgcagtcaactcacatatatgccctttgtttctgacatagaagagggtctgatcaccaaattagtatgacaattaaaaataaattctggtgattgtgaattggcatcaactttatatatgtttttagaaatgattgagcagtggttaatgtctgtacggtaaaccatgaacaaacttttgaaccacagctcagtaattcaatatatgatatccttgtgaaaggtactgtgctgtcatcttaaaaagtttgagtgtgggccaggcacagtggctcatgtgtgtaatcccagcaccttgggaggctgaggtgggaggattgcttgaggccaggaatttgagaccagcctgggcaacgtagtgagacctcatttctacaaaaaatatttcctaaaatttagccaggtatagtggcactcacctctggtcccggctactctggaggctgaggtgggaagatcaaggcttgagcctaggagtttgaggctgcagtgagccatgatcacaccacttgaccccaacctgggagacagagcaagaccctgtctcaaaaaaaaaaaaaattgaatgagaaaatttaaattaaaagtctgaagctacacatgggcctcagaaataacaaacactattacttattgattattggatattattgattacctaagagaggaggtcaaatgtgggttcacattccagttctgccacatgactatgtgtcttaaccccattatgcttcctacctctaagcttcaatgtcttcatttgtaaaattaggacacatattaagtgatgtctctgaagttaggtaccttttaagtgttttgttttgttttgttttgtttttttgagttggagtctcactctgttgctcaggccagagtgcaatggcaccatcttggctgattgcaatctccacctcccaagttcaagcgattctcctgcctcagcctcctgagtagctgggattacaggcacatagctaatttttgtatttttagtagagacagggtttcacagtgttggtcaggctgatctcgaactcctgacctcatgatcctccagccttagcctcccaaagtgctgggattacagacatgagctgctgcgcctcgcccttttaagtgtttgatacttgtcaagtacttagttgccttacttattcctctccttcagaatattttgtaggggggtggttttgttaataggattggtggcagaacttgacaaaatcttcaaattctaatattatgtgcatctctcattctcttggacaaaatgattaagtccattaggaatctctcaagtctgcctactttttctctggttaagtgtgacattatatcaggtagtagttgcaagggcaaggcataggtactacggacataggagctgttcaacaaatggttgctattagatggagttacactgtcatcttgaatgccaccttctgccatcttcaagtgctataattatttccacatttaatctcaagactgttcactcgaagccaccccagtttgttcttccttctgagagtcaaaggccaagaaagaatcttttcattttgtttttacacacggtaaggagggcgtaaatattttcagccacgtgtctcagtgtacaaggatggtgaagggactaaaacgatgtttgcctaaagtaccctgctacattggggtttgagcactcaggatttctagtagatacaacattataactgtagttgaatcccaggctcgttcacaatgcttatttatatagctgaagaatgtccaatgagtaaaatactgcagaaagcaatgctggagacctgtggaaattctatgagaaaatgctgggtactgattatttatgttacttcaaattttctttctctcaataaagtattattttgatatttctcctatataattgcctttttttttctttggcgctgggggggttctcattctgtcaccgggcgcgatctcggctcactgcaacctccgcctcctgggttcaagcaattctcctgcctcaccctcctgagtagctgggactacaggcacgcaccaccatgcccagctaattgttgtatttttagatggggtttcgccatgttggctaggatggtctcaatctcttgacctcgtgatccgcccacctcagcctcccaaagtgctgggattacaggcgtgagccactgcacccggcctataattgctttttttgaagtatatttatatagccctttactattgaattctgcccatctacttactattactgtttatcttcttatgtcacttccaacctgggtgacaacttaaacattcaaatccagtaaaattattgtatgtttctaataaaatgcatagaagctagcctgagactgaagttttgttttttaaaaaatatgtaatgaattcatcacttcttttcgtcatgacagttgtctacttcttaagtgctgttaatataattacgttcacagcagcagtgagggagactgggggaggattgttattcccgtcttgcagataaagaaacagacaacgtaaatgacttgctcaaggtcaactgtctgctggcagagtcaggactagaccacaagccttttgactccagggtgttatttcccctattatatagtttttctacctaatactacaagtgtttcagtcatgcaaaggtcatttggatttgactgttttagtaagacctgcttggcaaattaaatgcacataaactgcatgctgacaaaggcatgctgtttatttgaagaggaagctatcttgacttactggaaactagaggtataatggcttaattctgacagatagtaaatgatatacatatacacacacatacacacgcatatatattttcaaacaatctattttcatagccatatctagagaccagcatatagaattgacagtgttaagtagtgttatttgttagggttcatgctgcttctcaacttggtggcagttagctttccatgacctaccctgcgttactgagaaaaggatggaagagtagcaggtcaaaggaagtacgcatacctttgaatctggcaccagaagtgctgacgaggatgttgcatatgctcacgatgactcagcacttcctggtttctcttttcagccacactctggctaatgatatcgaatgaccttggttcaaactgagagtttcagggaacctttggtttcttcatcatcaaaaatttgcagtctttcctttctgtttttaattagttaatggtactaggtatgaaccattatatttcacactggattagatactttttgttcttaagatggtcacaatctaaggaagtagctttgaccctggactataaataaatatacccttacctctcaagtaagagcagtcctgctataactcatttggtcttttattgtttctgtgcaacctaataagtagggcaggagtggaaggaaatggagttcaaacttcagttgcactgtttgcagctttggttttaggaaaggcttagtgaccagtaaggccaagtaagggaaggtaattgtggatctgccccttgggtccctcatcactttctgaatggtccagaataggtctaccatgagtgaaaccagattgtcgttgtcaattagttttatatttaggatcagccacaatttttagactctaaaattattaacattgagcacatttggagatgaaaattttcagaaaacattgaaagttccaggaaaccttgaaactttttaagcctgagttttcctgggctattgagagtttctccatgttgacagccaatttgttttacaatttatgaaacaatttaaaaaccattttatagattatctagatatatttctttagaaatatatcttcattattaaaggaaatcttaaaccagtggtttgcagtgaaggaaatagctatagtatagcaaaaatatgcctatatttaaaatacaaatatttattgttaaatgtgtttatgtgttttcatctttacagaggcctctaaatagccaggatttctggccctttaactgcttccaaataagcaaaagtaaaaattcctacagaaaacatagccctgacctttttgcacatgtaatccaaacaaaaagttagctttgaaatggagtcttgttacataatcatactgaaaatatgcagtaatatgtattcctttgaatatctttcattcagaaacatatttttgtttatttgactatcctcccagctgaaaatgggttatgttctggttgttcatctaaccaccctacctcaaaatacttgagaaatcacatgaagaatttcattccaaagcatacaattttcagaagggctcaggacattggaaaattgcacattggatttaactccattgatgatttaaataaatagcaaataatgcaagaagatagataaacagaatatacaaacacagtttttactaggcagaatacctgtccaattaatagtgaattatttaagcagcatttactttatagaaggcactttaagtgaatcatttgtttcagatctgtctgtaacatttctaccaaactatttggccgactataccttatggtatcaagcattctaaatgtgagaatactggccaatataggcaaaagcaaagaaacctccctcttttcttgtgtgttctctcagatgctgctatagaaatctgagaattgggagcatatgcttcagactgcaggcttctgatgctgccccgcagcaacacagtaactggcattttggttcactttgcattttactcatctgctgatttaatgagtgttctgtgtattgagcaatagcaggagttctacttaactatcactaaacataaagaagaaaaataccatatgaggtgtctagttttttttattttctttttaatttacaggggagtcatctgttaacttgcgtaattgaggaatagagcagtccagttaataagaaagcttagttattagaaagttgccatctcttctgagtccccttttcaaaggattagaatgtgataaaatacacttaacactaaaactcataatttaatctttgttgagcattgagaagatacttcaagatatatcctttattgtaccctaataaaatggtagttatgatgaatgatgcctatgcttgctactagagaattatagttaataaaattttcgcttggttataccgtttgactgttcatcatgatagataagagaaggccttgtgtcatgtccaatggaaacacgaagtcaattgctgaattatgcttggttaggtataaaatttcactttttaaatttatttatggagggaaaggttgagatagtactagtgaagggcaagcaggaagtttaggtggagaataaaataatgagaaaccagaagaaaaataatatgtatttatatctatacctattatatatattgatatatatctatatagagagatgcagagttaaatacattttatttttagatagatataaacttacatataattatgtagatatatttataaggagatgtgtatctatgtctagataaagagatgtatatctatctatatctagatagatatctctagatacagatatataatctagatatctagatatagatacagaaatctggagatatatacatctctctatctagatatagatatctctagatatagatatacatgtctccatatagatatagatctactttcagaaagtagatagagtaaaagatgaccaaattagaagagatcaaattaagaaaacaaatgatttcttaaagttttaaaaatatcatggaagggtaaaaattcatatggcaaaaacttctggatctagaggctctcaagattaggtagaaagaataaatgaggttaaggggaacagaggacaggtggtgaacaaaccaaaaagttcaagggagtgatacagaattaaaactagttcagctccaaaattggtataagctacaacttcagtatggcttatcttaaattgttgacctcttgcccaaaacctaaataaatgtgtatttgtttgtcctcttcgtattatgtctcttgtgggaaacacaaagtaaatttttcttgcattcatctagcttatggtcttacggtagaaaaatatggataaaacagttgttatcaaaatgaagaaatgcagtgaagcgcaggtaaaggctcacagcctttctgtctagtgctctgaatgtcagagtgaacaaaggagttgttatacttggcatgctaacaagagaagtcggtctgttccgcatgttgcaaaatttctattggtttttattgttggcattaatatacacgatatcctgtgcccgtcatctggttacacagacatttttgtcatgttataacatgaactgactgctttaaatgtataggtaagtggtaatcaatttacaaaattaggttcttcattcctccctgacatcctccactccttcccaccagggtctgcctctttgcatgtggacacgtgcatatccattttgcactttattacatcgttttataaagatgctaataaagtgataagtagtgataaaagtaaagggatggtggggggaatcactgacaaaacaaaagatcacttcagaatctacaattgtacatgttttaacgggcgtctttgatagtcctggatacaggctcagaacactttactgaattttgggagagttgggaacatacttctatttatattcataagtataggaagaaaagccccaactatctaggtttatctcacgttgaggattagaagcttctgtagacagtgtatttcaatcatgcttttttcaagaagatagattttttaaaaacttattttattgtggtaaataaaggtaatatacataacatatgtggtcaataaacataacatacaatttacagttttaatcatttttaaatgtataatgcggtgacattaagtacattcacattgttgtgcaaccatcactgctatctccagaactttttcatcatcccaaactgaaattttgtactcactaaacaatgactcttcactccccttcccctacaagaagatacatttttaaataacattttaaaatcagaagagaaccggtaggtagtttatgccatagccagtaaccttagggttcagattggaaataatagagacccactgaaactagctcaagaaagagggattttattgtacggggggaacaaggttcatgagaatcattacacttctggtctcctggaacaggggttctggataccaggagcctctgtggagtgctttaggatagttcttaaatcgtttcgaagttttactaagccttttgaagccatgtaggtgttactagaccggtataaaactgcatgccaagacttcatggtagtttttttttggtcataacatcctttccaatttcaactatagcacatcatgattacactgagggagtttatgaagagtaggtttcatggatgaacattatcagtcttgaccatagtgacatcttgagctcactcattttggtgggaaaatcatgctttcagagtgaaaagttggaacagcatgacggaaaatggatttttattttaaaccattgagaagaaatgctgtatgactttatgatggctaggagataccttacatataattacctcacaagctgatgcttttaccaactaacccccaaagcagcatctctttgatcctgagtgacttgagccaagggaagtggcaacgtgatggtggtgaagggtgtggagtgggcagattacatgattcagtctccaactcatcccaagtctagccatgcccctcttagtatgcctactttaagggcataggctatgtggccaattttccttcatcgagatttcaagctctttgaatcaagagagaaggcaatatgtttatttagaggttaagaaattataggctttcagagttaataggttatctaatttttctactcattcgttcagtctttgaacctagaattatacaaacagtacatgaccagtatttgtcccccaagatcacattacagcagtggtcttgaaccaggggtgaatttgttccccaggggatttgacagtctttgaacacattttgtttatcacaactggggcggtagagtttatagatgttactagtgctgcgactactgccactaacatctaataggtagaggttattgatgttaagtatcctgcaatgcacaggatggctccccacaacaaacaaatttcaaaatgctgatagtcctgagattcagagctctgcatttcaaaaagacactagttaacaacaatttgtagaaggcaaaaaattataaaggtctgcagcataaattggaaaaaacacataagtccaaccatctagcattaacaagctcacattcatataattagcactcctaatattagtatttttcattaccatcaataggcaagaagaggaaaaccaagagtaaggatagtcttttcccacaattgtttgattgggagcgaggtgagatggctgaaatggacggagttaaagacaactggaaaatgtgagatttccttaagagtgtggctcagaactagaatccacggtgaaggttgttgaaattgttgttgatttgttttggttggctaaatttgtgaattagttgtatttggaccctgctagggaatcaggggtttaaaaaaggaagctaactagaatgaggcctaaggaatgggttagctcagtgactggttcttataagaggggatgcataccctcaagtgaaagggtctaggtaattccaggcaaccaagacctcaaatcagagctccctctaaattatgaatgcattgcctcatctctgttctcaattgtcctaatgtatatggttggtatattatgttttatatttttcttttcatgcctccatttataaaatgtcactaatctatatgaggtgatcaaatgaaacaaaccagtggagaagtgactcttaagattaattaaggtaggtaatattgagatctatgaatacggtagatggcttatataggttgaggctttacttctttttctactcatccagacttgaaccttgaagattaatttatcctacttgtcatagtttgatattaaccaagtctaatagattttccctttaaaacatttcctggtgcccattttttcccccttttcatactgtcccgggagtcaatcaatataaacctgtatgagtaacttttttctctctctcgtttgggttatgttccagttcatatgatgccttcttcccacatcacacatgtgccccaaaatggtcttgaatgtctaccatctcaaacccagactttttgatttgtggtccaaagctcttcgtgatctgtatccgtcttacatgttcatgtcccacactgtcctctaaatggggactctgccctcatggctctcaaacggagcctgcttgctctctccaaccagcctggttcatgtggctgccctccatggcttacttgctcttctccttgttacctatgtgatattcactcatcttcaaaggttgcacctggctgtcatcagctccatgggagcatttctgaaaactttagtactaacgttcactcctcccttgtgaagtttatatcacctggtttagtgttgtgttatatcttgtcctacagtgtccttagttattcacatgtgcatgtcttctttcctcatctatagggaaagctccttgtaagcaaaacctgtgacttattgaaggttcacatactgctaaccatattgcaagtacttaataagtgcttattatgtggttgattgtgcaagatagcctatttctttaaaaatgtcattgaaatgatatgtacaaatacagtataatattagttattatacaagaagtacttgaaaagattaattactgccagtcatcttaatattgggtgtacatgggaagggcatatttgaaaaactgtaagaacgcagaatgacgaattggccctctatagtagtagttctcaactgaaggcagttttgctcctaggggacatttggcaacatttccagatatttttggttgtcacaaatggagggatatgattagtatttagtgagtagaggtgagggaagctgctaaacattctacagtgcacaagacagtatccccataacagtgttatccagcctcagatatcaatagctccatggttgagaaaccctaatttacagcattgagtgggcaccatcattaacatactttaccacctaaaggaatgaaagcatgcaaaaagtagtgcatttttatatagaggaaatgatcatatattgtaaactcctaaacggtgggaactgcagctgtgtacataaagcagaacagtcggatagtttaaaagacatgtgatagctgcttgtaccgtaaacgagcactttatgtctttggcctggactttgagaggagagaatgattgttaagtagacagaattctcttaatactgaatgcacatagcccataattttagaaaattagaggcatttgctaacccagaaggatgtattggaatttcaggtcaaatttttaataaactggaattcctttgcaaggattgatagttatattagaatattgaatgaaatctacctccttccattttttcaaatattttagaagcttccttgaagaatacttgatagtttttaaggtgtaagaataatattatttccctaaataatgtgtacacatggaagcagagtgtagaatgttggacaatggagactcagaggtggagactggcagagttctggatggaggggtggatgatcagaggttgtttgatgggtgcaatgtaagttgcaccagtgatggatgcactgaagaccctgacttcaccacaatgcagtatatcagtgtagcaaaattgcgcttgttccccatgaatatatacaaataagaaagtgaggaaaggaaggagggaagggagggagggaggggaaggaaaggagaagggaaggggagagaacgggggggaggggaggagagaagaggagacgaaaagagaggcggggtggcgcagcagctcacacctgtaatctcagcacttttggaaagctaaggcgggtggatcacttgtggtcaggagcttgagaccagtctgggcaacatggcaaaaccccatctctaccaaatgtacaaaaattagccaggcatgatggcgcacgcctgtgggcccagctactcaggaggctgaggtgggaggattgtttgagcctgggaggtgggggtgacagtgaaccgatatcacaccactgcactccaaaagaaagaaagagagaaagagagaagggagggaagaaggaaggaaggagggaaagagaatattctttctctcttgaaattaattttgggaggtgcttatgtggccaagagtggtatggtggagggagcagttcagagagatcctgggcaggacaccttaaccattccctgcctgtttcctcattttcaaaaagaagggctaaggcttgatgacctctagctttaaaattctatgtccctgtaatttcagatagagagagagagagagcacgcatgtatgtacagttatttaagaaagaaactttgaaggcaatttttccagttcatttcttagaaatttcagaaatattccattctctaaaagcttaattccagtgtttaaagaaaggaattcctgttataaataaaagttgttctctgctcccaatcaaaataaaaagagtgaaataaaatttacaattgattcaaaagtgtcgttattagctaattttgaaatttttatctattttcttttgtttatatttaaatataaataaaatattttaataatactgacttttctcacacaattcatgttagaatttcttagatggttccacatctgagaagtttcttgcttgtaaaggtaaaacagatttggaagctttataatgatttttaatccatcatttcggaagttactggatattggacaaaatgataaagtgttattttctggatggaaaattaagtagagccttgatactcaccaggctgaggatacatcccaagaaatgaggcttgcttctatggtgtctctgttcttaggtttcctcagagtccattctagaacttggataatgagattgcctgaatcgaagatgtttttgggatgggcccagagatgcaaaggatatccagctacatattagatcttattcccagaattaatgttgctacagggaatagcagtacatggcatagaacatgttcataaatagtgccttagatgacttttggtttaacagaggttaattgagccccccctgaatgcaaggcacctactatagggactacacagtgggtcagattgtgtattccttaatctctgctttaagtgagtttataacctagtggggagagagaaagtgtgtgtgtacctgtgccaattactgtaatacaaagaataaagctatcgtgaccattcagagatacagacacaattctaggccagttcagaagacaaaattaagtttaatttgcaggagcaagaaaatgaggctccaaacaagagaagaacgatgtgaaaagaaacagacacatcgtatacatggagatgaatgacatcacgtatggcagacgaacctgaggtgctgagttaaccacagtgtgaggagaagaggaggaatggagataatgcccaatcgatagggtcagaatcatagcagagggtaaagcggcctgaaatggaatctagagacaggtgaactggttaggagattgaccattccctggagagagaaaaaataatggtggcctaaattagggtagtgcccttgaaatgagaggaaggtttgcatatgagagatagttaagtcctagaattggccaatgtgggtagctagttagatgtgtaggtgaacagagctgtagggtcaacaagatgaattatggttttatgcttgagtgagaggatagtgatggtgatgtcactgttagaaatagcattcacagcagaaggagcaggtttggagggacaatgatgaactcagttttgaacatgttgagttacatgtgttttcaggaaatagccaaggcagagttatagtcaaagttcaggaaattgagagctccatccagataggaatccggaaaacctgtggcattcttaaaggagatgtatagaaatcttttttgagccccacatttggaatatcacttttgcatataatttgtcccacaataaggagaaaatcacgaatgccccagtgtggttactgagcacatgactaggctgtcaccagctaagtgacttgttcacccatgccaaccttcacagcacaggcggttcaaaattgcctctgacacagttgctgtctgtagtagatcttcagggtcactggcaaataggaccctgtatattaaatagatgaatgagcaagaaatcctgtattttaagtgaaaaaaaaaaagactatggaaacttgagactctgcatttaggattgaaggagaaaaaagggggcagagagaaaagcagacacaagagaagtagagggagaagtaaaagaaaactctcagggaagccatgggaggggagagtttcggggaggagtaggcatctcattctggtatctgaggtgcgtccaagaggtggaagagcctaaagactgcatccagtagtggggaattactgctatccatttgagagacagatctcgctggaagagaaagaggggaaacctggtaatagataactaaggagtgagaaagtgtagcacaaagtgtagaaactgtagcacaaagtgtagactgtcattcagtaaattgggggacatggaatgtggctggcagaatgacaatctgatagagataggcacagttaaacatttttgttgttatgaggaaatagggaagtgtattagaaggagccaggaggggaacacttaaaggggaattgaatgaaagggaataaaagctgatgaattgcagatttagcatattgtggagaggcacagttcaggaggaatagggttcgtcttgaagaggaggacactttcctgtgaatcatgagggacagaagatccatatagaagaagacaatagctttgatcttctattacaagaaaaggacatttgtgtgaagcagggaggaattgggagccctaagtaaaggctgaggaagtgtctggagttaggaagagagggcaggagaaggaagagctagatgttgaagaggaggaagcagagggattggctgtcctaagagggacccaagcctgtggaagactttaaagtggtcagcacacttgggttcccttagcaacagagagactctccctcattcatcaataagagtggatttattcactgatatgtagacattaaaaaattgttagggtgacattttataaaaagtaagaactctcttatatagcagatctataaaaattagtgtgctaactgggcttagcaaaagttgggcaaatccttcctaaaacacagttaatatttgttgaattcctttttcatcaaaatgttaacttagagttgaaatgcaaaagaagagatttgataaagcattttgacatttggcattttaaagtaatttcattagatcatcaagctatgaattattaaacattattctactgtaaacagtttttttccattatctttctttgaattagaaacaagttgcatgccatttgcctagaagaagataaatgtattatgcactaaaatatacaaagattttggcactgttttttttctgctttttattcattaatgcctttgtttagtcttacatcagatgaattggacaaatttgggctttgtatggctaaagccaggaacaaaattctctaacagtgttgacaaaattcacttgaaaagtcaagtcatcattcaggacgagtcattttcaatttaatttccaccctagcacacttgagaaaagtagagtcatctgttatagtggctcccaggatagtgattccagtaacttccagaggggacagttttgctcactggagcacctccagtgttaacacatcgaaggtgtccaagatcccgttgttgtctggctgattttccgtggagagtgaggaggtgtttgacaaggccctgcaggggatttcccatcccatgaggcaattcataaccaaaacaattcagtataaaccaaactaacaattagccttttcaaaagtgctcatctgtgctgcccaaagagttgatttctttagaagttcttctaacaaaccagggtagtcctgatctttattcttataggttaaaagttgtaggagttaaagtcaaaatgcagaaacattatgctacagtgtgaagaaaaggtatgtctgagggccagggcctttttaagaggcagtcagaacaatggctggctgcccaaacatagggagccaattctgtgatgtggttgccatgttccagtatccacctggcactaaatgcctagaagcccaatttcattagtatatatagagggtttgggagtccaaggttgacagactcatcccgacctcacaagaaaactgaggtttgaacaaaaatgttaatgcattcttttccagtaaaaactgtacatgtcaagtatgcttgcatctgccagccaaatcattgtctcccttgcatgcttgtctgtgggaaagccaggttatagtaggatacttgcattgtggacatggaacctggagaggggagttagctgatgagattaatgtctgatagcctcaagctctggtgccagttgcatccattttggctgtaggagaggaagtttcattcacaaactctcacctatgacagggttgagccatgctgccagttgtgtctttccagagtttgcttttctatagataacatacatactttttgtaaaagtaccgtttagttgtcatcacagcctagtctgttcgatgtggggtggtcatagtctcttgggccttttctattggtagatcatcctcatccccacattttggttttccctatttccatcttagagtttgtccatcagttcagttcaggggataccatgttacctgtctcatgtcctgcttatggatacttttctgtctgttcattgatataacttctctgactaaaagctaacctcctggagataaatttttggcacatgacttgatagtggtatttaaaaaaaagtttaactggtataagtggaatattttaaagtgccctgtttatttacctctatgattaaacagttactaaaatataaattatagactttgagggttttttttgaattttgatacagagatcattttcttttgaataaaaaataatgtgtttacagttaaggggaaaatatcctactcttaccaactcagttttccctttcaattgtaaaagggaaatagactgtatatctttacaatgtagaaaagagatgtggaatatccaagactgaagaaacaatgtttaggataaataaacaatatttatgcacgtagcaacttataaaatattattttctctcaaattattctatgagaatgatttaaaagactaagagtctgtctaaactatctggtttgttatcatttttgtatcttgaaacaagtcagtaaaaactatgatctcatagagctacttgttatctgctaatttgtcaattttgctttttcttttacttgaaacaaagaaatgcaaaccaagaaggtagtgattaaatatccatatgtctataacttttaaaaaattgtataaatatatatttattcctagggttatatttttcaaaaaatctgttgctcattacagaaaaaaaaactgatacatgcatgctaagtgaaattttttttttggatgagtttttttttttttttctccaagttaatttcagctgctggtggtgttacctttgtcctccatttaggtagcattgctctgtgtttacaactttccatcttagtttcagtggatattcttcagagagtgaccttatgctcaaataacacttaaatgtaggacaagaaggtggctttaagtagaatgacctcctagtaacagctaagaaacactagtaaatgacattaacagagatgtacttaataggctaatgcttagatcaaacctttgtataaactaattcaaaatgcataatgtaaaaatctataaaattctgacacaagaaaaactggttaaattaaactatctggatattaaaatctttgaaggacatttaaacacagataggcttattgatttagacttggaagatttagacttggaagaaatagcacgactgaatgtgtgctgtggcacagttagttctcttctattgttttaatgatgcccttaatccatactgggacagggcttatctaggatgtgatttaaggtatgaagttacttctttcaggaagttttcttttttgtgattccttggaaatttctcaaaatgttggaagagtgaaacacattgtcattgtaacacattttgtgacctagttttggtctgagtatacttttttactagcaagatacccagaggatttagactttactctgacagctaaatgaactcaaatgtatactgaatgtaaattgctttgaaggctgtggatcacaagttaatagattctggaccttgttttccctttcatgagccaaacattccttggatttaagggtaggtttaaattaaagtgtagcaaattgcttccctctttggaaataagcaaaatcacccttctgataataaaatatttcttgaacatgtcaagacagttactgaggaaagaaagcatgaggggaaaaacgacaataacttttcagagacttgctctttaggaaatggaatatgtttagtaaaaggataattgccttatcccatgtgacttgaaaataatgagacaaagagaaaatgaaaacactccatacaagaacttatatgaccaaataaatctggtcccatgggaagcagtccagtttttctagccctactttaattgagcaaaacattttcagactcttttggaattatcttcagaatcgttttatgggccaaagaatcaacatctttactttattatcacacctctttttggacccaaaagaatattactcagcctgatcccccacttaatttatcagacttggttcaggcttcttccaaaaatacagtacactctcttataggacaactgaatatttttcttaattcatattatatatccattcagcaatcatggctgagcacccccaatgagtcaggtatgttgtggtagcacagaggagtcctggctgtgggagagggagggtggaaggggagacagtaaggatatggagaatgtgtgagcataatctttgaagatcagtagggacgtcaccagatggacagagaaaaagagagctttctaggcagcagtaacagctggtgttgaggcacagcacaaaaatcacgcacattctagcaactgtaagtatttttaggatccaataaaagatgaggatggagtggcgagtggggcaagatcacgagtgacctaataagccatgggatggggtatgcagtgtttaagagtgagggttctcttgcttggttttctgagtacaaatcctggctctctcatttacagtctttaggatgctgggcaatttactaaacttctataccttaattcttctcatctgtgaaagagatgatggtacctgtattatagggtaaagagatttaaatacataaaacaaaattattagcattgtgtctgacacacagtaagcactcaataagtgttagctatttcttctgctactttgtccagtggataaaagacaatagaaggattttaaagagcagaacacacttctttatcttatatacaccattgaccacttctttcttcttgaaactgactcttgccttgatttttttaaacagctctattgagacatacttgacatgcaaagcaattcacccatttaaagcgcttgattcagtgtttttactatatttacagggttgtgcaaccattgttaaacagtctgattttagaaccttttcattctccctcaaagaaaccccatacccattagcagccattccccacttttccccaacccccacacccctggccttaggcagccactaatctactttctgtttctgtagatttgcctactctggccatttcttacaaatgaatgaacatttttaattttgatgaatctgtagtgatctgttctttctaatattgcttatgtttttggtgttataattaagatattgcctaacccagggtcacaaagatttactgctatgtttttttctaagagttttatagttttagctcttacatttaggtttgtgatccattttaagttaatttctgtgtatattgtgaggttaggatccaatttcattcttttgcatgtaggtatccagttatcccagcatcatttgttgaaaagattattctttcctgagtgaatggtcttggcacatttgttgaaaattcatttagcataaacatgaaagttaatttctgcactctaaattatatttcattgatctgtttgtttatctttatgccagtaccatactgtcttaggtactacagctcatggtaagttttgaaattgagaagtgcgagtcttcgaacattgtttttctttttcaagattgttttttgctattctgggttccttgcattatcatatgaagtctaggatcagcttgtcaatttttactaaaaagccagctgggattttgatgtggattgcattgaagctctagatcaatttggggagtattgcctcttaacaatatcaagtcttcctgatccatgaatacggatgtccttccatttatttagctcttttatttcttgcaatattgttttgtagttttcactgtacagagaactcttgttaaatttatacgtattttgttgcttttgatgatgccatacattgaattttttttaattcccttgatgttttatgatatcattttcttcatctattttcttgctcacctctctgattcatctagggatgctattctgcttgttttatgttttgcctccaagattccgtctcatctggaggctgataacttcccaaactattgcttgacttgtgtctggagctctgagaagtatatgtttacagttgtttattggactttaccacctgaatgtcacagacatctcaaattaatcttttccagactgagctcattaattacttcactcatcttattttcatctcttcttatggcctttggaaatagtactatcatctaccttgtctaaaccaaaacgtgaaactcatttcaaacttctctttcaacttgtacattctggtaggttaccagatcttctggattccacctcctagatatcactatgggagtataaattggtacaatcttctgtcaggtggtttggatcaagaactttcaaaaaatatatatattttgattcagaaaaagtgtatatcattttatttttaaaatgccacttctaggaatttatcataagataataatgagccaatgttacaagaacagggaaatggtctaataaattacatatagaatataatttagtgcaacctaaaaatggagatagatttgtgaaagtggttggtacacttaaacttttttaattgcaaaacatgattcaactttgtttaacaacagtagaaaataagttctaagagagcagggatcttgcctgatgatcctgatagacagctgaagagtataatgtgctcagtcaatatttgttagttgtattggtctctctctgctgctactatttctgtaaccaatctgtctatattttttacctgggcttttgcagacacttcctacttgttttcctcacctccaattttattctcctataatccaacttccattctgcaaccagagtagtatttccaagtgacacatcctaccatagcattgttcattgtaaaagtcctttgcttttttcccagtgcccataagataatttccagacttcttagcctggattactaaactctcataatttcacttctgtgtacttttccagctcttctcttgccattttccaagataatcaccaaatcatgccagactatccgcaattccccaaatatgaatttttctgtgtacctacatacctttggacatgctgttccttctgccaggaccatgccaaacttcctttgtttatctggcaaattccagactgtcctatgagactcagctccccagccacttcccctcgaggtatgttgaatgcctcttcttcagggcctccaacaccatttgaacttttttacaattcttaatatatatacattcctctagggctggagagttagccagggcaagcctgtctattcctttgacttcaactcatcatcttactgctgcactgacttctcctatattctacctcagggctttgcagtgttggtctgaggcctggtaccaattttccatcatctgtgatgcaattagaaaaatagggccctgtggtaaatttttcagaaagctaaatctattcacatttgggatattaaaatatgctttatttatgaagtgatattgatagtagatagtagagtatattaatgtctttagttggcaatgttctgtcagagctgtaaagttgttggaaagtttccaggcctctgaaaaccaaagatctgggaacactgctgtatctcatgagggtggcaccaagtccccaaagtcaaaagcatgtgagtcatccttggcttctccttccccatccctccacccccgccacatttagacacttagcaagtcctgccaactcaacctcctaaatatttctggaatctgtactctcctctccatccttgctgccaattccttagaacaggccttctttactttccctgtactactgcagcaacagtctccttacaggtggtcttaccacacttccccttacccatgtcatcagattgggctctttgaaaaccataaaaaatagttgcccactttccagaggaacaaagttctttgtagcatacaaagtttctctccaatggggcttcttgcggtgctcctgctcacactttctttggtttcaagtgccctttctttgccacttgcttgggtaactcttgatactctgacagttaaattgtcatttcttctacaaagttttcctccacatatggatgggttgcttcttttatcatttcttaaaattccataggtatatacataagagacagaaagatgtatgtgtatgtgtgtgtgcggatttgaataagtatatgtgtatacacttatgtgtatctgtgtataccgcagacatacatacctcagcatttacagaatagttgatactttgtctacttttcccactagactctgaataacttaagaaattttattttaccctttgatttttctatacctagcatctaatctaatgcttagaaaataacaaatatttaataaacgtttgctggttaaatgcatttgttcaatgctatcgatcagatttttactgtggaaggctcactgaccagagtaggggatgagtacaaagagtctcagggcatttgggaaacaggataaaggccctttgtagaaaactggccaagggtgttgagtgcctgagctcagggaagtggcagtggatggaaaaatatttaggtggtggaattggtggttgattgaacatgtggggaaatgaaacaatctacgattatttgaaggcttctgggtttagaaaattatttggatgggggtgtgattcaccaaggggaatgaactgtgttctagacattttgaaattgagatgttcagagtattggttgaagttgtccaagagataactgggtatggagtttggagaaagtactattttggagagagaagttggagatttaccaacctctaggtactctttgaagctgtgaccataaaggagataactgtcatctgttgctgattagattgtcatagtggtggtggtacattggggaagaagagaataggtccaggagatcttgatattgaaggtccagatcaagaaggagagaggcctgtgaaggtttctaatttaaatcttggttctgcctcttgtctctgttctatgatgcttgaacaaattattctatgaatcttagcttcttcatctgtaaaatgagagtaatagtatatactttataaggatattgaaaggattcaataagtttccatatattaaatccctgccacagtcccaggctcactgtaggggctcttaagtggtaaattcaagaaaatgttcctcaagatatgagcagtttcaaaacaaagaattttttaatggttaccccagagattacaattaacatcttcaacttataacaatccagtttgagttgatactatttcagctttaatagtatataaaacttttttctgtacagttctgtcctttctccttcatgttgttattgtcacaaattacatgttcatacgttgtgtggccattaacgtagacttataattactgtcctatgcatttgttttttaaatcatattttaaaagttacaaaccacttacctatgtagttagttacctttgccagtgttctttgtttcttcatatggctccatgttactgtctaatgttcttttatttcagcctgaaggactccctttagcatttcctgtagggcagatctattggcaaaaaactccctcagcttttgtttatctgagaatgtcttaattttgccttcatctttgaaggatggttctgccagatatagaattcttggttaacagatttcttttttcttccagcacttctttatttatttattagaaacagagtgtcactcttacatccaggctagagtgcagtggtgcagtcatagttcactgtagcctcaaacttctgggctcaaatgatctttctgtctcagcctcctgagtagctaggactacaagcatgtgccaccacgaccagttaatttaaaaaaaaaaaatcttttgtagagatgagggggttctttgtgttacccaggcaggtctcaaactcctagattcaagtggtcctcttgcctaggcctcccaaagtgttgagattacatgcatgagccaccatgcctggctgcttccagcacttccaaattgccatcccactgccttctgccctccatagtttctgatgagaagtagttgttcatcttattgcagatcccttgtgtgtgatgagttgcttctctcttgctgctttcaagattctctctttgtctttggttttcatagtttaattacaatgtgcctcattgtggatcttttggtctcatctgcatgtacttagtaaacactcaaataagtgatcataataatggtgcagaattaaatgattataatttaatggtaacagtaatgaccatgaatcatctaccagttaaacataatattgtgcttaaaaagtcaagaaaatgttcaatgcatgttaccaagaattccactaaaactttaattttaaaaaatagtttagggaattaagatgggtaagaatcaattatctaaaatattcacttacatgggacaaccagatgactaacagattattagtatatgaggtgttcctgtggttctttgcaaaagaaaacgtctgccttgaaatagataaacttgcagttacatttacaaattatctcccacagttttcattaccgttaacaccatgaaacattttccttattatctgagatacttctagaacaaagatcaaactctaaaataaaatggacttatagaaatatagcaaatcataatttaatttttataagtgtttgcacctgaacaaaacaacccaattttagatccttaagtttagaagttggtagaaataccagtttttccagcttctccaactgcagtgtgttttctaatattttaatatagtttgccattggtgatcttagaatatatttctagcatttttcttagttctcaacacaataattcccagaaattttgctctaatagatctaatttaaaaatataagatgttatattttaatttttataaggatctttatttttgaccaagctttattttggttgcttgcaccttgttacgttacaaagggtactgaattctaccatgtaggattttttttcttggtttatttaagaaacattagagtaatctgaagactttgtgagccatcgttgtttctcttttgtttcgtggtagtctgttactttgacctttttcaccaagtatcagaaaaataattttttctcatattcttttttgtagagtcactccatattgggaggggattgaaaagcacatactttaatgcggcagtaatgcatacatattattttttctcttagaacaatattttaagatttgtagagatttcaggaatctaagagaacaaaacataaacaaaaaatttatattctaagtggacaaacataaacaattctaaatacaaaagaatttatgtttttacatgtttgatttttaaaactgcatttcaggattgatgattaggatttcctcattaattcagaggaacagattgaagaaaagtacgtgagtggtaggagaaaaaaatctgaattgaaaaataggcttttatgattcttattttttaaataatttttttaattaaaaattaataggttctcacagtagaaagtttagatgagcaaatagcagaaaacaaccattccaaaatcttatcacccagaaatagccactggctacattttttttttttttttttttttttgtgatggagtctcacttactctgttgcccaggttggagtgtggtggcacaacctctgctcacggcaacctccgcctcccaggttcaagtgattctcctgcctcagcctcctgagtagctgagattacagacatgcgccaccacacccagctaatttttgtattttttgtggagagtgtttcaccatgttggccaggctgatctcgaactcctgacctcaagtgatccacccccctcagcctcccagagtgctgggattacaggggtgagccactgcacccagccacatcttgatttatctttctaccattatgtttacatatgtggaatcatactgtacacactcttttgaaacttgcatttttaaaaataatatattgtgaatgtctttccattttcaataaagatgtatcagtaccattattttaagagccacattatatatatatacatatacattatatatcatatataatgtgtatgtgtgtgtatatatacaatatatatacacacacagagccagattatttatatatatatatatatatatgtatacacacacacacacacacagagccagattattcttcagaaaggtttttatcagtttgtattcccacagtgatgtgggctcattttcataaacaagtgttgtgcagttttgtcattaaacaagtttgtttttaacccagtttgaaaggtttagtgtttcactgaggttttcatttgtgttgctttaagttactaaggtttaacattttcttctatgtttatgatcaaaagtttccttaaaaggaactaacttcagtgattgttttattagatcagtacctaatcataagtacctgagtgaattagtgctgggatgaatttactcacctattaaggatgtgattatgaaaggtttttggcttacagtgtaggtaaagcttggttggctttcttctaagacacagcagacagtcttcattacaggcggctgcctagttttggctgcttagtcatttttcctcaagagaggcccaaagctggagaacagggctttcacaggtcagaaatggacagagaactaaatgttgaaagttgtccagaatgttccacactctatctgacttaagccagagctgttcgctttgcttttaaaaatacacttaactcacttatttctgagatcagaatctctttttcaagctctgtcgggtgaattgaagtgtgccttttttctaactagtcaagggaaaaatgtaagagggtttgggatatcagcagtcttcgctttttaacatttttcctgtgaattttctgaacttctttttttcagcccaccatgtaaagtatgtattgggatcttttaatttaccaaaaacattttggctttggcattcccacaatgcctgtcagcagggtatctcatttgtcacaaagtctccccatcactgacctctgcttcactgcagctccaaatggtgtgctgcattcagaggcagaataacagagtggttagaaaatcagattctggagccagacagtctgatttcaaagcccatctccactacttactgtctttgtactttaggcaaagtattaaacctctctaccactgttgctgtccattttttgtttttaaacagctttattgagatgtaatttacataccataaaatgcacctgtgtaagacttcaggtcagtatacttactgagttgcacagctatcaccatgatctaaatttaggaaattttcatcactccaagaagaaacccagtacacattatcagtccccattcctccacactctcccactgctcattgtcccaggcaaccacaaatccactttcgatttctatagatctacctgctctgaatatttcatataaatgaaataatggaatacatagtcttttgtgactggcttctttctcttagcataatccctttaaggtttatccatgtcatagcatgtatttgttcttcatttctttctattactaaatagtattccattgtatggatataccacaccttgtttatgcattcatcagttgatggacatttgggttatttacagttttgggctatcacgaatgatgccgcagtgaatatttgtttaccttcactgcgtcatcattcagtgaacatttgtgtctatttcttcgtctctaaaatgagtaccatctcatacagttgttaagattttttaattaactagtaaatgcaatattttagtgtttgagtcttcgtttaacagcagttacaaaatctggcttactcagaatgccacgctttcctaatgacatcttgaagtatcctcacttttactttattttactttgacttttccctaagttataatttagaaaaatttcatttattcaataaatatttattgaacacctatgtatcagacatggctgtgggtgccactgagaattgaaagaaaagaataagcaaaacgcaaagaggcaccactagtttaaggctatctttagtttgctactctgtcatctctgacctgccagtagggcttgcgacttgagttcccctcaccccatcctctcaccaaaagccacaggttttggggtctctcagtccattcactcttgttaggcccttattttgtccatcatatttatgtttttggagtggctgattgaaggtaactgttaaggaaagactaaaagttcatcatgtctaggtggagacctcaagaggtaaacagtgccctgttcctgatctatagctgaggttggtgaattgttctttatactaatctagacctaatagttcctaattttctccattggcaggtcgcttctttttgtagagttggctgtgttctctttgaacttccaaatctattttgtattggaactggactcaccaaaattatcaactgattattgtttagctgcctacagaaaacagctattgtttagctgttatctttctcttgtctttggggagataatgatccacatggttagtgacttggagttcacttaattccaagtaggattttgcccctgctaccattctcttccctgcaagacaacaaatcgcattttatgatatgccttctttgtggcagctctaaagcttttttttttcccataatagcatgtagttagcataacagagtgatgctacagccttactcttttctctgcctttcattcagataaaatgcattagcagtttgaataattgtgtttgatgacgtagaagtgcctgtagtgcttgctgtatgtaggactatggaagaagctgaattctattatttaatgtccagttcaggaattgatctggaatgaggagaggggtacataggcatcccatatacccattaagccatcctaaatagcttgtttcaggcccagctagtagtacatcagttctgttgctgatcgtgtggtaggaatgtgtttccatatacatagttttactgtttgctctattttcaaaatttactatagtgcaagagtcacatcttgtaaacttgcccagtttaggggattcccattccacatgtaaaacattttttggttaacagattcagaagatattaactcctagagccacagtgccaggtctatatagatagaagctgaaactagattaatagcaactctaaagttggaaagaagataaacaatgaaactttcttatgaatactctcttaaaggctgtaggaataaaatgatttagtaaataagcaatgttgattttgccttcccttgtcagataatagcagccataaacttaacagtttaaatacaaaggatttctgtgctttagagttggtttgacatccctgtccttttccacttttcagcaacagctagtgggaaaggggttgtttaattgaaggcttcaggagaacacaccttgcacactggattcaacctttaaattaattgaaccctgtatctttgtattatttttaagttcttttttctccttgcttcctcttaccattgagttcttttctactctatgttttacattcctgtttgtgataaacttgtccatctgtcttcttccttctgtgctttcctccatccagtgtctctatggtcagatcaggaacctcaagtagggtctgagaggaagctgcctggctccttgggaaggatggattgatctggttctctgctgtcggctacttttgcccagtggacatgcgaatggaggagccatttaaggtgaatagattcccagccaagtcagagaactgggacagtcactttgaggacactgctacttcttttgtgcttgagcttcactcattgtgtctactctgtaagacgtatttgaggccagatattgacatttttaagtcatttaatcatttcaaaatatttatagatgtcttaggacaattttttgttgcaagtaataaaaacccaactcaagctggataagcaaaacactgactttagtgactcacataattaataaatccaggggtagatcaaacacactgggcccaggtgtggaaataatgtcttccggaatctcttgcccactgtcccttgttctggccctcttctgcatcccatagtaggttcactaaaatggtggcaaagacagccatcagtagctgcaggctgagactttgccagtttcataatcccagtgtagagttttactctcccagaagtcctagcaaaatttctgagactgattattatgctcctgtccacctctgaatcattcatcatcactcaatccagggttgttcacatgccatccgtgggcccctgctgttaaaaccagattgccagattctaggacaggagtagttcctcaacagaaaataagggtgtggcttccaggagaggtaaatggatggaaaggcagagaccatctgtggtttacttaataggatgtagaataaatttacttgatgtgatatataaagttgtacatagtgtttatagaatttatttggtactaatacatagccatacatcattacctgcatttttacttgtaagtcttctttcccacaactagatagtaaagcttttaaaaacaatatctgtcatatctattggaaactctaaaactgagtatagtgcctgcacatggtaggtgctggtaaatgtttatgggtgctgctgaaatcgcaatttgcttctagcagcatgcacattattgttggtggcaaatactcctggagctataccatttggtgctggttgagaataagtgcacacagagtccatatttaatgagcaaaaaagagaatacagtggcccatatccgtagtgtagggctagtgagatgtgtgaacataaatttggtgcatacaagacatagtcacagaatatgcttcatgcacttaagaggaggagattagatatttttaaaaattcttctcgattccaaatactggctctagttcaagcagaattttgttgtggcccttaggtagctgtgccagacatctctcagctcttgaactatttgatgtccaaacattgaagagaatgggggaaaaaaaagtgaccggaaaaaaatcctcatagaacttcctgtgaatgggtcaaagtttaatcacagcaaataagacagatttcccttttattgtaaccacaatagaaaggcagggcttgtgtttacaaagcatgttgtttgggagacctttgtaaattgtaatctttggaaatcccaaacctattggatgtaatcccatccattagatgaaggcaacttgcctatgcaatagttccagaagagcaagttaaattgagaacatgaacaggaagtagtcattaagaattacaatgggtaggatgcagagttaattcagagagatattttgttattagataattacatcactaggacagctggaaaactgagtgctgtgctggactgcaagccttgttctctgccctgcagctggcgggtcaggacaatagagacagcaagagaacttactttgtgggagagttaggggcttggccaacttaattgtgaaatgataacgacctatctgccttttttggattgcattttgcacagctaaactgaaggcatagccttagttaatgccaataaccagtttgcactttgactttttgaacattcacttggatcacattatgctaagctctaatggataaatatttaatggtaattttcctttcctttaaaagtcatctgagatattttgttcatattcaatacattgtgattacatttttcttatggaactgctgtcatgtaattcttgaaatggtatttttgtcaggttacagattagcaaaaatttttaaaaaaaggttttagaaagtcttaaaatattggtcaatataaggaatcatgcagttgtagctattttccagttttttggggtttttttggttttttttgttgttgttgttgttttttgtttttttgttttttttttttttttgagatggagtctcgctcattgcccaggctggatggagtgcagtggcacggtctcggctcactgcaagctctgcctctcaggttcacgccattctcctgcctcagcctcccaagtagctgggactacaggcgcctgccaccacgcccggctaatttttttgtatttttaatagagatggggtttcaccgtgttagccaggttggtctcgatctcctgacctcgtgagccgccctcctcgggctcccaaagtgctaggattacaggtgtgagccaccgcgcccagcctattttccagtttttacattcaagtgttcagacctgtctggctcttttgttttgcaagtgtaagggttctaggtagcctagccccattccttattgatttatataaatacattacagattgtttacctctagccaaataccagggattttaattcatgcttagctcagttgttgtatatgaaactcatttgttatattaaagtttctggccgggcacagtggctcacgcctgtaatcccagcactttgggaggccaaggcaggtggatcacttgaggtcaggagttcgaggccagcctggccaacatggtgaaacccatccttactaaaaatacaaaaattagccaggcatgatggtgcatgcctgtagtcccagctactcgggaggctgaggcaggagaatcacttgaacccaggaggttgcagtgagccaagattgcaccactgcactccagcctggacaacagagtgagactccatcttaaaagaaaaataagaataaaaataaagtttctgttttctctttattgcccaccaaagtgactattatttgatttggggcaattccagagggagtcattgtagacaaaaaaaagcatcataaatattatagtctagcatttctaagattaatgtttacaaccattgattcaaaatgcatttcctacccattgtgactaatataactgttaatttttagtacaatgtttactaaccattaatcagacataatttaagtcagacaaaatttcatagttttgggaagagcaatatttccccagatgtcttccatggagtactaggtctgtaggatgtggatggctagccagcactggagccaaaaaagagagtatcctacaggcacccttaggactctgatgtcccttgatgccctttgtgaatgtctgagaagtctctaatatgctccatttcctgaatgaagttaataataatggcaccttaaaaattaaaaaggattatttccttgaacctggaggagtcacttctacctaataccattttttaagaatatgcaagtatatacattaaaatttatgtgaaaatgttctgctctatggactattacacatctctttaaaattccatgttttaaaaactaccgattgaaatgagtccttttttctccaaggtttatcatttaggacaattagtagtggcttcagtgagctcacctttcgtatcttgagcatccattgaaactgaggcctggagtccagttgctgcaggtggcatcagtgagtcttaatattttgaagagagcagtataactctgaggaaagcaacttgggtgggttagatgttatttttaaattgtgtcatgcaaagagtgcttgaaaacggtttcagtgagatgaagcaacagggcatactgccagggttgttaggtaacttctaagacaacggtccagggggcagatgactttttgtttcagcagtattttaggatcactttattctccagttatgcccccgtcagaattttttctcttttggaaattactataatatcttatatatatatatatatatatatgataaactataaatgcagtaagaactggagttactaaaattactattgattccaggtagtggtaagcaatgtaattttttcactaaatatattaattataatgggaaatatttttaaagtaatgtttcagaaacacaactgaaatggtcatagtatgaaacagctctgtgtttgtatttgactttagggacatgccatttttggttcactgctcttttattttattacaaaaatacaagcaacagatataaagaaagttggggattgtggaactccattttctttttcaataggaagaaaagagtgaagttgtccaagtatgtggatttaatagcaataagctggcttaaaaaagcctgtgaatagttgtagttatcttgaattatcaaggcaaaagaactgttttgataaattttccacatattaaatccatgcatgatagcaatcatatttttagagtgtgagacttaatatgatttatggtactatctttaataaatctgttaagagtttttactttattggaataattttccagaataagtaacattaggggaaaatattaagtttaggaatggatattaaaacttaaaaaccagaatgtttagaagtagataaatgtgaggaaaaaattttcaatggattctggttaattttaatggagttgtataattcaccccaaactgcccataattaaaaagaagcttggatctggctatgaagcatgtgtagttgttggtgttctgttttttgacctgccagatttaacctaattacagtggtggggtttttttgttaagtgttttttgtttttggttttggtttttttttttcgtttcctttaaaatttagtatagattcacagagaagtccaaatgtggggtccataaagcccagaaatgcagaaggatgacatggtgaaccagcaaggcattaaaagtttaacagaggtcctaggaatacaacccaaaagggatgtgaaggacctctttaaggagaaccacaaaccagtgctcaaggaaataagagaggacataaacaaatggaaaaacattccatgctcatggacacaaagaatcaatattgtgaaaatcgccatactgcctaaagtaatttatatattcaatgctatccccatccagctaccattgactttcttcacagaattagaaaaaactactttaaatttcatatggaaccaaaaaagagtctgtatagccaagacaatcctaagcaaaaagaacaaagctggaggcatcatgctacctgactttaaactatactacaaggctacagtaaccaaaacagcatggtactggtaccaaaacaaatatatagaccaatggaacagaacagaggcctcagaaataatgccacatggctgggcacggtggctcacacctgtaatcccaacacttcaggaggccgaggtgggcaggtcacctaaggtcaggagtttgagaccagtctgaccaacatggagtaaccccgtctctactaaaaatataaaattagctgggcgtggtggcccatgcctgtaatcccagccactcgggttgggagtagtacttggctgaggcaggagaatcgcttgaacctgggaggcggaggttgtggtgagccaagatgtgccattgcactccagcctgggcaacaagagcgaaactccttcacaaaaaggaaaaaaaaacaagaaagaatgacacatatctacaaccatctgatctttgacaaacctgacaaaaacaagaaatggggaaatgataccctatttaataaatgatgttgggaaaactggctagccatatgcagaaaactgaaactggaccccttccttataccttatacaaaaagtaattcaagctggattaaagacttaaacataagacctaaaaccataaaaaccctagaaaaaaacttaggcagtaccattcaggacacaagcatgggcaaagacttcatgactaaaacaccaaaagcaacggcaacaaaagccaaaattgacaaatggaataaaattaaagagcttctgcacagcaaaagaaactatcatcagtgaacgggcaacctacagaatgggagaaaatttttgcaatctatccatctgacaaagggctaatatccagaatctacagggaacttaaaacaaatttacaagaaaaaaacaaccccatcaaaaagtggacaaaggatatgaacagacattttctcaaaagaagacatttatgaggccaacaaacatatgaaaaaaaagctcatcatcactgttcattagagaaatgcaaatcaaaaccacaatgagatgccatctcacaccagttagaatggcaatcattaaaaagtcaggaaacaacagatgctggagaggatgtggagaaacaggaatgcttttacactgttggtgggagtgtaaattagttcaaccattgtggaagacagtgtggcaattccttaaggatctagaaccagaaataccatttgatccagtgatcccattactgagtatatacccaaaggattataaatcattctactgtaaagacacatgcacacatatgtttattgcagcactgttcacaatagcaaagacttggaatcaacccaaatgcccatcaatgatagactggataaagaaaatgtggcacatatacaccatggaatactatgcactcataaaaaatgatgagttcatgtcctttgcagggacatggatgaagctggaagccatcattctcagcaaactaacacaggaacagaaaaccaaacactcatgttctcactcataagcgggagttgaacaatgagaacacatggacacagggaggggaacatcgcacaccagggcctgtcggggtgggggggttaggggagggatagcattaggagaaatacctaatgtagatgatgggttgaagggtgcagcaaaccaccatagcacgtgtatacctatgtaacaaacctgcacattctgcacatatatcccagaacttaaaatataataaaaaaaattaacggaggtaatatgtaagcaggataattgatagtcaaccctgtgcatcagttattggactctatgcacatttatagtttctttgaagaaggcatttattcaattttttttaaaaattaaagtaatatgaatagtattttattagctttttcttagtatttatattacattcttgttaagaaatgtacttacagcttgtttatgggtagtttaattcttcaaacatttggtgagaatctgttgtgctaaatagtgtactgtggttgaaacgaaaggaaattttgtcctttggcttgaatattcttttgactcctgaaggcttagtttttaaaacttaaattttgtcttattttaagatttttatggaagaaactggattcacccatccaaaacatttgttaatctgttgctttattatttaagggcaatatagtttaccaatgcaggtccccctacccctgaaaaaaaagtttaaattttacaatgttgattaacatggtattggaattttaaaaactaagaatgtatgccctttccagggaatgatttgactcagcaggatgagggctgtcttagaaataaactaaatttctccatattccatcatatttgttttcacagacatggttgtgacaccttaaattccaggaaaatcttgattacaacattcagcatctccaaaggatgctcaatctatctctagtaattctcaaactgtgagctaagaagaaacatattttgcctagacatcaagtttttgaaattatccccattggcaagttctatctaaggtcctaactaaggaaactctccaagcgttcttgtgctccaagcgcgttgctttctcattgttactatagatgttctcatgcttaaccgcacactctgagtgcccctctcctgaacttcatgttgttattaaagtatcagatctcatttgatatctttacatatgatcacaagaaatgatcaacactggccttttttttctattatgagaccaaattgagcgatatgtataaaacatacaggttacttctttgcttattgccacctacttaacctctttgttttttcttctaggttgtttgatgtgtgcacagtgtcacgaacagacagagaaaccaaactaactttagtgtttgaacatgtcgatcaagacttgaccacttacttggataaagttccagagcctggagtgcccactgaaaccataaaggtatcaagaatcatcttcatgtcttatcaggcagtcgactattatagtctgttaagcaatggctttctttccttatgaaaattgccacaattacaacttttagaattcggtatatagttaaaaaaatcaaagaaaatgttcaaagattgggatatattccagttcatcaactaagtgagatgttcaaagtacagacatatgtattctagttcattaattttagaactaagtggaaaaaaaaacctttagttctaatgcatattaaaattatttaaaaatacttagttgtagattgtcttagaccttaggaaacatagtttagtaagtatagctcagtcttcttctgatggtttattgtctatgagagacataatttgaacattattcatgagcacattgtatattatgattgtataataactccgggacaacctatgctatgtgaatctgaaatattacttgttaggccctccttctttcttcatttttcttattcataaaacgtttatagggaagcctaagtaaccagatactatgccaaactcctgggattcaaagatgattgagacatgctttctatccttagaggtcagtaaactagatgcagtatattgactggaagttcttcctacctttaagtctaatggaaaatgctgctgataaagttttgttgttatttgcattctgcttaactgaacttccccgtagatcttttagatttatacacatcatgtgcgggtcttcatgaaaacctttttgtctgtgtgaattaggtagcttaaacagactcctgccttatcattcgttgtttagaaatgagttatagaattcaccatcattctagatagaagttaatagctaaaaatagtttatcttctcaacagactaagaaatgtctttagtgatagctaaatgacgttctcagatactgactgatacatttagaatttgacatactgaatgatttattccttttgttttagattaatattgtattttttcccatctggctctcattaaagaatctggtgcttaacaatagtcccatttcttcctgagcagtttcaaggacattaaggccctccaaatgtaggtatgcctgatagttacctgttcttggccatcttctgtctgtgcacccctctttcctctggcattctattccacccctgaagctttagttctctcctttatgagtttgtcagaaaccctgtgttcagcatgcagagcagggcatagtcctttttcttatacagttttctaggcaaattggactgctcatcattctcttggtatgatctgtgattttccaccttggtggccttccttctcatgccatttcttttgctccttctcaccaggctatctacctaaatttttcaagtgccgtctcaaaagccatttgatcaactcttatagctagatgtaatctcacatgccttataacacttgttctgcatatctctacctctttatcttgttttctgcctttaattgggattttttaatgtacatatctcatgtattcagtcatcctcatgtcctgacagtgtcttacacaatgatttatacacataggtacaaagtaaataagacacattgtcaagctttctttagatgtaagtattttcaaaattatttttaaaatgactttcaaaggctttaaacatagactatcaaaaaatcattgacattttctgatacatttctaagttcaaagttatttggggagtatcttttttttaaaaaaacagacagatgaggcaaccatatattttatatcttacattaccacctacatagatcttttgagcattatattaaattatcctagtatattggaggctactgagtggaatcatttgcaaaggcatctgtgcagttaaaatgttgataagccagagtggtttactagactcaggtttgatcaggcaggagtagaaatgaattggaatggggggaatctcaagggtgagggtggaggggcaagcaggataggaaaaggaacaggcagaagggtggtcaccaaagtaagaaaggggaggagaagacagggggcagtggctgagccaggatggagctggaggcttgctagaagggggtgattgttgccagaagctcttgaacaaggtgacattaaaagttaatttttttttttttttgagctttttgtctatctccaggaaagggaatgtcacttcattccgtgttgaacagggattgtcctggaggctgttaaatttcttcagccattaggatcagcaccccttgatccaaattgtcagatacgaggtggagttgggggcaaggggctctagttattgaaggtttgtggctaatgttgtattgatgttttcatagtaaaataaaccatagtcaaatgaaatatttcaggcagttaacttacatgttagtggttaatcaaacattttttgctaacttaaaagctaattagaagactcttttatcttcattcttaatttaaaaaaaaaattctgaactatactaacctactttccttccttattaaatataaggttttttaaaaaataatttgagtgtttgtgatgctttaaggtcattgttgaaaacttgaataatcatttaaaagcataataaaaccatcaaatggatagttttaggctgaatatataactgatacaaaattatttttaatcaacactcgtatcttttgtttctgtgattgacttgtttttaagaattggaatgcagaataaacagctgctaagtaggagaatctgaattctggttaattgaaattttaaagcacacagccagagaacagaaatattttgttgttatataggctcatttatgggaagccttaataactagatcaagcaaatattgttattctgaacaacctattgggaacacagaaattgattctttatatagaatgctctgttggaataagagcttctctgactatactcgtacagatatttattgaatattcactctgtgcagggagggttctgtgctaggcagttcagggacacaaaattgaattaggcatgagaaagagaggacctgctctgaaggacctttagagtataagagaagagataaaatgcaaacacaagcctgtggtacacattctgtatggttatttaagtagtttaggggtattttcaagtcaagaacagactacttatgtataagtaagcacagtctatattgtgccaaactattttttaaaatacttaaatttaaattacttttcaaaggatccaaatcataggtattaatattgacattgtcttgcatagattaaaacgtatcatgttgttaaataattatacatatctaagatatttttatttttttttgagacggagtcacgtgtctaagatattttatttttatttatttttttttttttgagacggagtcacatatctaagatactttatttttatttatttattttatttattttttttttttgagacggagtcaccaggctggagtgcagtggcgcgatctcaactcactgcaacctccacctcccaggttcaagcgattctcctgcctcagcctcctgagtagctgggattacaggcacgggccaccacgcatggctaattttgtatttttagtagagactgggtttcaccatgttagtcaggctggtctcgaactactgacctcgagatccgcccacctcttggcctcccaaagtgctgggattacaggcatgagctaccatgcctggccagatattttaacatgaaatatatataaaatagaaaatcaaaacaagacctcatctaagatcatttaagctcaggggattttcctctacccactttcctctacccagtgttgtgttttctgtggcactgtttaccagttaacaggccactgaaactcaggatattctaatgcacattcaggacataaattgcattagttgggcagtacttggataaaactaggatgctccatggtgtcttactagatatcataggggtaacatcattttgcttatcatttcatcaacacgtttgttagaaaagagcccatgatgatcttacttttctagcttacttatatcacctaacagtttttgaagtgcacttaagtgccatttgttttcgaaaaataaaaaagacattaaaccacaccataagccataagtactaataaaggttgatagttgggtaaacttattggggaaactctaattattgcacggtgctcatgtgggactttaataaagtacattaagagtataggcctgaactgaaaattttcattgagaagttcatgagaataaaataaaatcataggtgattctttccaacatcattaaatataccttattctaaaaaaaaaaaaaaaaaaaaaaagcatacatagaaatcacattcatacttcatcttggggttttcatcacattatttaacctcttttcttgatgtcctttaggtgcatccattcttggttgacaatgacatttgcataaagcagcctgttggctgctgtcctgtgaagtcaacagatattctaattttccctcatagacttattgttgacatatctggctttcctctttctaattcaggatattatctttgggtctgtttacttgtggaggagttcagtgccatctttattaaatttttattggctcatttgagatttaatattgccttcctgggtttccatgctgagatttatgaggcaataattgacaccttaatgattgtgttattttttcttttagagtacgtgataaattcagagtatctatgcttatatagcaccttccatttatggagctttatgagaaaaaaaaacagctctcagatttttatttttctctttcatgctttcatctgccatcctatgagagagggtcagaaagaactgtaaagaaatttgctcaccatttttcttagtaatttgtaactgccacccagaataagaactgtacactgcaagatacagatggagagagactcttatgtaaaatattctcctgtacaggcttttccaaatgtaatgccctcttttactaaatcattcatttggtatttagtcttgtctgtataatacattaatctttcctaggatatgacctggcttctcaactattttataaactctttgaaaacctaaaattattctgtggacattctgtgcatgaaacatgtttgataaaaaaaaatgtttgatgcaattgtcaatatagtttcacaagtttgaggcactgaaaggtcacacaaaagaacagcagcctctaaaataggacagggttctttgagctcaagaccatatggcctcttttgatgattcaatcttggaataaaattttttttatttatgtatctttatgataaatgaattctatagagcttgagagggccagaaaagctccaggttcatgtctgtgtgggtcgttttctctgtgaattagatttcattttatcttcaattgaatgtttcttagagttttctattggttgtaatatttttagtaagagataaaacacactattaggtttattttacaaaacccagacttcagaaactgacacacactgttaatagcacctgttttttgcctctgggaaatgtctgttttcatgaataatatctgcttgcagtaaacagtggctctgatgtcagtatgggatgcccagggctgattcatctttctcagtttgacataatgcaaagtgactgactggtccctgtactgcagatgaggaaagcctctcagatcttcttctcttctcactcctaaaggaatcaagccatggcccctctcagctcctggtggtctccattttgcctgaattacgagcaggtgatttgtctcatctttgcaggacacagagcaaattaacatgaaaatatcgcttcccagaaaacaaggcaggcttgaatgccctgtcgctgctggtcattagccatctgccaccgacactcatactctgtttatcacatttgaaattcagagcagatgttgcataataaggtgatcccaaaaacaaggcaagaaattcaaagaacaaatactctaccataatgataaagatcttggaaggaaatttttttcaatctaatatcatagctgcactaattgaatagaccatgtttttaaaaacacacacacatctctcctggtatttgatgcaaactacttttcatagtaacaggaaataattttaaaaagaaagtacatttgtgaaagacacctgagaggactgttcaataaagtctctttaaagaagcaaagtcgaatgttggaataacatagttctggtttaaaagacctcatagatcagtgatgccatcttttactgtaagatgggccttaacctacagcaatttgacttaaaatagttcactcctcacagtatagtagatctttcaaggcttttaacttgcgaacgtggtttcccagtttattttctttttggcactcaagaccctgtgttttctatatcctttgttttcactgtttacccctctacaaactcccaccaccgctatcagcctcccaccttcagcatcccttgtctctccagaactctgccccagcttaccctggccttaggctctctccaacctgagtcccaagattctttcatttttagttcttctgcccttctccattaatgtagctttttacagtattggttattataatgttttacctagttgatttatgcacattgtagacccttattatgccttattcaaagtatatcacttatagtatattaactatggtgtttagagacattctgttttttttaaaaaacaggcatccaaacttttaccaggaatgtgacctatattctgtggaagacgagcttttaatatagtcttttgactccaaagaaatattttctccacagaaaccacaactttactgcccctccccactctgcacccctctgcccccacacatactgagagttttgaaatttggggtttttttttaaagactatactgctaagcaaaaattaagcagccagcctgagagtagacagggggataaatcaaagcagtgccagcagctgaccactgagtggaataggagagatgatttgaaggatggaagaatagtgagtcaatactgagtatattccaaattcagggggaaatgtagagtgagtgagctctaacaactgtgggagtttatactactaaagtcagaagcccagatctaaagtgtagagagaaataaaatcttcagtgtaacctttctaattagtaagatttcagtgtaatcttactaataatttccatttgtttccctctgctccaatcaggaacatacatattgtgctttcaagtatctttcattccaagggaaaactcagtaactcaagcaacttcttaaaggagaacatttttatgcagtctagattctgaagactctcagaaataaatccttttgcaaattcctaacccttatagtagctgaaaatatcagaagagaaagaggacagaattatgcatgtgtatgtatcctaacaaaaaatataacagctatttagtaggttttttaaaatctccaatcctataaaaagctacattaatgtaaaagagcagcagaactaaaaatgaaagaatcttgggacttaggttggagacagcctaaagccagggactaaaaggaagctggggcagagctatgcagagccaagggaacctttggtggggtacagggggttgatagtggtggtagggggataggaaatatgggtttaagaaaagctagtttctttctaaaggtactgtaagactgactcactaaataaataatgactcactaaataggcaaatgacacttagattcagctaataacagataagttagaatctctttagaaaatgcttcctcaccctaggcattgaatctgtttacaaagtccattaaaacttgcaggtagtatatacccgtttatatcaccatggcaacagatagcagagtgctcttctgcgtagaaggaaggctatttctcatctaaatttagcctgtgctaaactccttggttgcagtctctttttttggctcttcttcctctaaacatgggaacatccaaggcttcactgtcagccttcttcttttccttggctacactttctaatcaagtgatgtcatttagtccagaatcttcaaatacctattctccagcctgacgtctcccacatgctcttggtacagatagtcagctaaccatgtaaaacattgaccgagaatcctctgccaaactcaagccttccctatctgccagttgtttgagccccaagtttaggcataattcttgattttttgctttccttcacagtcttcatccaatccatcagtaagtgcttttggtgttatccccaaaagatatccccaatctgactacttctcaatatcttcattgctatagttctagtttaacccatcaaccagcttcctaactcaacacaccacttctgctcctgcccctttatggaccatcctctgtataacaaccagagggaccttattaaagcagaaataaaattatctaacttccctactgaaaacttagctccagtggtttctcatgacctgtagaataaaatcagaagtcctacatgatctagtgctccccaccccctgcctttctgatctgcctccactcttccttgggcccacggttctccagccacagtggccttctttctgttcctccagcttgcttctagctcggcatttgtccgtgctgatttttcatctgtttggaatgctccacaccctctagctcatgtcatgtcttcatcattccttctctgaccctctcagctacaactccacatctagttatagtttatcacattacaccacattatcctattttatcttcttcttcatagcacttagctgaaattatctcatttattttttatgtttgttttttaatctttcccaactagatgagactttaagtcaagactctagtccattgcactagctccagggccagcatactgcctggaacataggggatcctcagtaaacatgtgtttgtaactgtactaggtgtttatcttctaattaactcagaaatgtatgcatcaataccaccattgtacaagccaggaaatggtactttttcaaggataaaatttttaaatatttatattacagaaaaataagctgaaggtatgttgtatcttggcacattcactttgcacttgcgcattcagttctctgtggtgggccgggattctgggattatctgtgttgtagctaagaatatagcttggtttagaaatagtctaaaaccaataactgatcctaccaaaactataagatatattctccttaaaatagtactaattccaaaaatactaactgaattccagaaattgttcttccccggggtgggacgcttaaatatgttttataccaaggatggagaactaagctcagtgaagagacggatggatgtcatgaattttagaccctattctcgtatctcaggagtatatatctaaaaaataattttgtagtgatacatgtttttcattttaaaattactttccctatatcccaattgtatgctgtcttccccattcccatcacgagaactagaagcttcaaaggaataagttatttttttaaatctttgaagtactatactatatttattcatttggattttatcattcttacccagaaatttcagatgcccatatatattaagttgaaaaaaaggaccattctactagagcaattgccaacaatttgcaatattgtcattacaaaattttaaatcagtgaaaggcatacaaagtaggtatccatcagttatctgagatagtatcttattcctcattcctaagcaaggtggaaaaaattaaacaatcgtttcattgcagttaagtaagtaattactggttctagtaagtaattgttgaatgaatatgtggtttcacaaaaagttgtataatgaagccttgcaaaccccatagtgccagttatgagaatctggtgtcttcagtatgtagaataatgttgtagttactgtcattctgttcttcctcttcctcatcatcaccctctagaagcaaaattgtcctgaaagattgattcttacggtaaatcaagtgaggaggagaggttggcctgaatatggattcatatatttaattaaggacttagcatctgggcactgtgacacttggagtttagggagtaaaagagaattccttgaatgtcagaaatgacaaagtgggctgggcgcagtggtgcacacctgttatcccaacactctaggagaccaaggaggacgcatcacttgagcccaggaattcaacaatatggcaaaacatggagaaaccctgtcttgacaaaaaatacaaaaattagccaggtgttgtggtgcatacctatagtcccagctgctcaggagactgaggtgggaggattgcttgggcctgggagattcaggttgcagcgaaccatgatcacacccctgcacagcagcctgggtgacagagcacaagaccttgcctcaaaaaaaaaaaaaaagacaaataaaccttggctactaccatgtaatggttagattaattaggatgcctggaaaatggactaaacccaacaggttttttttttaaacccaacagattttgcaaaaatgagtaactatctaataaagggttgataaaggctttgtaaacactatgctttgtttctccaagtgtggtcagtgaatcaaccacctggggtgctcacttaaaatgacaatcctgccctaactgattcctcattgtcaaacatagtctcaggagggagtttctaataagtaccctctggtgacaccagacactgcagcttaagacatactcccaacccccgcagtatgtcatatgacacaagtgggaaatggaaaacatctcccttacattctgagatgactcagacatctggaatatttgcttgcctgtgcattggtaaccccagccaatcagtaggtttaggcaatctaagcccaggtgaagtcaggtgtggtgctttactaacgtcattgatatgtaggaaatttgtttaaaggcactgaagttttattccttaaaatgttctattgaaaaatacttactcattaataggagatataaattaaagagatgcttaggaataggagaattccaactaaaaatttttaagccacacaaaaatctttcctttaaaaaagtgttcatcactcattcatgatttgacctttgaaagttgctatttgtttcatatacactaatgatttaacagttctctagggtcttaaattagtaaaccattaccagacttgcaagtgtaatgggtcagaattcctactcctgttttattggtaaggaaccaaaactatattaaatttaaatatatcatagtcataggtttttagtgctgacaccaatgtggctaaacctagtactctgaggctcatatattgaaagccatgagtactcagaatctaattttcttctaattgtcattctaggcctttagcaaatttaagctagcagttttgctgatttttatattaccagtgttcactgttgtcactggccatacttgttaattttttatttcttggccaaaaccaaagaaaatatttatcattctactgtagtatagtcataccacttttagattagaatgttaaaccaaatgtagcaaagattggggactgcaaggcataaaataatgtttaggaactgcaacattaaaagataagtttactattaagcaatcagatttagatcaatctggaaatagctatcctcaatttaagatgttctaggccgggcgcggtggctcacgcctgtaatcccagcactttgggagattgaggtgggtggatcacaaggtcaagagttcaagaccagcttggccagtatggtgaaacctcgtctctactaaaaatacaaaaaaaaaattagctgggcatggtggcacatgcctgtaatctcagctgcttgggaggccgaggcaggagaattgcttgaatccgggaggcagaggttgcagtgagccgagattgtgccactgcgctacagcctgggtgacagagcgagattccatctcaaaaaaaaaaaaaaaggtgttctatgaatacggttagtatggaataaacacttgttaaaattttaatttcactaatatatcatatgttaatatttaagtctggaactgagaaattcaccattactcatagctgaagacttgaaatgtttgttgagactaagatggtataaaagctatgagtgagggccctgcttccctctgcttccttcctctaccaaaatatattccgggtcgggaggatggggttcaagaatagggaagaaataggttggtgatcacaggaagagaattggttgaatgagtcacaaaaaagaaggagagatttatttaccataaataaaccaaaaagaaagtgcttttttaaaaagcatgtgattatgctgagtgtaagtgcctgaaacattacattgctaattcttgtcccccccattatgattattactctgatcatagcaattgatcttgtaaacctcaagtcctttaatatttcaaccagaaactaaagatgagttgacttatatctttagtacaaaactatgtaaattgaaataaacaccacagaaggacataaatatcagttaagttttgtctttgacatcatcttttcttaatgttgccactatactaacagcccatgatatgcatcttatctttgctgcaaaatcctaataaaaacacttgggaacttggaaggaagtaaaacacaaattacattagagtgaattaagaaaaagagttgcattttggtatcctcccaagtggggagatttatgagagcatcacacatgaagagaaaggacttcttttttgtttcaactccaccatcactttctccacagtttcactggacttcttactttatttatcaccaagttctataattaacatatggttcatgttattgatttctcaggtttcaaagtaaaataaattgagctttcttccacatttagaatatacagtttttttaaggaactctaaacaaaggcacacattatttgtaagttggagagcagctgccagaaaacagaaaattaggaatggagtcatgagtgaaataatggagatactgttcagaggtaaccctttgtacagcaggaaattttccttagaaaagaagacagctgagtttgcttgtaaattttgctagaaacaggcctgatttagtaacatttagtgctggttaggaggctgaagacaacactttcagctttggataccaaacgagtggcctgttttatattttgtacacagtctaaatactttatagtttcaaaagatatgtgtgtaggagagagctattattaattttttaaatgatataataatatgtaaacaaatatttttcagatctggtagtagagttttctaagtgcgaaacagtagaaaatatcgcaaaggaaatgattcatgcattagactataaaaattttagactgaaaatattataaataaaactaaaaagcaaatgataaaatatttgcaaaaactatggcaaaggtttaatatccttaatatataaaaagctcttacaaaccactaagaaaaaggagattacccagtttagatatggataagaacatgaacaaatttgcaaagatgtacatatatacagaacgctggtagacatgggaaatgctcaacctcccaaataattagagaaatgaacaataaaaaaatgtaccataggggatgattaaatacattatgaaaatttatctagcaaaatgaatacatctcataggatgatttttcaaaaaatctcatattgttgaagaataattgcctaaagaaatacatatatacaatatgatcccattttgggaatgtatttcaaatacatatattaaaaaactagcatgaaattattaacagtatatatctctgtcagggtattatgggttccttataatttattgtttacaatgggttagtgccatacaacattaaaaccctttgacattcccaataattgactggttttgccctacaaaaatgacagtttcatataattcaacccaatatttttataatccaacaaaaggctgttttagcatacatcttattggggaatgccctctattacagaaaagttgaagttctcacatctgaatctttatagcccaacataagaattaacaacatagtgtcacttcctttgctcttaggcaacacaaagggacaggttttgtaaaataatcagtgtgtatacattaaaaacattcagtacatgtttactgatgatgatgatattgataaaatagcaaacattgaaggactaggaaaaatgatatgataagttttctaatgagatttattgacaccattgttatctcctttagtcttacaaacattttaccattaaatagtataattgggctatggagaaatttcacttgattgtaaatggaagcaattgctgatgagagtaaatttttaaattaatgtctgtgtacagaatacagtaaagttgcaagcctatttttactacaatgacagttactgatacagggatttctgtaacaatctctaggctttcaatacttttaaaatcctggattagcaggtacagggagattgtccgtgaatagataagatattatgaatgctgaattggtttaatgaagcagtgttagatgtctttccattttcagtttttcttgaagcaaaatatttaatttgagacttgaagtgctaacagcaatcttcattgtatgtgcatggccatacagcaacatgtttgtatataactccactgtccactcaaggacaatatacatttctttcaaattaaatgggataaaaggggaaagtgatgccaaacaaagggaatttgtgtgtatggtttttttttaagctttcttttttctttttttttttttttttttgccttaaagtctgttgttccatcctactgtggccttttgaaagtatgaaggtgaaaatagaccagtatggataacagtaaatgaaaactgctgaggacacatcacttgcagaaagataaatacccatagttttggtaatgcccctgttggatttagaaaactggccccaccacacacattttttaaaaaaaataacttttatcccagaccaaatcatttctatagtagctaaaattggtgtgttccagactcgtcctgtgagcctatatgccatcaaagcagatacacttaaggtggaggcagcaagccctgatgctaatctgaaacacaggttaaaggagagtcctatttcactaagacagaaaccactaagcttttttgcctccagccaaaataacaaagtcctagcctttggtgattgatgagcatgttgccaggggaaatggactggaaaatcatcgccttgtcttttacttgccacaggaaagccataacagagatctctattcttcttgttctgataagagacctaaggaagcatgaagaagggctaagaagcctgggtgtgtgttatattcagctgcttgctggattgccttttaaaatacaatttgtagttccctaactcacaaatagaacatggatagttggctagcctttgacaagccatgcagctttttaaccacagcttcagcaaagttttggggtataaaatcagtgtaccaaaatcgttagcattcctatacaccaccaacagacaagccaagagccaaatcaggaaggccagatcccattcacaattgccacaaaaagaacaaaatacctaggaatacagctaaccagggaggtgaaaaatctctgcaatgaaaattacaaaacactgctcaaagaaatcagagatgacacaaacaaatggaaaaacatcccatgctcatggataggaagaattgatatcattaaaatggacatactgcccaagacaatttacagaatcaatgctgttcctattaaactaccaaagacattcttcacagaactaggagaaaaactattttcaaattcatatggaatcaaaacagagcctgaatagccaaggcaatcctaagcaaaaagaacaaagctggaggcatcatgctaccgaacttcaaatgatactacagggctgcagtaaccaaagcagcacggtactggtacaaaaacagacacatagaccaatggaacagaatagagagcccagaaatgaggccacacacatatgaccatctgcccttccacaaacctgacaaaaacaagcaatggggaaaagattctctattcagtaaagggtgctggaataactggctagccatatgcagaagattgaaactataccccttctttacatcatatacaaaaatcaactcaagagggattaaagacttacatgtaaaacccaaaactataaaaaccctggaagacagcctaggcaataccatccttgacataggaatgggcaaagatttcatgtcaaagacaccaaaagcaaaaattgacaagtgagctctaattaagtttatgagctctgcacagcaaaagaaactatcacagagtaaacagacaacaccctacagattgggagaaaatatttgcaaactgtgcatctgacaaaggtataatatccagcatctgtaaggaaattaaacaaatttacaagataaaaaaattaaaaagtgggcaaaggatatgaacagacacttctcaaaagatgatatacatgtggtcaacaagcatatttaaaaaaagcttaatatcactgatcattagagaaatgcagaccaaacccacaatgagttaccatctcacaccagtcagaatggctattattaaaaagtcacaaaatagcagatgctggcaaggttgtagagaaaagggaacactatacactgttggtgggagtgtaaattagttcaaccattgtggaaatcagtgtggcggttcctcaaagagctaaaagcagaactaccattcgacccagcaatccctttactgggtgtatacccagaggaataatgaatcattctaccataaagacacatgcatgtgaatgttcattgcagcactattcataataacaaagacatggaatcaacgtaaatgcccatcagtgacagactggataaagaaaatgtggtacatatacaccatggaatactatgcagccataaaaatgaacaagatcatgtattttgcaggaacatggatagaactggaggccattatccttagcaaactgatgaaggaacagaaaaccaaatactgcatgtcctcacttgtaagtgggagctaaatgatgagaacttatgaacacaaagaagggaacaacagacactggagtctacttgagggtggaaggtaggagaagggagaggagcagaaaagataactgttcagtactgggcttaataccttggtgatgaaataatctgtacaacagactcctgtgacacaagtttacctatataaaaaatcttcacatgtacccccaaacctaaaataaaagttaaaaatcaatattacagtactttgttatcagaaagcacagatccttaaagactatattggcagtgaacttttttaaaaggctcgggttgcattatatagtatattttggaaatgtatttgtttaagagattagcatttccaattccatgacttcttcctttgtgtttttttccaggcctgtgtttcagttctgggttagaaacattttaaacctttcctaaattcagtagctctctcacaaattatatttagaaaagaaaagccccaccaaagttattcccagatcccttatccagtggaggtgggtatgcatactccgtttcttccccctctggtcttgcgcttcttgcccaattgaaatggagaattttgttaatcccatttgttattggaaagatagattgcctgtccctttaacaggatggccaaagaatgacaatcctgagcccaccactctaatgttgcattggaagagttcccctggaagtagaagcatacatcttccttctattaataccaacagtgaacctgatacaactctttaagttattgcagtctcttctcttttattctccaacaaatgagagccctgtctaacctagatctaaacctacattgttcattgactgaattccctggcttctgtgagggttccttattttcccagaaactgggtaaagccgattcacatcaactggttaaaactttgaatagaagaaaaagtgaattaaatagattcttgtttttatgagcttctccactacttcagagcagcaaaatttcactacatgccatgcccagccacaaaattgaggagcctgtttgttgtgcctttttgaaatggccttagggcttcccaaatttgttgtaaaaatcttaccaatgtaattttcccattacacctttcccccttttctccttaaacttgacttttgagttgtacacaagatcatagttaggtgagttttttgctgggtctttttttctttttttttttacaattttacatgcctctattcactcatctgtgcctaaatcagcagggcctaatctataacagagccacctttttaagtgaccgccagctgagtttgatcccttattatattaaagggagaaagtggactttgccaaggttggggcagattctccaaccttgcaaaacgttgtgggcaattaatgggcttgaacatgaggttcttttgtgtgtgtgtttgtatgtgcacttgtatgtgcaagaaagagtgaaagagatacccatgcatagaatttttaaaccgggcagctctgtggtagttagctagaggcaagagataccctgttggctcccagaccttcctggaagctgactgttggaaaagactccttggagataaatctcatgtggttcccttttgcctgaatggtatccgcaccccaacttataccttaggaggctttggaagaggaatactttttatatctaatgcactttggagattggagtcctgcagcaatttgccactcaggaaaataaactagcatattaactcccagcaaatgccacctccttggtttgaagcggtttgtaaagcattttcttcctggtttgtgcgcaccacattgtttcagctcctctcatcactgaccagctggcttgttggtgaatagagctgtgggcccctcgccatgtttcatgtgaggtcttggctgggtggcaaacaggcagcctgtagccagtgtcagcaattcaggaggaattggcacagcagtgtccccattaatttctgcttgtcacatactgtcatgcaagttacaccagagaggaaatgaccgttaaaaaaaaaaggtacccttgtggcactgggtcccctccagacgttccccgaggttaaacaagtggatacaattagccctacacagacagctgcggggaaaggaaagcctagaagtgggccccacagcaatgtgtctttcctgttagcaaggagtgtcggctatcaacatctgccatattttaacccttcaaagggaccagtaaattaaggggagctattatcccacgctctgctgatcattatcaatcataatgccttgggaaattaccacagtgctgctgccttggtggcaggttttgtcctttgggggatcgtttttatgtttttgctgagagcagagaagagtggtagggccaagagggtgaaaggaaatggactctgttaattgttggtaatttactgccacagggaaggggactagagcggcaataaactcctcctcagctcaaactgaagtagttaaaattggtgggctccagacggcttccatttccagaaagatccatcttgctgactgtcaacccttctttaccacaagctatggtgacttttagggagcacaaacaagaagagactttgggaaatgagaaccagttatagaggagaaaggcaatccaagatgagaaaagaaactctaaaatacaggcttccaaaaactgttgttttattttttaaagattgaattaagctgctgttatccaaatagagtcctgactaacctttataagcacatactgtgctttggagtggctttgtctagtgaaagtctgattaccagcacagagggatgggtgactgagatggtcctgtgtgaaattatgtttgttccaacttactcaattgaactaatcattaaaactgtttacagaaagaatgggggaaaagaatggtttcttaccatgttttaacttcaacaggttttgcgttcatttatgtagacctggaactttctcctctgaaaagagaccattttgctttgggggcataaaaatgacaggagttctgaaaatgatcaatactaatgagtacaggaaaatgagctgatgttcatctaaatgattgcaccaaagacaatgcagtgcagggaataatcatcttctgattttactgagatgcttcctgaatgttactgaggaagatgctggcaccatttaaaatatttaagtgagggatagaagcaaccattaggataattgagtggaagtaacagtgttactgtgtttattgagacttcatctcttcctgtgtggaagaagtgacaggatcaccaagcagagcctggagagattgtcagtgatgaatgttagggctgttcccatcctatgacattatctagtctgagaccctcattgtatatgttagaaaacagaaatcagaggttagggacttgtctatgatctcacaatgaagcagaggtggaacacaaggtttccattcccaggtgaactgtttatatcattccatgagctgactcagcacaggagttatgaccaatactagcagcaacaaaggggtcctcctacctcattgaaagcagggagtaggaatgaaccacaaatctgaggtagaaacggctttcttcaatacttctgccatgatgtcaggcaggaaacttgaggcaccagttttagttggccctcttagagcaagagatgccaatttcaaaaggtagtcttcttactagctgggcgtggtggtgtgcacctgtaatcccagctactcgggaggctgaggcaggagaatcgcttgaacccaggaggcagaggttgcagtgagccgaggttgcaccactgcactccagcctgggcgacagagcaagactccgtctcaaaaataaataaataaataagataatcttcttatgcaattttaagtatatctaaaaattgagaaataaaagtatttctcaaaataatgtgtagattctgagaaatttgcctcattcggtatttataatttttcaaatgttagatcacaaaggaaaatcagtaaggtacacataaatgcgagccctcatgagtatgggctcaatcactaattatgggatctctggtcttacagatgggtagactgtaaatgatttttcatctactcttgttgctgatctctgattttaggggatcatcagtaattgaattctatttgagattaaatccacttctgaacatcaggttgtgacatttattaagttattaaatcatatgcttcagtattcacaggtgaagcatataatttaataacttaataaggtcacaatttgatgttcagaagtagatttaatcaccataaagtaggttgtttctttggttaaatatgaaaatatagagaaagtaaataaattaggcttgcttcatgtttaaaaagcattattatttcagaattgtttctttggcctaatttcaggatctgtcgtataatgtcaggcttcagttgaagcagttacctgaagattgtgtagactctagaggaataccagaggattggaaataggaatagcagagaaaataccaatttagtgaacaatgatgagccaattagacaaaaaaaacattggcttgaacttcatgggaaggcaccgaatcattactaactcctgtggtattcagaataataacatcaatcatgatgaactgctttggtagtcatatgtctgtatgtaattccataaaaattctcttagttttggcattaattaatagtgactgtattttataaaatggcgtatttcattgaaaacacttacgtttaaacatgtcatctaagaacttgaaaatctttcctaacatgcattaaaatgataattactgagttctcatgggaaaaagtagtttctcattttaggtcccaaagtttcaacagcatttggtatagcatttcatttcacttgtggtcctaatgactcactgcattcttttcaccagaacttatcccctgtttactctcagagttctgtctcatgtagacacaagcctagtagtgaatcaataacatgactattttcatgaacagtggaatagttcaacctctgcaatgccattggaagacattgtctagtctgcaagtttaaggaaatttaacatttcctatacctttatatcttgattgggtttggcttttttttaaagattaaactctgagggaaacttctcaaagctgagcctaggacattctcatgcagttgggaagcagcactgtccttattttacagatggaggcagctggcataaatagctacttaatgatttgcccaagttcacacaagtatagagccaggagctagatttgtgactcttgcacaacccattagactgttttcatttcatctaagtcaccatagtagaattaaatataatttttatatctttgtcagtgctctttaatgagttaactcctacttaacataaatgttttagcatttccgtgccctctgggccattaaggtaatttatttttataattttaattattataatcctcttaagtgtataaaataaattcagaaatgaaatgaagacatatatttaattgtattattattaaaccacatggtataaatgataggattcagaaataaaagtttttcattagattttggccattcataaaatatattgttgtttgcttaacatccctaaaattattttcagagttaaggagaatatactcttatcactgcatatttactttacaaccattgaggaatacatactgtgtgctttacaaagatacagcctaatttatttgcaaaaagttaataaaactgcgtatgtgataacagtttttatgctgtttcctcacagatctctgttaattgttacctgtttatggttacttttgctgtattgttatcattgaattaggatagtctccagttaaattatcttctctccaatgaaaaaatcctgcttaaaaaaaatctgagggtatgatgtacaacttttacacatgatacatgaactttaacacaattgtgaattagagcccaacttagttcaagacaaaatgtatctcgaacacttcttttcttcttaaaatatcagcaataatctagtatccaaagtaggagattcatcatcaccttaagacttcttagcagtttttcttgtgtgacaaaatattttacacctttatttgagaacaaaggaagattatgagagaccactagaaatggaattttagcatttcgaaggaatttttatatgacgttgttcctcttggcaattcagaaagcactccaggaatttgtctagttagtgttttgtatatattagaatctgtgtctatttcctttgtaaaaaaatacgaagacctcccaagtcataacttttattatcaattcttgtaatgatcaaatatgacgtctgtacaggaaataaatcgtgtagtagtttagctggtaatccatgttctgcctcaaaacctaggaatgaatggcttattagctgttgaaaactctgtcattaagtatcattaaatcctttttttaaaaacttcctttatgccaggtaaatttttatattgcgaaaactgaattaagccaaagaaaggcttgcaaaaaccaattcagatcacactgtgactataacaagacattttcaaaaccagcattccagttgttctgtcaggtcattccatcaggtctcaaaaggtgactaggatgctgaaaaaggtttgccttccacattgtgacgtaaattcatttatttgtgttacttttgtttagaaatggcttgttacaataaggttttatcactgtgactcatagatcatgtaaagtcagcccattcccgttttactctttcttgtaattttcaaaatatggcgtagtggcaacccaaattgaaatcttgagaagctggcaaggttgatcaaagtggaatccacaaattaggattgtaaccaaaactggaggaatcatttttaacctactcaggaggccattttagagtcctgaaggtatcacttatacacaaatcagtgaaattataacatttttagagttggaaaattccttggaatatatgtagcccagcctctccccactttatgtttaaggaagtgggtcccgaagagggtggtgagttgcccaaagtcatgcagttagtactgtgctaggactgtaaccaagttcctattattctagttcggtggactttccaaaagccatataaatgtgtttttctcactcatgtagaattatttcctagaataaagacctatatttaaaacatcttattactggtttgaatgtgttactatacttgcttgtacattgctctaaaaacaatgttagtttgaactttgccctcatttgactgacctaccccagaatcagtaatgctctcttcactagaactttcattcttaacattttattctcctcaactagagcctcattccaagtacagtatatattttttctccatgaagaattgtaatcatttatgtctctgcatttcatttcagtagtgctcactatgcactatcaaagttattatcctatttccctggtaatcacttgcgtatttgtcaaataagggtgtatgttgaataaacatgtggcttttattcaatttggtaaacatttattgcataccctcacaggactaaagaaggctacaaatcagtacagcagaatgccttcaaaaacttacaggacacacccaccaagtgctgcagagcagtcagaagttccctatgagatataagtggaaaagaggttcagaggatcaaaaatgtacatgtgattataggaatgagaatttgatatgaataccctgaagaatttcaggtttggttttggacattggcatctgttttttctcagttgatcttttgtttgtttggttttggtttttggtttgtttttgtttttgtcagacagagacatttccattactcaggctagaatgcaatggtgagatcatagctcactgcagccttgaactcctgggctgaagcaatcctcccaagtagctgaaactacaggtgcacactaccacaccaagctaactttttaattttttttgtagagacagggtctcgctatgttgcccaggctaatttcaaactcctgggcctaggcaattctcctggctcagcctcccaaagtgctgggatttctttttttttttttttttttaggcagagtctccctctgttacccaggctgtagtgcagtggtgtgatctcagctcaccacaacctccgcctcccaggttcaagcaattctcctgcctcagccccccgagtagctgggattacaggcatgcgccaccacgcctggctaagttttgtatttttagtagagatggtgtttcaccatgttggtcaggctagtctcaaactcctgaccttgtgatatgcccacctcggcctcccacatgctgggattacaggtgtgagccatcgcgcccagccgtgttgggatttcaggcatgtgccaccacccctggctcacttgatcttaagttgcaaaatcacattcattaattctataggtgtggatggggaatgggagtgggatatgagtagtcatatatttgccttccatggggcctcaggaagcagtgcctcaactagatttaaggaagtactgtagtactgagaggtcttaaggccaaaagacaccatctgcttatttcattttatttattctatgttatgaaagagagtccctagcaacaagacacctggttactagccatgtgacttgagcaagtcacttgacttttctgagccctagttttcttatccataaaacaaggattaaaatatgcaagtcaaatgagttaaaatgtagaaagtattttgtagacagttcagcattctatgatataaaggatggagattcttctcttgtgtattttctagttacgtccatgtgcttttcaactgatcatagaactataccaagggtctgaccagtaataatactggcatatcaaaattgcctaaagtgatgtcagctagattttgcatggagcctttaatggcccgccaaaatgacttgatctacttggtgtccctaaaggcctttcttccttctggtttgagcgtttgttgactataaaatgccttttttgcatttcctgctccttcttgctgatgatataatagttgcttcttgaaatactattgaaaatcttcagattctctggaaagccatattctgtaacctgttatctgtaaaagttctgagtatagaacatgcagtatgccattagaacacacaataagtttagagatttaattttaagaattttccattgtgtattgaaacacttaaaaagtaaaagccctgggaataatatagtatattaccatctgcgcattttccctcaattctttcctgatggtagctgatgaaattgaaatggtaatttttagaatgttctaatatttgatgtatttaaaatacatcaccttttattggcctgctttatatgggaacaagaaagcctacctagcaaagaaatacaacctagttttatatcttatttattctgtaagtccttgtgcagcagcatgttaatgtggacacacagcttgtagataatttaaaatctagaaagggagaatgagatacatagagaaatagccaccacataaggcagtttatgacgaatacagtgtgttacaaatgacaaaagccacaggaattcagaagagggaaaaataaggactggcttcctaaagaaagtggcaatttttttagaatattgaagctgttactctgaggcatgagtgacacaagccagcagaagccagagatttgaagtcttgctcaagatttgctggtttccacttggggaaagacaccattaggctgggtacatctggagagatgagtgcaagaagccagttaagcaggagagaagtggacttgattgtggaggcactgtgtttcaaactcaaattaggcagctcttgggtgggtggctgataccattgttgtgttttcagctgattaatctggtagcagtgtgctcgtttaggagaaattacaacaggagatcagtcaaagagaatggtcctctggtttgggaatgaaataatcagggcctgtacctggagtggggcaatgatgattaattggaaggaaatgagaaattgagaagacttgacaggacttggttactcattgtccggagtaaaggaaaagcagaaataggtaagttaattatcagtttggggaaggtgattatatagtttagtcttgttgaatttggcctggaataggaaggtatatctcagggcactgcaataacttgtggctgcaacttctgagccccatgtaacctttgaggagtcatggaatctaggagaggtgccacaatactagaagtgagaaatattctgtgtttttttaaagataggaaaaagatagattctacaaaatacaatccagcaaaattgatactgattttaggttattaaaataataagttgtgagcatatagaaaaataactggttaagaagtatgaaaaaatgcccaaatctcactacaataagagaaatgaaaagtaaaatgatagtaaatatttcccccatcatattgaggcaagcaaaaaaaataaaaagttttataatgtcaggtgttggtgagactgttaagaaatggatagtctcgtacaccaactgttgggattataaattggaacagattgagtatctcttatctgaaatgcttaggaccagaactgtgttttggattttgtattttttcagattttggaatatttgtgtatatataatgagacatctttgggataggtcccaagtctaaacacaaaattatttttcatttatgctttatacacatagcctgaaggtaattttatacaatatttatacttctgtgcatgaaacaaagtttgtgttaagtacttaaacgtggaattttccacttgtgacatcatgttggcattcaagaggttttagattttggagcattttggattttggattttcagattagggatgctttgcctttaaagcattttggaggtaatctggaagtatcttttaatattaaaaatacatatgttcagcgactgagacttctcacttctcagagaaatcctggtacaagggcaaaaggaggcatgaataagaaaatttgctgtagcattaattataatggaaaaaatggaaataatctaagttcattagtagagggatggctgaatagactgctatgtatagaatactatgtgacaattaaaaagaatgacatagacctataagaaattatctttaaggcacagtgttgagttgggggaaagccattttttggactgtaggtacggtctggttggttccatttatctgaagtacatgtatatctcatataattcacagaaccaaacctggaagaatatacaacaaactgataatagggactacctctttggaagagactaagattagggtaggtgataagtttgccagatttagcaaataaaaatagtgcttagttaaattttcattcttttgctgtatattcagtgtttattggatggctggattgataaatatagtatgaagcagatttggggcccaaagtgaaaaagcagcagacttatcagcaacacaggttcctggaaatagcggctacatttaaaattttttcatggaaagttattttcaaactcaaatactctaccctcaaccttatctaatttaatctttatcatatcctgtgaagataaatattattttattaaagaggttcaaagagcgaagtaccacatttgatcagttctaagatgcccattttttcacaaatgggcctttgaaaacagaacacattttgaagtcactgttcgcaggcatcagtcctgatccagtggtgattgcctgcccacgtgcctgaaacttgcagagttactcaatggcaggcatgaaaatcctcgaggtcatagtagagttctactgctctgtcatcagtgcccttcatgggacagaagacaaaattgtgtggaaaacacagacatctaacaactctgagtagaaaaggatgtgaaagagcaggactctgaatgtgaagaaattcttggaataccttcatcaaattatttcatttcaaatttaatttttaatgtatgttcaagaatgatagataaaatccaaatgtgaagaagtctgcaagagcccttttaatgggcataattaaaacttctgaatgataagaaattgtgtcatgtcagtttgacagtcatttgtcttttttagtagtacattaagatttagattcgataaaatggacatgttaattagcttgatttaatcattccacaatttatacatttatcaaaacatcacattgcacctcatgaatatatatatagttattatttgtcaattaaaaataaaatacacaaaattacccaaggtcgcccagcgagaaaggtaagagttaggaccataaagcctataccttgagtctcttgcagtgtactatagagtgaaaggaagatgactatacactttttgtcttacttacaaactttccactcttcgtgtttcaagaaattgagaactgtccagggagttggcagtgataaaaatgttacatatttaacattacttggagaaatttggattcttccaaatgctgtaaaataataatgtgtacattcatataatagttttacttttcaaagcagttacacacatgcatattacctgattaatagtgtatgagacaaacatagtatcctcccatttaccaatgagtaaactgatgtaaatggaaattaggtaaagtactactaagaagcagcaacagatcccaaaggaaaactgaggtctctgttatggtttggctgtgtccccacccaaatctcaccttgaattgtagctcctataattcccatgtgttgtgagaaagacccgttgggagttaagtgaatcatgggggcagtttccctcatactgttctagtggtaatgagtaagtctcacgagatctgatgattttataaggggaagcccattttgcttggctttcattatctcttccctgctgccatgtaacatgtgacttttctcctcctttgccttccgccatgattgtgaggcctccccagccatgtggagctgtgagtccattaaacctcttactctttgtaagttacccagtctctgatacgtctttattagcagtgtgagaacagactaatacagtctctgtgccagtccatgaaacatctaatgattagcctgccagggaggtcctgaatagcatacctgtactgaataacttcccagatttggacaaatattggaaagacaataaattttttttttagttgcagaataagagatgtagaataaagtgggtgcactaatctcaagcatacagtttgatgatgttttactagtgtaaccatccagatcaagatacagaacattccagtcttccttatgccttccccagtctataactccctcccccagatgtaatcactacactgacttatttcatataaaaagtatgtgctttttgtgtatagcttcttttactgagcatcttgtctgtgagatgaatttttgttcctctctctgccaaaatgtttcccaagtggatagaccatttgtgtttcaccatcagtgtatgtgactgctctccatctttgtcaactcttgatatagtcagtttaaaccattgtaatgatatcttattgtgcttttaattttcaattcactgatgattaatgaggttaacctttttacaagctactggactttgggtttccccttttgtgaagtgcctgttcacatctttaacccatttttaaatattggattgtgtgtctttttctaatttagttgatggagttctttcttttttgagacagaatttcgctcttgtgtgtctttttctaattgagttgctggagttctttttttattattatttttatttatttttattttatttatttatttttttctttgagacagaatttcgcttttgtcacccaggctggagtgcaatgccatgatcttggctcatggcaacctctgcctccctggttcaagcgattctcctgcctcagcctcttgagtagctgagattacaggcacctgccaccacgcccagctaatttttgtatttttagtagatatggggtttcaccatgttggccaggctggtctcgaactcaaagtagcaggagttctttatatattgtgagtataagtcctttggcagatacatgcagtgcaaaaatctcccaggatgtagggatttgaatgggatccttcccctctctcttcaccgagaaagggcagcaaactaatggtcttatcacttggacctctcttctatctgagcacttaaaaaaatatagagagacaaaatgtttccctactgccttttagcctattttagcaattcataatatggaacacaaacatcccatacttgtacattttaagtctccagtaaaatatttttaactgcgaactctaaatatgttacagataatgaagcctcatagctaggcttttaaatattaaacactttcaatttccagcatgcattttatcttccaaaaaagtacaaaaggggtgtgtgtgtgtgtgtgtatatatatatgtatacattttatacatataaaattttaactggtaaattcagaaaaaaaagagtttacaaactttaaagaagaaaaacaatttgtttagcctaccattgtactactttgtgaatgaagagtctaaggttgtgtgtgtatgtatattttgggatgagtgtaaaaactgtattcctcttagatatatagttaaagtacaaaataaaaacaaactacattcaaatataagtgttaaagaaacaccagatagcactggtgagcctgatacctcttggcaaaccagcaagtgtcatgtctgacactctgagatgaccccaaaatctgtgctaaaaagttgcctgcttacagccttagcagataaaaaccttcagaaaacatttttgaaaggtgctgtgtgctgattctgacaaacataacagaagaacagaagcagagattggaaatattcaaggaaagaaagtacaatttctatttcaaaagaaacttcttacttagggtatttaccttggttattttgcctttaaacttttgattaagcttttcactctcaacctaagcaaagttcaagttgttctgagaggacattattgatttagttttcattctaaaatattttaaacaaactgagtaaatcttaaaaacaacccagtacttatttgtatcattgtttgtctctaaaatggttcattttattgtctgtcagcaccacttctagcttttacttttccaataattttatgctttaaatattaaaagcataaaacttattgagcacctattcttccctagaatctgtcaggaagtggcagttaagaaaaacaaaacaaaacaaaaaaccctgaataacttgtacttactatcttcgagtagctatagtctgttgaggacataaaacagtgctgtttataatttagaaagttatgtgccattacttagaaaactctgaagtactatgccgtctgtttctgtggaatatttttttaatggtccttagaggatttatttcacaaattttaccagagacttactacatttttttattttctaaagactgctggctactaacttaaaaagtagggttgattaaaagaaacattaatatatatgtataattttaactggtaaattcaggagaatccaaaaagtaaaaatcacccataatcctaccattttcaacacctgacagaggtagcaatctttaactgtagctatatctctttccaaacatttttatatatattcagactaaaattgccagatttagcaaataaaataaggacattcagttaaacttgaatttcgaagaaacaacaaatgattttttatttaaatatgtcccacatattgcatgggacacacttaaactaaaaaagtatttgttgtttatcagaaatgcaaatttaccttagtgtcctacgttttatctggccatcctaatgcaaacatagccacacatacataaacctgtacatatatctcttgttttgtcagaatagaatcaagctgtatatatcactctaagccttactcctttctctgtcgatttatctagtttacatgtcagaattacccatgttctttctaattgctgcttgatattatacagagagacacatcatcgtttatttaactattcctctaattgtggatattttagctgtcttcatttttttactctttcaagcaaaacagcactgaatgtctttgtattgactcattgtaaacttgttggttttgtagcctgaattcctagaagttgaattacaaggttgtagcatatttttaaagcagcattgggtcattcctttcatacttagtgcctgaggctggagacttgaggagttgcagaggggccacgtgtacctgggcacgaggtgaggaggagcttaggtttctgatgatatgggccttgtgtgtgttaggcacctttctggcttctcaaattcggtttcccgccttcactgttcgctccatgagacaaggcatccttgttctccagcctgccacacaagttggctcatgatacaaatgtagaatgagtaaatgaatatgaatttattcaaggggttgctgagaaaaataaatgaaataatgtatgcagagtacctgggaaaaaaataatgtatgtaaaatgcctaggatgcttctttatttttctcatcccacccccatttccagttactttcttagcatcaggaggctgtaatctagggagggtgacattacagttagagtaaagtggaataagttctgtgccagaactatgctcagagcattgtgagattatacgaggcgggcacataacctgtgcctgtaaggagaattgcccaggatgtggccaaaagttacttaaagtaagccttgaaagacaagttgaaaggagccagacagacaagatgtgtatgttggaagatgtgtgtatatcgggggataggacaatggagcaagcattccaggaaaagcaaatagcattgcaacagaacagagatataatagagcatgttaccctcagagcatagtaacagggatgtaggaacagctggaaattaatccagagatagttaggaagcagacgttaaagtgctttaggtaacaatctaagttttacctttgtcttatagtgaacagtgggggacttctgcatgactcagatttaccttttaggaatatcacttagggctaggcatggtggctcacacctgtaatcccagtgctgtgggaggccaagacagaagagttacttgagcccaggtgtttagaccagcctgggcaacatagcaagactctgtctctacaaaaataaaaataaaacattagctgagcatagtggcatgtgcctatagtcccagctactcaggaggctgaggaaggagcattgcttgtgcccaggagtttgaagctgcagtgagcttcaccactgcactccatccagcctgggcaacagagtgagatcctgtctcaaaaaaataaataaataaataccacttagtgcagtggagaaaagattaaagatgcaaaaatctaaagacaggagttctttgtgtcggaacaccattgtagtaatccaggcaagagatactgactacttggcaagggccatggagatgggagagaagggcttatttgaaaggtaatgtaggaactataattaccatgatttcgtgacttgttagatatgtgtttgggaggagagaaagaatctaaaatgtctgtcagatttctgaattgatcatttgggtggatggtggtaccattataccagataagaaatacagatggaaggacaggttttggtgggagtaaagaaactgtattattattttggaacagatggagattacagttaccagggactattctaaaaaacatagcaggaagcatgtgtacatttgcacatgcagaagtttgcacatctggagcttgggagagcagccccagctgccttatgactggggatgcctcagaatgtgactaaatgttgaagccacaaatgaatgggagatgaggggtggaggcagaatttaaaatttaagacagtcttgagaagtataattgcaaaggtaattatggaaacacaaacaaatggtgaatgtttttggtagccattatagacaatagcaaagggagcttactagagacccagagaaggcagtaccgaaagcccagatgaagttagagaccatgatgtgcaaccacttcagacttgttatgaacattttctctcagcagtcctaattgtagagatgtgcaaattgttctgagattaggccttagaggaccagtataagaaaaagtggaagccaatttttggtgcctggaaaaagaataataccaaaagctgactgggggttttaggtgggccaggaaaagtttgaaggcaagaggcgcacgtttaagaaaacaactagttcaagacattttagacaggggtatccctaaatcagagtagcactgaatacataaattgtatttgcaatgcaaaaacttggatacctgtactctattatgctgaacactaagagtttcccatctatagggatgcccatgtttccctgggcaattcctattgtaataccaattttttttttttttttcggagatggagttttgcccttgttgcccaggctggagtgcagtggccggtcttggctcactgcaacctccacctccagggttcaagcgagtctcctgcctcagcctccctagtagctgggattacaggcatgcaccaccatgcccagctaattttgtgtttttagtagagacaggattttaccatgttggtcaggctagtctcaaactcctgatctcagatgatctgcctgccatggcctcccaaagtgctgggattacagacgtgagccactgtgctggcctgtgataccaattttaacattagctggataaattcttctttgtaagagtcattagatcgttaacccagttctcagttttgccttggtgggtagctcttcagttccatttggcctgaagatcccccttcctctgcacctccatgcttttcctgactagttgtgaccacccagatcctcttcctccagcagattgaagaagttgttagtgaggagtacatggtcctccttccactggagatacattggctacctctatcataactgacttcagtttaaaaagtcagtccttgcaacaacacaaaataaaaaatgttgaagtcccacctctatggagtccccataagcagctgtgcgtgcaactctacccaaaacagataatatgcacagatgtgtttatgggaaggaggcacaaggactttcagtgtgttgttttcagtttctcaccactacaagggtttcttttctttttcaaggaggtacattgtggtaagcatgttttatgacccataataaaaacccttgtaaagaccattttttgaccaaatgaagctaagtgttcttttcagagtccttgtttgctcctctccccctctctgtattggaatgcacacagttcagcattaatggataacataaggaaataatgtcacaaattctagttcttatttgttaagttgagaaagcaaccagagttaactatgtaagaaagttcatttgtaatgtttttcccgttttggtagtagcttcagaatatatatgttgattaagtaaaatggtatatttcatgcttatagtatccggttattatcctataaaaagcacctaaggacagtttcgggaaatctcaatagtcagagaggcctacagaaaaatctgtccaggtatagggaaaaagcaacttaaaaccattttagcaagttgggtcatttacaaaatgaaacatgtaatacattcaatgaataataacagataatttctaaggacctagactttcaaaattaagaacagaccacataacatttgatttaattaaaacaacagatattttaaggattatattataagttgtgtttgttgatcttaatagagtgttagggaagatagaaggctatccacatactaactggggaaaattcagtggatctgaacttatagtattatcacagcctcatcttcatttagtggcaccagtgctgaacccattacccaaactgggaggtttacacattgtttacccaaactgggaggtttacacattatttttagttcttgtagccaccctacaagaaagtgttgtccccattttacagatgaagaaacgaaggttagatgctagcggagggaagattaaataacaggcccaagatcacacagtgtgcaacctggaaatgtagcggagctctccaaagatgggccattaaaattgaactgtgagaacaaatattaatatatcacatttgtctcttgaattgcttttccccttgctttttgtttcaatattctaatttagaccttctctatcatatgttcagaatagtatcatagcctccttacaccacctcccatccattatgtatgctaaaatgtcaataataacatgccatggttttacacatttttactacttacccactgaatataagataaaacactatagactccctgtgtccaccagcaataaatccctttgcagtgtggtcccatttagcagtgtgccctctttaggaccctgcctgctggagctatagctggtgtacaaacacgtaagcacttcctcctcctctattagtgtcctccatgacagatgcttccccacaccaaaactaataccagccttcctcccagattggcttagatgctgctccctccttggtgcttactcagtgcctagcgctcttgtgccatttgtggtccttggcacatactgacatgaagtatgtaggtacatattcttttctccctgctagagtaagagctccttgggacactctattcaggtgcttccgtgtagcatcacctgacacaatgccttacacatagtagggacttcatagttcttttgaataagtggtagcaatttattatgtgtatgaactttacaataaataaagtgcttaagcataatatcctatgtcatatatataaccataatacacataatcatatataaatatatattacataatctataatatatcttgtttaaatctttttgtggggtcattttctcaaaaatagatgtgaaaagcaaggcccacgaaagttgcaagtgacttgtcttagattatctaacttgcaagtacaaatttggatccaaagcttttagctcaaaacccagtgctctttcttttaaatcatactgccttcaaaaatggaaatttacatctcatgtctaagtgactcacttaggtttatacgtacccaaaagaaacttttttaatacttttatgcctccacttggcaagcagtcagtaaattcttagtgaataaccaataagccacaatgcaggattatggcttttttgctaaagaaagactcaggaatcagtttaatcggtgagaatgttctataactcctgtacacaaaaccaagagcaaaggtcactataattcatcttaatgcatatctatagactattgggtgattcatccaatcaagtaaaaccaaaagatttctatgtataacgtgccttgttcgattcttggagaatataaagatgcattgcattcctgttcctcaaggaatttgcaatctagctggatagcgcttggcagtttaaaaaacaaatcaaatctataatataaaataatcaaatgtctaggttctctccacagttctatgacagaggcagggcaggatttattctggtttttataagtgaaaacctgaggctccaaaaaattgggacttcatagacactggggactactagaggagcggggaagagctgaaaaactacctattggatactgtgctcactacctgggtgatggaatcatttacacccttagacatacaaaggtatgaaatatacctttataacaaacctgcacatatacccccgattctaaaataaaagttgacaaaagtaaaaaatgaaataaaaaatctgtactattacaaaaatgataagaaggaaggtggaacttgcttaatcaactgactagtggctgagttgaacggaacttagtaacactggagtaagagactgtactttgagaaactctgatatgatcatatgaaattaaagtagtattaggggatttggccaatagtccaattctgcatccaagtgaagactcaggcaaagtgatttgatctgtggaatacttctcttagagatgggagaggataaggtacttaagctagtcctaccccaagctgtggaacaatgtgctgaaatccatgtctcttgacccctgggcaagttgcttctgaaagagatggtaagataggaagcatccttcattgtttttgttcagtgtgtcagtgttcattatagtcatgggagttttatatttctaaaataatgagcccaaagtctcaacacatatgaacatgttttaatggctaaaaggtacgaatactgatttatatgccatgcctcttttgtccctatcccgtaatccaaacctgctctttctgattcccctggagttttatcgcattcctcctaaaaggagtcagtgagttctttttaagctaatggccttcatagatttcatggtcatttttagttttgtttgggccctcacttctttatgaaaactcattgagcatttattgacacccattagtacaatgtggtgggaggccaataaatctagaggaagagcaatttaagcaggaccctgccaggagttggggccatggggcagtaaatgagtaaagatggcagaaatccacagagtaccaggaggcagggccagagagctaggtgggctttggctgagggggctgaagcaggagaattatctgataggatcaggtttacacttttaagggttcagtctagacagagagtacaagatggatttgaggactgagatcagtggggaaaggctaggtaatggtatatgtgaggaaggagaaggcggaccagacccgctatagtgggagcctcagaggtgtaggaattgtatttaaaaagacacgactttactgaggagcccagaacaagacttgagtaaatgaagaaaaggaaagactcaatattgtaaaggtatctgttatccccaaatcaatttatcaatttttaaaaatcattgaaaatactaaaaggatttttggaaggtgtgggcactcaataaaatgattctgaagtcagttcataatcataacatataagaatatccaagaatgccagacacgatggtgcacacctgtagtcccagctacttggcaggctgaggtgggaaaataacttgaggccaggaatttgaggccaacctgggtaacatagaccagcctctaaaaataaataaatacatatttttattttcaaaaaatattcaggaatgttttataaagagtggaaagagaaaactttccctgcagatgttaaaatttactctaaatatttaataattaaaggagagaggtactctaaacagagccagaaacaaagagcaaaagtccagaaaataacttcaagtaatttagaacatgagaaatagtggcatttaaaattggtgggtaatttaatgactgcttaaacccttttgctaatcatagaatataaataaaaatagaaaaatatagaaccattaaaaattaagctgtagatctacattgccaatagatctacatgcaaatgagttcagtatacagcatgatgtgaaaaagacagttacaaaattgtatgcattcgcattccatttagaaaacagagactaaccatctgcatgagtattatgtagatggcaaaaatgggatgaggttaaagaagtcaaagttctgaagctaatattagctgggcatcctagtgatgttggagtcctgcaggaagacgttgagtgtggggtaaacaggatgagccatggttcctggggaatatagagagttgacagtaaatgatagtgatggcaaaggcgatattataaacattaatggaaggaggtacacacctcaaagagaaaaggataaccacctgaaagggatgattgccaacaggaaaagaatgttggtacaggccccattgggtctgtacctcaccctggggtgaatcatggtggctataaatgaaagataatgttcataacatatttaagttaatataattttaattaagttagatttgttagaataattttcagctgcaaattacagaacactcaatgaaaagtggatccagataagggcattattatatacataactacaaggctggaggcagacagccctaaagttgatgcagctattcattgatgtcatcaaagacccagactctttccctgtttacactctggccttttatgtgtacagatgatgtttcaagatggttgctacagctcggtagcattcagtataagacgtgggtgaggaatgggagatgaggaagtacagcagagagcattctactgtgcacctcttatcaaggaggaaaatgcttcctgaaactctctagccaatttgcccatacaggactgggtgtcatgttcatccctggatcaattcctagcaaaaggaaatgtgattgccttcattggcctggaccaggtcttcatggctgacaaccagcagtatcttctatatcacacaaataattatctgttctactcttgtggaaaaccagctcctctaagcattacctcatttgaagaggaaggaagtacagagtgaggggaaaattctcaaaagagggaattgagaggaagaatgtggaaagataagaaagtattttgtccaattgcagccattagaaagcttattaaaatttcttcttctgtttttgagagctgtcgcccaggctggggtgcagtggtgcaatcacggctcactgcagcctcaacctcccaggctcaagtgatcttcccacctaggcctcccgagtagctgggtccacaggcatgagccaccatgcccaactaattttttgttttttgtagagacagggtctccctgtgttgtccaggctggtctcaaactcctggtctcaagtgatcctcccacctcagccacccaaagtgctaggattacaggtgtgggccaccacacctggcctaaaatttcattatagaaaagtgtgtgttgaaatggggaaatattcacagcacattgtaaaatgtttttaaaagcctcacaaaacaatgtgtatagaatgatagccacttgggtcattacccaacaacctaggaacttgggcttcatgttttcttacttctttacccagtgctgatttttatctcctgctctgaagaaattatgtttagcattgcatatttgcagtttcagttcctgatgattttccacagtgggttaaaaatagccattatgatgaggtaatgatttattctttcatgttgttcatttaagtcattacattgttcctcaaacaccaacattttcaggcttggtggaaatgacttattatcttttttttttttatttccagttagttgagactgattctttaccttctcagcattatcatcacttccaggaatgaataaaaagtgggttctgttctcatttcagaatacatatttgattattaaaatttacatgcaatgccactttattacacttttatccagttgcctagaagcagtaaaaattagaagccagtgtttccatttagggcccatgcctttgtttctcctgaggggcctcgaggtgatgtgtgcctgactcatcatgcacagtggcaaagagacgggtactatggcattgctggactatgctttgctgtggaacaaagctcatgtgtgactcttttagcttgccagttaatggcttgctttgaattcacccattacaactttccaggtgatatggaagttttaaggaatcctcttgaaccctcctcttggtttctcagaatttgtttgtcttgttctttgtgattttggatgaagcattctttgggtcctcctgaggaccacagtgagaagtaggggagacctgtttataaacagcctttgaagctcattgttcattgctcattgcaaattgatcaatgaaagcacacgggaaccctgtcaggttttgaaatagagtagaagctgtatacatacagcaagcttgatgtggggacctgcagtgtagattctcccagaatgcagacaaaagtgggtggaatctccaaggagtgaatcaagccacttggctaacgctttaggaccttaacacgatgctgttagtcactatttcattgcttaggtagcaacaatataccacattttatgggagaaccatggttttaaaacattctgggaatagatccagcaattccacttctgagtatatatccaaaaaaattgaaagcagagtcacaaagagatcattctacacctgtgttcatagcagcaatattcacagcagccaaaaagtggaaactactgaggtgcccatctatggatcaccagataaacaaaatgtcatatatacatacaatggaatattatttaaccttaaagaggaaggaaattatgatacacaccacaacatgaatgaaccttaaaggaactatgttaactgaggcgagccactcacaaaaagacaaatccagtgtgattccacatgtatgaggtatgtagagttgtcagattcatagaaacagaaaatagaatggtggctgtcaaggactgaggggaggggtacatggggagacatgcgagagaagttatatgcaggctcaggtgacctttccctctgttgctataatcgtaaccctcaccttaattcaacatgttcttattggtttagtgttaaaaaacctttgttatatgtgatacattttagtctgtggcctcctctaacacacttcataggaaacagacaaaccactatggagagagttctgtgaaaacttgaataacaaatttgaaaagactgaggtttacagagtataaggagaaaaatagattatctttgcctacaagttggatatgtcctgtttttaatttttaaataaactgaggattatacatttttggtgctaaaactttgaggatgtgaatatatcacaagatatatccctatatccagaattgtctatttaaagttgtcattctgtgacttatgatatgacttgggtgtttttagtgtcttttggaaataatcatactttcttgtaatgagaaaataaggcccaggccaggtgcagtggctcacacctgtaattgcagcactttgggaggccaaggcggaaggattcatggctcgaggccaggaattcaagaccagcctgggcaacatagcaagaccctgtctctacaaaaagtttaaaaagtagccaggcatggtaacacacacctgtagtcccagctactcaggagtattgtttgaacctaggaattagaggttgcagtgagctatgatatgatggcaccactgcactccagcctgggtggcagagcaagaccctgcctctaaaaagaaaagaaaaagaaaagaaggccccatgatcaaccttttcccattagaaaagcctgaagtcgttttttagtttgcttgtttgtcttgattttaaataagaggattagagctctggaacacctaagagaaacaattacaagacttcaaggatttcttgtattcagaaaggtccagagtctttttaggggcattgccaagataaagccccacctaagatctctcggagccagacttcattccacaatggtgtcctgttgaaacatgcttgcgagtcgcatgttttaaaaagatagagtgagggtcccaagtgactgtttatcataagtatgactaaatgttcaaactttttataccagactgtgccgtataacataaaaagggaaacttttaaacctgcgtttaactgaaagagccttaattggtggtatctgtagtttcattgcattgcatcactagggttactgtgaaatatttgagtcatatatggtacagaataatttagattaaaatcttgagctaatttaagagtatgcctcacgatactataaactgagatagaacagatcataagcttacgtagagagtcctttgaaatgtctttgatgaaaacacttcttgtgattctgtaggaaaggtgtttttttcttacctcatttaatgttgtaatttatttatttatataatcctctggaattgggactatatcttatgattatttgggaccagagttcctgacgtagctgaatgtacttcacctttgaaattaggtattgcaataaaggttggctaaagactgagaggggttccccagtcatgcttattacaggttcacaatgcccaacaacctaactcgtggttgaattactgaaggtcatgagatgttgggcaagattttgttttttaagtcgttaactcagtgttcattggttcagaattccaattgtgtctagatattggagatttaaaagaaaagccatttgctaaacaaaaaaaaaatttaagtagcctaataaaatctaaagaatggtcattcttatgtagaaccaacttacatctataggcatcatacacatggaatcaacgttagtgcagtcatgtggattcatactgcctaacccatgctttggtatgatattaacaagcccttttaatctactctacctttaaacaaacaagaactagacctgtagtataagtgccaaagtaacacaactaaaactgaataataataattatggcatgtcccagggtgaaaaaccatgcagccattaaaaatctcattgtataaaaaaagtcatattgcagaattttattagtggcaaaatgttgataatgaattgttacatgtttttaaaagagctacaaaataatgtgtacagaataataaccacttttacttaaatatacttatacatccaaatataataaaatacgtaatttttaaaagacagactaaaaagacacaaaaaaagttatattaacagtgaagttttctctgttctccaagtagtggaattttttagtgatttttcttcttctctggattcttaaaacattttattagtttctgcattaagcatgcatctatacatcttagcaattttataattaagaaaaacatagtgtgtgttataacacaaataaaaacgatgtgcatgtttttaaatttgtatactgctaattggctgctaaagttgtttgaacactgcagcatgaaccaaacagatttattctttatactgttttaaatgagtgacacttaactgtatagaggctaaagatgatgagccaacaggacattactttaggttagtcatgctttttaaaattcagtgcttacaagttgtgtgcatgtgtttccaataaagacttatttgccaaaatgttccttgaacattttgtgctacattttcacactcctgtttattcattacaacttattggacctgcagtgcttctcaagtcttgaagggcttttcctccccaatgcagtcttctccagggttttgggaagcttagaaggtcacccctgccagttcagaatattcactcagggggatctcagaaatgattctagatcactgcataccccctctaagtgctttgttcacaccgaccttgtagcagtggtcatgttttcttttagttgtttgtgaatcagtctcccccagaaatcaggacacttatcttggcaataatcatcctaataattactgtttgtcaagtgcttaccatatgccagaaactgtacaagcacttggcatacattacttcatttagcccccttaatagtaggaaaagtaatcgctactttctccactttataaaaggaaaaactaaggctttggttttgaacaagctaaaatataaagacagaactccgaactctaaaggaagaaccaaaaccataaaccagtaaccaaatatactgttctcgatgagaggattcagtggtccggccaatgataagtgtatcctcacagccccttccagctctgaaatccatggtggtacccagtcatttttctaacccttgtattaacaaaacagctccatcctcccttgtatacaccattcttataatatttgggtcaggggagtaggtcactcttaatttccacacatttcagaggattatgacatcatggccaatgtcttagttcctaccttcagacactgtccctgagtattaaatcttgtgtatatttgtattggtcctaaaattagaaaaagatctgatattggtttatatcctgaatgatccgctcctccatactggttaataataacagtaataagcgctgccatttactgaatattaactatggtgctaagtgctttacaatgatcctatgataaagtgggctttgttactgtcccattttacagacagggaaactaagccttagagaggttaaatggcttgccttattttacgtattcatttgttcattgatttgataaaggaatacattggagatttgaatcgaggttttccagaccctagtttaaatcaagactctgttaatattctaaaacagttgattaagactgggcatggtggctcacacctgtaatcccagcactttgggaggctgaggcaggagaatagcttgagcccaagagtttgagaccagcctgggcaacatagtgagatcgcatctctgcaaaaactaaaaacattagcctagcatggtggcatgcacctgtggtcccagctacttgggaggctgaggcaggaggatctcttgagccaaggaagtcaagtctgcagggagccgtgatcacagcactgcactccagcctgggcaacagagcaagatcctgtttaaaaaaaaacaaacagttaatcagcactctcttgctagtatgactttgggctaattagtagcctacatctgtgtatcagtttcttgacctgtaaaatggtgtaatgatattatttacctaaatgttgtggtgtggattaaattatttactaagtggacaatgcttagaatagtgcttgatatatagtgagtgtttagtactaggtgctataaaataataatcaccattaataacaatattattattcactggattttaattgttgaaatggcacattaaacaatagagaagcaaaaagtgtcccctcacgacctcctccttcctctccccagcatgagccactgaaaccagtttggcagatatccttccagaatgtttcctattccatcaaaaactattttaaaattgtcctttcattaataaaatacaggttgagagtgaaattttttgcagtgttcttgaaagtgtgggagtggaaaggcaggaagggagacaattcactcattcagccaatacctgtcaaatgcctgccgcatgccaagcagccacaaaatgctaaggattcggcgtccagcatagcaaatgctcaacttccgttttgagtgtttactgattttctttttttaattttattaggatatgatgtttcagcttctccgaggtctggactttcttcattcacaccgagtagtgcatcgcgatctaaaaccacagaacattctggtgaccagcagcggacaaataaaactcgctgacttcggccttgcccgcatctatagtttccagatggctctaacctcagtggtgagtgagagagtgctgtccttttattaaacttatttttcctattttgaatgacagtctgtccctcttccatgtctctaatgttagtactgcccatgactagttggtggatagaatgtctttgcccatttttatatggcagtgggtaggcagaaagcattctgcttacagctacagtcacatccagcctgggcttgttgtggacaggatccattgcagaaatagcctgttgcatcttagccactggacaggaatcagttacaagtttccaaatgctttctgccataaccactgttttcagagctgtatgtacaatgcctagggaacacacagctcaaggtcagggaagaaagagcacgagcaacgttgacctgtctgcagcatcatggttttgagaaacagagtgcctacacaggtttgttaatgcactcatctgaagctatggtgccagctgtaaagaagaaatcaaattcacagtgaacttggatgatgcatgaacgtagagcaccgccatgccaggtgaaggctcatataaccctgaatagaaagagcgaacccaacggccctgttttggcaaaaaataacagttatgataccctgtttctttttgccattcagctgcaaaaccataatagctattgacattggttagcttctatttctccatatagttcattatttctcagatggatttttgtgaaattctgcaccccaaatacaaaaagagcagcctggaaataggtattaatacccttctctttgaaagacctgttttgcatacagtaaattcatgccttacgtacagtaaattaaataaataatatatagcaaattaagtcttaagaaaaagaattttaaaaaagaaaatatctttgtatattcaaagaaataaaaaaaaataatccgtattgtccatctttagcctcaaagtggttctcacatcagggacagcatggccctgttgttaagtaatgattggcaacatctttggtcattctgcacagcaaaaaattgtttccctaaatttcagtaatactacagctgataagtagaaattcaagagaggagttagaaattctctgagacagataacttgccttaggaaaaaatccaatttataaaagtgttccccaccccctgcccccagtcaaaataggggtgctaccacctagacacgtaagaccagttactttccaaacattatagacttttcctagggcatcagaacttttgatgcagaggattccttggaaaatgttgccattgttagaagataaatcctactcatttcctctttgcccagcatacaccattgctttagaggagaaatggcacgagttgatgtttaaaagataggcctcagctttgagcacggtcaagcaagcccttgtattcttatgtaatcacaccagaaagggctgagtctgtgtatttccccagtgggaagggtgaggtaggctttgagtttccctaggaagttgttgcgcatgttgttttggggccctggggagaagcttgaataggctttgtgatccagagagtcatcaggggagtagatggaaggaacttgtctccttgggtacgttaattgaaggaaggataagctgtaactgagatggacgcttttattttaatccccccaaatgggcactaataaccataaataaaaacaggaaacccagttggtttgtgtttgattttttttttttttttttgcttattaaatttgagcttgtgcgtaacatcaattaacattccattcttgctgaaagttgatatgttcaaacaggaaaatgtagacaaattatttcatagaggaaaaggagaaaggcagtcataaatacacaatttttcagtatctagtttatactgcatgctttatatttcctatagtgacataagtaaaacatgttagcagctgagaaggattctaaaacaaaaatcagactttattggaaagagtgacggttggaatttaatggtaataataaagggtatgttcctacagggtactgcattttaaaatttccccactcttttgtatttttctatttaaaggaaatacccatttaatatagtaatgcgtcgatttatatacacatggtgacataaaaacttggaatcatagttttttagactgaactggtatgtatttttagtgtctcttgaagagaaaaagactacactcctcttcctggaaatacacattttttagtgggttatgtcatacaggaactgagaatcaacttaatttgtggaatgttaaaggaattacaagttaactgattcaaaactgacatcttaaaactatgagaaatgctagtattttacttaccttgcaaagcctgactccagaggtaccctttctagtatccccttcagaaattaatttctttttcctctctgtttccagagtaatattttgggtttttttgtttgtttttgtttttgagacagagtttcactctgttgcccaggctggagggcagtggccctatctcagctcactgcaacctctgccctccgagttcaagcgattctcgtgtctcagcctcccaagtagctgggattacaggccaccccaggctaatttttgtatttttagtagaggcagggttttgccatgttggccaggctggttttgaactcctgacctcaagtaatccgtcctcctcagcctcccaaagtgctgggattacaggcataagccactgtgcccagcctataatactgttttctgtcttgtttttagttatttgggaattttatttatcaggccataagttcctcgaaggcagatgctcatcttattcagccctaacacacagtgccttgtttattttgataggcactcaggaaatatttttcagtgaataaattgacaaatgctgacttgcagatataagcagttgagtcataacaggaatagagaaggagctatgttatacatttaatggtctcatttgatgtgtgtcaatattcctcatagctacctggtaatattaagctgaaggacttactccatataccttaaaatggctgagtccattttgcaccctagtcctgattgatttattggcagcacatatctgtgttcaaaatcatgaaagctattaatacatgctgtagctcaatctcaagttaggagtgaaaagttgacgcaaacccaagttcacagtctgtgtattgtttttatcataatcctttctactgcctcaggaacaaattacatatatgaattgaacttcctgtcctgaacagaaagctgtagagatagaggaatgtagcattattgtaattttacttatttgaagactttctttagccccttgtgttttgttattaaagcaagttttagaagaggagtcatattcttctaagataattaacatcctctaaatgaaagaatgggtgaattactagacaacttttactatctatgttaatatatatatatttacataataaatgatatttctatttgaacaattataaaagcttgtattattagcttctttctgaaaacttcaaaatgttcttacatatagaactttgagggagcagttaacagtatttattttcattttaagttcatgatcacctgacagatcctgaagtactacttctccttaatttctgagccagtatgctctatgccagtattcaagacaaggcatcttttggattaattgagaaattagttgttctagacaggtaagctttccaggcatcttaaggtataaccctttatattatgatctttattattttatttttctagtgaaaacaagtttcttgttaagaaacacgagtttcataagtagaatatacttcatatgttggcctttggtagaaattaatttaggacagtagcctggaccatagttgtagctgtaggtggtatgcaacatcgggctgaatgacttatcttgtcctcatctgataaattgaggactaatcaaagagttaaatgtcttttgcctaactttgccaggctgcctccaacatgacattctggtgtctttatggggtattgggttcttgctgctcaatatagtgtcttgtatgcacatgtacccatacagagtattatacctttttctttaaaggttgtagaattaagatgtggatggtaacagtgtttgccttggtcctaggcaagaggggcccctgacctggatctcatgctttagagaagcctacactggccctactccagccttgtctcccttcatggagcacacaacccagggtgccaaggaagcatgtctcttgagacctccacccctgccccataccgcacacaggacattgcaattccctgactaaatgggaagggcatgggctcatccttcctcctaatagggattttgccacttgtgtgttcactcctaagcctaggggcagctgtttgcagcatatgggcagagcttggacttgcagactggagtgtccgtaagcatgtgtatgaggccccttgtggttcaaagaaggagttggaaatgtgaagagaagtggggcctgttatatttaacacctggcatgggttatttttatcagaaaagtttctctgaaaccatgaaaaattaacttctctgacctctattgaactattacatttgttctcattggaaaaccaatgagaacaggttacagggaagttctttccattgtacatagctgataggtaaaaatcatgacatgtgaagttatataatgtctctggcaaaagtgtttcaagaatatacacctgttcggtacaatgactgttgtgactagctgaaactatatttagagtcactctgaagtcaacatttctaagtccttctcatgtgaaatgtagtgcatggtgcaacttatttttgtgaagataagggaaaaagagaccagccactcagccagcaatttcagtcctacctcactgtgcacccgggtctgacatgtcttagagcagagccaggaacatcatcagcagccctggtgagggctctgacagtcatgaagcactgtgaccagcaagctcaggaagggagcagtcttgtcttcccatttatgatgcaaaatctttaattttttttctaaacctaatcatacagcttggagggtgatattgttgccattggatttggtgctcttggaactctttatcaaccatttcattttgaaaagtggggaaactgccattcaaacaggcagtgtgaccagcttaagtctgaatttaccaaatagattgtaaatggcttggagaattctaatgtttatattctggctctggcccactatccccactcctcttttctccataccaaaaattcagtacccaagagggtatcaaactgtgttctgtggaactctcagattctacaaagggtatttagaggttccacaaatgtttaggagtccatttttaaagaatattttttaagtcttgttaaaataataaaaccaaaaacagacaactagctcatgccacattttgacacagtgaggaacactgggtcatgaactggtgcctcctggttttctttttttatgtagacctcaataaaacttttgccacattgtgcacctgaatgtcttataaaagtatcattgcttaggaaaaatgaagcattctcttgattcagtcctatctgtgtcctctcccttaaaatcacccaagtccataattgcaacagcacattcattgtgctgctctcagtgtacatgggaatactgtaaggaccacccaaggcaatgccagtattgatgtttttataccacaggtgattgccaacacccaggcagttagagccagccactccccaggacagccatcataaagccatccgtgggtagagagaagtgtaccctaaaatgaggtcattctttttggtacctcagtatctttgtatttttggggcctttatacaatcatttaatgctattcatgaagttagcatttttccttcaaatgcctgtgccaaacacacctgtatagtttagagaaacattcctctttgtaccataatggaagagtgggagtatgttcccatctttttagtgacttaataaaattctcactaagtgaattatattctctttctccaagaatctttttttccatattaccttcactaataaaagatatacatgttctgaaaacaccctttattccatagaaattacaaaaagacaacaagtaaatgttaaacatgagaagacttttattcgacagctgtacaaagtacaaaacttaattttggaaatttttttttaaatctgtaactgataagattcccaatattgctttatttgagatcattaacttatttaataccagaagtattacaaaaattgccagggaaagcatcaggaagaatagctaatgaatactggacttgatacccaggtgatgggatggtctgtgtagctgaccaccatggcacacgtttacctatgtaacaaacctgtacatcctgcacatgtaccctggaacttaaagttgaagaaaaaaaaattacttacatccccttcctgtgcctctgatgatattccttccttactctgacctcagtgttgatagcatttagtaacactaacggaacctcgtggattcagaaactttgataagcctaggggagaaaatcaatgaaatggagttgtggctttcagtcaacaaataattactgatcactttctatgtgcagacgctgtcagtgaagctgagggatgatggtgaatggaaatggacaaggtcagagagcttacaagcgagatggagagatagatctgaatcagatagtcacacaaagaaatgtctagttagaaacagagataaatgcaataaaggaaagggatatggttttatgaggccatatgataaggctcaagaacctgcctaggctaagggccagggaagccctccctccttacccaggtcaaaatgtgggatgcttaaagaggtcaccagcatcctcctgttgaacgcgcctggatgtgggccctgtgaatgtgcgcgtcatgcaattcgtgcttggggtgtgtgtgtgtgtttggaataactcattccacggcacccagttggcaccaccaagtgacaaagtgaagcaggaccagagatcggagaacaatgtcatcttttacaggagaaaataaattgtttatgcttgtttcctcttcgtgcgtgttgtatttactatggagacctggcagggtttgtgcctcggcttgggcagccgagtagctcccacagaagcctccaaaagctgccagtgcatactgaataaatcaaaccaagaacattacatgagtataatggaaaaaacccaaagccccgtcgcctcggcacctcagcgaaagtgcaggacacacctctgaagcaggaagggctcctgtgactccttcccctctcaacatcttgccatgacacaaccaggtctgttttgttaaaacatccagttgccagtacatatttcatagttaacaatggagggtttgtgccggtttcgttttcactttcaccagtgagggaagtggaacacaatgggggcagtgcacagagctgggaacaggacacgttttctttaggattcccagggctgggtacatggaaaatgccagagccaaaacaaacatgaaaacccatccagattctccactgcgcgttctcagtggtaataaaacacatttgagttaccatctgataggttagctctgcctccacggtgaaggcaaatatcgatgaccactgtgagaatttctgccatgtagaaagagaatgtattccatactgcacagaaagctgctgttggtgcatgtgcatgcatgtggctatctaattgcaccaagtggatttgcgaagtgaatcaaatgactgattcccttgtttataaaagatagtcattcatttgactcacctaattctagctccttcataagtggtcactgttgcgaattagttctggacaaaaacagttcaactgtaatgctactgcctggaggatgttttactcggagaaagagccagaagttccttgcttttttcctacatttgttcagccagcatctatcagggtatgatacagagaatctggttgtctgtctttctttctttctttttcttttctttctttctttttcttttcttttctttcttttctttctttctttctttttctttctttcttctttcctttcccttcctttcttccttccctccctccctcccttccttccttccttcctttttcctttcctttccccttctccttcccctttccctttcctttcccctttcctttccttgaccaggtcttgctgtgtcgtccaggctagagtgcaatggcacagtcatagcttagtgcaggctccaactcctgggctcaagccatcctcctgcctcagcctcccaagtagtaggactacaggttcacaccaccacgcccagctacgttctttttttttttaagagatgggggtctcattatgttgcccaggctgatctcaaattcctcaagcaatcctcttgtctcagcctcccaaagtgctgagattacagacatgagctaccatgcctgggcctgtttttcatacggacaccctatatgatgccattcaaaatctcaaaagcctgaggccaaactggatataaagactaagcattgtcttaagattaatgagaccatatgcttcagaaagtttttcaagtaaagggcttctcagggatccagaagatgaaaaaacattttgcctcctacatttaacatttttgggaatatgcctctgtgctagtttaggggcttctctgaagagttctatttaatgagataattccatctcccctaaatttgcttaactcaacgcaagtgttatattcatactcataggagtatgagacatggtccttggaattgaatataaagcaacatttcaataatttggatttttgtgtcctctttaattctttggacacgtgagctgcttgtattttagagctgtcactgcttccttttaaggaaaggagaggtggcaatattttgcttaggctttgataatatcatagtgtaagtttctgagtcaagataatgtttctcaaattctgtaacattggccatatccatttttattcactcagtccaaataatgtattttagcatttcctacagtgccttccttgcacgaggtgggcacttgagtacatggtgaatgaatgaatgaatccttacgattctccagtgcctagagaatgaactgtaactctacagcatggcatacaaagttttttgaagctcagctccaacctacctttctgtctttccatcgcttctacccaaagtggtaagcacataacataagcacatattctttatcagtttttcactattctttgaacttaattgctttcacaactccctgcttttacaaatgaatcaatgaatggatttcctactctgcattctccatgttgctgcttgtgtcattgcatcatcaattataagcatccaaaaaaatttttttaatttgttttagacacaactttcaactaatcttcccaattgcctgcgtcactccttgataataacttgagctctgagggagtaacatttacactttgaatgtgtgtctgggcagccattcataaccttcagataattattgtgcttcatccctctttatttgagatcacaaaccttgccagatctcctgacttgtgcacttagatgttctgtatgttatgcttttattttaaagctaagatcccttgggatctttggagaaaccatagtgtcccaagaaggggttgaaaatctctgcattgcagtttcccttagtcattttatctagtccatttgggtccttgagaagattaaatttatgatcctgttatctgtgtaggtctctccaaaagttgagctcagacttttatacaattactttgtagtgccggattttctgatgcatttattgactttattgctaatcttcccaatgcatttctaaatgatagtctttggctgctgaaccattcctcttattgctcctgctttctgctttccccctctctagggattgaaacccagggtgagtgacattgttgcacccagcatctatctacaaggatactgatgatttttaaatccttcataaatttgaatgttgaactttactgttggctgtggaggaataatctaccttcaaatctcagggaaacatccaaaagagaaaaggggaaagcgtaggagaatttactttagcgctgctcatatatttattttgaaggctggcagaatctaaaaatggggctgtaaatttaacagctcaaccataaaaaccccaaaataagggagaaaaagctctactacttcaggtttggatactgatataaagttacaagattcattttcctcttctgtcttaaattctttttaaaaaatttctagcactgtccttccctttcttttttcccatttcgatttttaataattacttttttaaatgttaccaatgctttgaaatgtacggaagtgttttataaatacatggctggcatatttcagttgatagatttcatggtgacgttaaatactatctgcaccttatgtaacgctggatgatttcagtgaggtagggactgcacatggtatcagttcttgtgggaaaatatgcttcagtggcttactggcactggttttggaatgtggcatttaaaagtacctttttacagtgggaaagaattctgtcaagaataaacagtctgaccttgttaaatgggccaaagtctgtctgtaacctagttccagaaaactagcttttactagtttagaaaaagcagattagaaaaagaaaaaaaaaaactgtaaaacttttataaagtaaagcatttaaaagctactatcaagaatgtgaaataaattcctaaaatgatggtcttcacatatattcatgagaatgtccttacctgtctataaaatcccatttttgcagaatggatgaaagatcaagactacagttagtcagaaaaggagattttctttttcctggaaagacaagactggcatgtagaagggagctgtgggaacagccatacaacatggaccactgtgggaaacaagcccgtttggggaggtgaaggagtaaaaattcccagtgactccccattgcccacacactcaagtctgtatactctgagctccggaatgcagcagtcaactgttcctaacctttctctccattcttgctttcccacccacaccaaacccatctccacacaccctatgatcttgctatccagacctttttgctccttcttgaaaaatcatgccattagattttatgcttccgtgtcactaaacattctctctgcttagattgcctttcccattcccagcctaacaatctcctactcattcttcaagactcagatgccatctctgaagtctgcccaactccccaggataaagttaagtacctaccctcccgtgcacttttgatttgcctgtaatatagtagttctcatatggtagtatccccatttgtttgacttctgtcttctatttttaaaagattaacattgcaaaatagccatttcagcacttcaggtaacaacacacaggcacatggtagctgctcagtgagtgtttatagagtatatgtgggtggtaaaataggaggtttctgagtagaggaggtagaggaggactgaggttgggaagggatgctgttctttaaatattgacttccctgaaaggtgccattgtggtttgtatctgcatccatcttgaaatttaaacaccaagaattaaacttattttgttagtcactttcattgctaaaatcttgtgtttatatttagaagatattctggaaaaccaaagttactgcattttacacaaatgcatgactagtcagctggttggatattgtcaagagtgcacaagatctcagtgatactagttctttttttttttttttttttttactttttttaaattttgaggacttaaaacaaattgacttggtatttaaagttatatttcttcagctttcagtacagagcaacagagtaaatggaagcttaatcagtgatactcattctaatcataaccacttttaatgttaaatgactaatttatcaatattaatttaagtcagggaacatttttaatggagttgtaatagaaaccaaatcttgggttcaaaaaaccaatatagctttaataaaactgcataaatgttttaaaaatcaaatatgtaaaatcaagtaatttgcatatgggctttggcaaagtttttcaaaagctgcctatgcatttaaaatatgatttactagattaagatgcattttaaaagactttacaggtttatgtatattatgtaaaactacttatactgtctggccactgtagtttttacttgatatacattcaaaaatattgtattaggaaaagccacagatagcccattgtgaattgtaaagtgttaatgtcaaccgggcgcagtggctcacacctgtaatcctagcactttgggaggctgaagcaggcagatcatgaggtcaggagttcgagagcagcctggccaatatggtgaaaccccgtctctactgaaaaaatacaaaaattagccaggtgtggtggcgcattcctgtagtcccagctacaggctggggcaggagaatcgcttgaacccaggaggcggaggttgcagtgagccaagatcactccagcctgggcaacagagtgagactccatctcaaataaataaatacatacatacatacatacatacatacatacatacatacatacataggattaatgtctaaagaagagagaaactcacatgttcttatacccaaactgtccactgtcatgccttttattggcaagtagatgttaaaaatgtagcacaatatttaagattttgacaagattgaatagtccatttaaagtaagaaaagctttcaagagtgacctcagcaattttacacaagttgaaataaaatcttgtctttatcttttctttgtatttattgttctatctttatttctataacgacttcttggttttaggatgtggggctgaaaaactgcatttaaaggtcatgttgctgctactatatgcacagtacaatttgtattttccatcagcttatcatttgtaatttttgtactcctgtttttaaaggcatcaaattttttcaatagtcgattgtagttctcaagtattgttagtcccataatattttagaaaaataagatattcatcaattgctttatttttaattcacatgcatttactcagtaattttgtttttagaaatttggtcttagtagacaattttttagagagaaatagccccatttataagatagagttcaccaaatccagtggcattttttgcaggttcttccacattccctttgtagcatttgtatatgcgagtccccgctcccttaaactctcatggttctttttttttttttgggacggagtcttgctctttcacccagaccagactgcagtggcgctctctcggctcactgcaagctctgcctcccgggttcacagcattctcctgcctcagcctcctgagtaggaggctaattttttgtatttttagtagagacaagggttcaccgtgttagccaagatggtctcgatctcctgacctcgtgatctgcccgcctcagcctcccaaagtgtcacggttccttcttcagtttttttgtctgcattctttgttcattgctaaaattattttaaaatttgaacattccaccagtgtggtggttaacgcatgtaattccaccactttgggaggctgaggcgggcagattgcttgcacccaggagtttgagaccaacctgggcaacatgataaaaccttgtctctacaaaaaataaaaaaattagccaggcatggtggtatgtgcctgtagtcccagctacttgggaggctgaggtgggaagatcgcttgagcccaggaggtagaggttgcagtgagctgagagatcatgccactgcactccagcctgggtgacagatagacactctatcttaaaaaaaaaaaaaaaaaaaaaaaaaaaaaaatttgaccattccaggtaggtaaaaaaatgaaaagggaaaatcctcaatgatccttccttccagaaaaaaagccactattaacagtttgttaaatgaacttttatattttttgctacttgtatacaaccctcagtatgggtgtgcatgagggtggatgtggatgtgcctataatagtatacatacaggttttctgtttgtttgggatttcttgtttacttgtttccatttatttatcctaggcattttgtccatatctaacatatattagcctgttattctttttcttactttcactgtgtaaatttacataatatttttacccagtctcccaggatgaacacttgggtggtttctcattttttggctgcagtgaacatctttgggcttatgtttttttcactgaaatactaatttcttttaggataattatttaagaaatggtactaccaggacaaaggacaaagaatgcacattcaaaaatttgataatgccaaattgttctccaaaagggtttcagctcctactcctgcactccttaactgaatgtgagagagctcactgctttgtctctcctgagtgcctctggccattgcctttgctggcgctttctgctcttcctgtcctctaataaagcatccagcatgttctgacttcagccctttctgtgtctgactcaggtccatggctgtaactttcatctccgtgcagaggtgtccaagtcatccgtctgcccgggtctcctctgagtatcagccctcatctctgcttttccccacctctccatctggtgttccatggcagtagaaacagatcataacaaaaagatcactcatcagcttctcctttcctaggcaattctgctttggtctcctttgtttaacttcattactggtaatcaccaaagctagaatcttcagatttttttctggacccatttatagcatcatatatttagttacaagtacaaaatatccaatcaaagtgtcttgaataataataacgtttaaatctgatataagaagtctggagataggtaattctgcaattggtgctgttgcttgatggtatcatcttggttccgataaccgaatattgggaaaataccattccttcttctttggttagttgagagtgtcatccctcagggcctcaagatggctgccacaacttcaaaagcattatatcacatacaacagtattctaagcagtaggtgaggaagcaggggccaaaaagggttttattgtctctttaatcagggaagacaatcttttccaaaagctcttttcaaacttccactttaggtttcatcactcataattgaatcccgtacctacccattgaccaatcagtctgtagataagcatattgctacccaaaagaaaatcaggttatgctagccaggaaagcaggggatggctgttgggtgaacaacgaatgtacaggcccttcattagtctagagatacacccccaccaaggcagcagggccactgtataggtaggaacatctgctgttggtttctttcagaggcgcactgatatattcaccaatctctaataaaatgttttataaagcacagtgcatttttccttacgtgctccacatatgttgaaagcagaaagctttagagtttcatggaaatgttgattagactaagaatgattgcttaccacacccaccaggactatgattccttagattccttaataatagcaatcagcaaacactttttgagtatgagccatctatcagcaatcagcaggtaacattcttctcaggcaaattcaggaagctaaggattgcttttaaaaacagtgaggcaataagaaaaattatgttaaactaagaacttttaaaaagatgtgaatttcattaatattatttacgtaatttatattacataaatagtatgtttgttattaatatattcatatgattaaaagtaatattcagtatttggatgcataaataaaatacatatatgtatatatgtgtatgtttttttagttacatatatgtatatgtaaatctgaagttgcctctacaactcttacctagccagataaaccctggtgaatctaggagacaagcattgttagatctaggagagtcagggaaggcttctcaggggagctaatttttgaggcaggcttacaagtgaggaggagtttgcctggcaaagcacagggaaaggtgtgttctaggtatggggttgagaaacatcagctcatgttcacacacacaacggcaaagcagcaagaagtatgtgggttgttgagcagagtgctttaaaaccttttttaccctaaaaaaaagcagtctactacaatgtgatgagtggattggtagggaggatttggtgtgaattaagaaattgatggcagggaaaccagcgtggaggctgttttaagaaagatgtgtgacgaggggctacgtgagagcaagaatgagatgggacagaaactggaggctgttaaatgtagatccggggaaaacatgttcatgtcaaaatctgatatgaaatttactttatgagataaataagaaataaaaatatatttatttaaatcaaataagtgtctctggtcataattgccttcatactgtactgttgtggatgtgtcctgacacatgctcagaacatagtagccactactgatgtaatcactactatttttactggcagtggtattgaatatgtatagtaatttctcctggtatgattaacattttcattcaaaacggaacaaattgtataatgaagaatctctatatgacatctcactagtagttgtataaatcagaaattttctagtggtttaatgtttatcccaattgtaattcagatgaatctatcatgaaatgacttttttttcttttacaaacagagccttttaaaaaatatatttctttttatcaggacttaaatgatagatgttttactttattgggcctaaagtgccagtgacatggttatgttctaattaattagccacctatctttctgtttctcctttttcctccacataatccagattttgctaaagttggcaaattgtatacctcacttgtggtcgttatatgactaaaccctaatgagggttatgtaatgtaaacagccacaaaataccataatttacttttttccttagacaacaagcaccttgagggaagaaacgggcgtcacatagattatgctcaccaaatagcaattggtaatgatgatgcactttgaagctgtttatgtctattataaaagtaatatatactcattatagtcaaatttgtgtggtcttggtttatctccattctccattcttggttcacctcatccattcatttctctaaaatggtaacacagattagtttctcaatttcaaaagtcagataatcaaactggggtttcaaagaaagttgtaaattagtaaagaaaagcgtcaaattttttttcagccctttttcgatttttctctccttggggctaattaccttcattcacccgtcttccctcactattcctaaagaataacaagtttagaaattagatattggatataatccagtaagagtctgttcagtttgaggattttttaaacaactaaatatgcctaaaaatttcatcatcaccactgtgtgtcttcctccatctgctcatctgctgcccataatatcatacacttgataatggctgtttctcttaagagaataatgtcatgttcttgaggccagagattgttaagttggaagagtctgggaagacagcagaatttaaaacattatatacctagcattctttctaatactacatttatttatcttgtgagagagaaagagactgtgagtgtgtgtgtgcgcatgcacgcacgttttctatatctcatcaggtatttgtgaataaatagttcacacccttccaagagaataagtcctttcttttctttaaacagtgactccattgatgttgttttagaatttcttcccttgtttctcacttccttcttggcaacattgtttctgaagtcttgaattgattcaagtgttcctggaatattactttttctctcctaccattttcaaatataggcaaagagataatttttttgaaaaacattgcttccttcaaaaagcagtataacggctattatacacagtataataccacagtacatggttaaagggacgtattctggaaccagatcttttatacaaagttattttgcaacttaacaagctgtgtgaccttaaataagttctttagcctctctgtatcctgggtttcttctctgctaaaatagagaaaatgacagtacctatcttaataggattgttgtgggaattaaatgagttaatacatgaaaaagtgaagtcctataattaaattatgtaatagtaatactcatctttgaacctgaatatgaagacaggtaaagaaatgaatataaaccaatgaaaccattttattactgttaatcagttacttagaaatcacttttactaaagtttagattactaacatcttagggagaccattctctcttttttcattattatttctcaaaagagagagtgtttctggtattcctgaaatgattatgctgaagaaatctttccattatcagttatttaaacaatgttgaagtctggggaaaaataaaatgtattttttccaaggctacacacgtatctattcttcgaatacaggaaattgaatgcacaaatccagacagttgcagaattttcactgagaatctaagaatgaatcagtgtgttattgtgaatggactgtataggcagtattaattgctttgctttcaggcaccatatctcagtgtgagatctcagagtcccagaaatccagtggtgtttcttcagtctttgttccttgcttactttcaaccactaggcaagtagttgaggatggcacagaaaaattgagttgtggccctggagcacagaccttcatggttgtgcttttcttctttaccacccacaggacaaattctacaaagacaagaaaattgtttttcacgaaggacattttgtgtatttaatctctatagagtggaaggcagatgactggaaagtaacagctcattaattatgaaagtaaatttctttccctactgtagtcaaaattagcttttttaaaaagacagggtctcactgttttgtccaagctggaatgcagtggtacaaacacagctcactgtgcagtctcagcctcctgggctcaaggccatcctcccactttggcctcccaaagttctgggattacaggtgtgagccaccacgctggccaaaatgagcattttaatgttatttctgtactgagccattttgtattccaccgatcacttcctcttgggaataggtggtagttaatattcagaaaggttcatttcccaaataggttagattattctccagtgaataagtgactcattgtactatggattaggaattaatgtcacagataacatacacttctttcacatagtctgcttaagatgtgtcatataagaactctttcagctattaacctttcaagaaagttaaaagaaattcctgaggctttcagcccagcccttgtataacctgcactgtcttgttttgttttacaaagccatgcaggaatgccccccattcagaaaaggagttggtacctagactaataactgagtagcacattcaacctgcaattctggaaaatttgtatttagcatttcatacaattgcttattctctaatttagtctttaagaacatttgtcttaatattgctcttatctatctagtgcccaattcaggattcagttaagccacagtaccatctccaaagaaaacgtaccctggcttttttcagattcaaggtaaaggtgtggtttggccacataagtagtgttgtgtagaaacataattcaggagcttctgcaacatgacctgactgggatccacctttctttggatgcttcctgctctgaatgcccacagcacttcttaagccacccaattcatcctttacatgaaacctttcactctctacttaggtttcatgtgatttccaagtttttttaatgctgctcaaagctctttgagaccaggaacaatgatttgtgtttgctaagcatgccttagcatggacccaaaacgtaggagaaggttggttacttggtgaacaactacttgttatatgcttcctctcttggtgcctgaaggacatcgtagtaaaaatactttggatattctggatattttgttactattttgtgtatatatggaattctaagtacacagtatactaatgaggtaaagaaattttcacagaagcaaaaaccaagagagtttaccactaccaagaattttctaaaggatgtacttcaaaaagaaagaaaataatctcaaaaggaatgcccgagatgcaagaaagaatgtcgagtacatagattggtaaaaatgtccaaacagattcttaatcacagtaaatgtaaatggacaaaactcaccagttcgatggcaaagaatgttagattagatttttaaaatatttctctaaaaccaagtctttgctttttcaagaaacacctaaaactgatcctctgttgaagggaacataaaatgatactctactttagaaaataatttggtattaactatacagtttaacatgcttataccatgaaaccctgcaattccatgccttaagttacataccttagagaaattcctgcacatgtgtaccaagagtcatattcaggaatactctgcagcattgtttgtaataccaacactccaaacaacccaactgttcatatacaaaggaatgattaaattgacactggtatattcccacaatagaattacacagcagtgaaaatttaaaaatgaatgagctatagctacaggcaataacatggatgaatattagcaataatattgaggggaataaaacaaaaatgaagaaagttataaagcatatgaaatatgtataaagcaaatctaaatattatttaggtatatttatagattaacattttttaaggaaggaaatgaaaaacatgagacttaggatagtggttgcctgtgggggtaaagagaagtaaagaagcaagggaatagaattagaaatacagaagaacaaaagagagaggagggctctgagcacccaagtagctatcacatcattaaagccttatgtctacctcttgagttcttatttagatccatactcttatttaaaatttcttcaagttttgctatagtttctgctggccagtcactgagctgagagtgtagaaattaatgatatatataaaatctcccctcattcttgtcaggaaggtgtatgataaacaaattaatatattagataaaatctctggggcccagcagtgcaatagagtgcgatacaccgggaatctattttagagggggagggtggtcaaagaaggtcttttgcgtaggagatagggacagagcatcctaagattcaggagagcattctagtcacagggagcagtgaattcagaggccccaaggtaggagggagtttggtctgtccaaggaaagcaagaaggtcagtgcagctgaggcagagtaagtaggaaggagagaggtcagggctgagatcagggaggtagtctgaggcccctctgtgggggacctgataaatgtgtttgaattcattttgaagtgtaataggtccatattagaagcagaaactagaaaaggagttaggctgataaacatagggatcataacagcaggaaaaaggcaattgataataagacacaagcaagaaaaaattcaagtgattaaaataatacacttgcagagcttacaaagagaaatgtaagtaatccaggaaatctagttacatctaagtcttcattcatcttaccagataaatgaaatgttaaaattttagttgcttgcatacataacacacagatattcttttatataacacattcatgtcataaaacatgtgatgtttatctagagaattgagaatacttgttttgtgctttacttaaccataggtcatattataatgattaatgaggtcatttgaaatgtatttttacctatcttgagatttgcagtatgtgtatgaaacatgtcatatcattagttatgcagtataaaaagagaatttttaaaaatatgtcattgcttatgactaaaattatgatcagaagtggatttatctgtgtctaatgagttttaagcttcagagctcctcactttcagctcccatcgcataccaaggttatgggagaggctctagcaatatggtcatctggtgtttttttttttaattgtggaggtgagctattttaaatgcagctgattaaccttccacctcacccatcacagttctcgtgtcaggtggcaatggagtgaccatgggcatttttgagatctggctaaggggatgttgagttcatttgggttttataagctctatatggggttcactggttacatatatatcagtgggtctcgattagggatgattttatcccccaggggacactcatcgatgcctggagacattttgggttgttacaatatgggggagagggatgttgctactgacatccagtggatggaagcctagggataccattaaacatcctacaatacacaggacagccccctgcagtagagaattgcctggctccaaatgccaaaagtgcccagattgagaaaccccttaacatagttatgcctggctacccccgtgtagaaatggcctccaggaattcacttccaccagcactgtgctgacttacctgggattcagaggtcatttcacaatatgaccatgtcctatggtctctggcaccaaagtctgtgggtagtggaggagaaacaaggtttgaaacatactgagccaaaggctagtctgaggagaattcttcaaggcaacagacatgtaccttgaaagcaaatgtttctattctcatcaatgcctagttaagatggaagttttttcataataagaaaatatatttgaggctgaccatggtagctcatgcctgtaatcccagcacattagggggccgaggcaggtggatcatctgagctcaggagttcaagaccagcctggccaacatggcgaaatcccgtctttaccaaaaatacaaaaattagctgggcatggtggtacacacctgtaatcccagctactcgggaggctaagacaggacaatcacttgaacccaggaggcagaggttgaagtgagccgagatcatgccactgcactccagcctgggcgacagagtaagactctgtctcaaaaaaaaaaaaaaaaaaaaaaaaaaaaaagaatatacttgataatgcaacatatttaatgatagaaataaccatgcaatttttcttctataaggaaagaatcagccttataagaatcagccaaaatagattttatcaatattctatttgattatggctaaaacctgtagcactaccaccaacagtgatcacatgtgaagtgacatgttttctgcatcacagctgttgataaaaataatctttgatcaaccatgttatcttcctgtagaaaatatttcaaaaattgctgtcagatgaaagacagtcaacgagtatgtgctcaaaaataacacagggcaagtgagtttcctagtggaggtgtccgtttattaatcaaaatattgtgattttatttctgcattttgtggtatttgtcagctttttaaaagtgtgtgaggtgctcgcttcggcagcacatgtactaaaattagaacgatacagagaagattagcatggcccctgcgcaaggatgacacgcaaattcgtgaagcattccatattttttttggctgggcgcggtggctcacacctgtaatcccagcactttgggaggcccaggcgggcggatcacaaggttaggagatcgagaccgtcctggctaacacggtgaaatcctgtctctactaaaaatacaaaaaattagccgggtgtggttgcaggcgcctgtagtcccagctactcgggaggctgaggcaggagaatggcctgaacccgggaggcggagcttgcagtgagtggagatcgcaccactacactccagcctgggcgacagagcgagactccgtctcaaaaaaaaaaaaaagtgtgtaagctttagacttcacaaaccagagattgcccctgttaatgataatattgtttgtattttaatcaagtgaataaacctttgaatgtgaattccatcagtgcatctctacaacatatacttgcaaattaatctatatttttctgtgctcatcttcacttctgagtctgtagccttggagtcagtgctcttctaatctcactacctgggcgcttgatcccatccactttgatcctctccggatcctggttccatcatgtctttgctgcccccatgccttcaagcacagtctgtacccactattttccaaagaagccttaaaggggccagaggttctgggcagagttagaggcaagtgggaaaggcatggtaggcagagagagcagcttcagttgtctctgtcgtctgcctcttttcttctgtaactaaggacttcactctggatgtcattaacccttcaattttgtgcaggcagccttctgctgccatcatgttaccgcagtggatattctaaagacctcaccttgtttggcatcttcgggtacatgcatgcttctctattcgttatttcttgtaaatatccaccttgacttctgtgacatcgtggtatcctgcttttccttccacgtctctcactcctctccactgattgcccacctctgccttcctcaaaggtcctgccctatggcacatagcctgtacatgctatctccttcaacagtctcctccgctgtggaggtaatcctggaggcagggaactcatgtatgtccaactcggtccactcccttgagccccagacccaaatatctttctgaatatcatcctaagtagcaagccttccagtcattcccttctgggtccctattcaggctgatggcctcaccatctacctggccacccaggccagaaacctgggacttatcctagattcagttaatctttctttctccttcatttgactcgtttaaagttattcttcctgcctttcctctcctactgctgtggttttatacatcttcctcccagagcatctggatcattgcagccttttcattgagatccctgccttcaggatcatctccaatttcaatcctacacagttaccagaatgcaaatgtagaataatgcatatctgacatacacgccctgcataaaaccctttagtacctccccttctcctcaggataaagtcctagctctgtcaagtaacacttggggtcctgttatctggtccatgcagtttcatactcctcaacttttgctcatgttgctctctctaccagtcatgcccttgcccctcctcgctgaagcctctaacactagatacccctatcctgcaccccgcctcacccctgtggagttgatgtgtatataacatttgctgatagctaaagtttatagagccaggcacctgcagagtactttatgtaccttatccatataattctccagttgccctattaagcaggtactatgattctccatcttgcaggtgaggaaacagaggcatggagaggttaagctatttagccaaggtgatgtagctcataaaagaggagacaggatttgaatccaggcttttaaattatttacgtctacctcgcacagagcttgtgcaattggtaagttacatgtctgcctcctctgctcagctgtgagcttttgagaacagatatgatgacttcatcatctgtgtgtcatctttgcaactgagatccaatgcttgtcacctagtaggcacatttgtatatgtatgaatgaatgaattaattgttgatgtgacattgtaaatgtctcataaatctcatgagaagtgctactaagaatatgtgagagtagtacagatatatctgtatttcacccaccatgtgtattgtccatgaggacatgaaataagtaaaaatgatgttactgcctttgaggagaatttggtttagtagaaaaatgtaaatagttgaaagaacttaaatatggagcttttagaagccattctgattcctgttaccaagaggcattattagtatttatagaaatcaacttatctttttaaaggttcatcatgtgctaatagctaacagcatcagcagtttaattattgacttaatcgaggtctagagtagaggacttcctagtactttgggaactcctggccacttttcatgtcagccttgctttaaaagggatcctaaaatgtgaaagctttctgtctctctgatagtgaactaagttattagttaaaatttatcagcccagttgaagttggcaagatgattcatcttacatacatcaaattcatgcaaaaggaagatatcagttactattttaaatgcaaaaataatatgcttaaaatatagttatgggcatactgtggtttctggaattgtcctcctggagaatcattgagacatggtctctgatgttctttataatagtagcatgcttatttcataagccagagcccatataggaaaaagccttttttccaccatgcaaaggcttataactgaatgagaaaaaaataaattaattacatgaatattaagaggttacttatctattataacattgggccacaagttgactaattaaaaggaatgcaggttggaaagctgccacaaatctgctcctttcatttagagggccacaggctgaagccagtgattgtgcgtgacagactctgggaacaatggtgcagtgcacagaccgtccagatgaagcatgctcgtctgaattacaccgacgacagggtggcctacaggcaaacaaaatggttaaacaatacataatcaagtttttatttggtatttcctgcaaggctgtaccagttgccagggagcgtactgtattttttcttcggctgtattaattgttgaccatagctggcagaaccccaaacagggacagataagggggaaaatggcatctggacattaaagcctcaagtgtactgggggaaaaaaaagcacaaaaaattacagcatatatcaggaattttccagctaacgatgtgcggatgtggtagcgcgagggaaaaagagccaaactgagcttgctttgttcgctaagagaggcccccctgtaacattccttttagctgtgcatattttggcttcatttgtacagttttaactttatactgtgtgtggaggagttcagttgtaactggtggtgcctaataattctattgcaataattaaagttcatggagagctgttaggttattagttcatagaagctgcttcagaaaacggagtctaagctgaaaactttttaagtgacatgtcattactgtaaaagatggcaacaattattttctttgatttcacagcagttttttttttaagacaagattcatttatggagacaaataagaaacaacatcttaaaagctttgggtaggagtgaggggcccagactgggaatgatgagaatatggatcctgtagcctgtgaataaaacattttccaactggcttgtaaaacatgaaaatttgtgatagcataatttcatctgctacttttagattccatttaaaatgtgaaattaatatataaatgttagtaaatctattgcagaaaccaagtattgcagcttcttcacctctgatagaagtcatatgtgacttttaattcagtaatacgatgaaaaatctccaactgaacacagcctccttcttaaaagattgacatgccttggagtccccaataaaatagtaattgcaatgtacaccaattggttagagctgtgaaatatgtttcccgggggcttctctgcagtggtagagggctgtctgcctgcatggttgtcatactcagtggttacttgcagactctggagttagacctgggtttggattgtatctctgacaagtggctagttgtgggactactgtagttattaacatgtttgaatatcagtatcttacctaaaatatgggtaaaaaattatgtgcctatctcacaagtttttatgtttaagtaacataaaatgtgtgaagtccttagtgaagtgccaggcgtacggaagactcttgataaacttcgactgtttttctttggctatgtcttctctgttgtgcagctctggggtttctttgagcttctcaaaacattccttctagtcagtttctgcattagagtaaaatatatttacttaatcaccattgacttccacaatagataacaaggaacaggttgtttggtctgtaatgaaagccaggccgatagttatgattactattaagcattcttcgagaagctgaaatgttattaactgtcttccgaagcacttattaagagccaattattagtcctgaaaaacagttctctcaaatattcctaagatgacttccagctatagtatacatgtactttgtgacattatagatggctgcctggtaacgtagaggccaggcttcatctccaaatgtgaagagaaaattctctctctcattcctgtctcatatttgattggatgattttagtaagacttaatgacttttttgcgaatcggttaaattttctggtgtatgttgcttttcattttcttctccagaaatcttaatcctcttgaagacaggaaatgtgttaggagttcatagactctgaatattagaattgcacaattcatgaccccaggattccatatgctgtccattcaataaaggggtgacactgtccatgatgatcaatgtttagatgacaaacatctttaaatccacaaaatttctcatagaccaaagcgtttgttctagtccctgacatatcgaaccagttttttcaaagtaaatcatttgatctggtccctgacatatcaaaccagttttttcaaagtaaatcttgtgtcctgaaaacattttgaggccttaaataataccactcttgaatatcatcatttgagtaacttagtaaagactattaaaaaaatacacatatatggtaagattttgtaggatcttcttagcattaagaataaaagattattaattctttccccgtgaaacaacaacatataataataagctaaatgtggtcagctttgatttcataacgggaaaactcccttttcatttttacaattggtgttttctcttcagctgctttttaagttggcctgttagcaatttagcctgtctttaattttaagcaccattcttctagtcaggagatcccaataggaagcccactcttgtagcctcgcctctcattggctagctgggaaaagagcatttctgcataaattggatgcttccttctcccctggagaccaaatatgctcatgtttcacaatcccctggtttataaccttgagtccattgcctaaagctggaaactttcactttgtacaacagagcacactccgaaacccagatccaataccgctgacatgtccgtgggtctgacagcagattgaatacatgcttctttcttaatccagtgtttctgagctgctccaactgaaatcagaaaccgatgtgcgtgagagaggtgtccttcaaagaaaggtatttcctttgtgcagctccagtgcacacagaatccaaggggttaacgtgagagctgctttgaaaacagaggcgaaggtcactggcggcaacagcaaagacttttaaagcctgccgtcctgagcctttcagcctgccttccccacccaggggattgtaaacattggctcccagccacctcgtcccaaagcacaaaacttctctgtgctttcagcatatacatttatgcttttttatggaagttgaagcagaggcgcattattgctgtgagcccagagaacatgtctctgttcaatgaaaggggaggaatcctgtcctgccagaatgtgaaagcatgcagatacgcttatttagcggggcttcacatggaacttagccgctgctcttagtctgactttctcaagtcaaaagaatgtgtagaatgctgtcacttaatcagaacccagaagagctcttttatctgccatttgtttgtaacttgcaatattgtccttatctctttgtcctttagcttgatccagtgccctcagatatgagaactggaaacatgaaagcacttattaccttgagcattgcttcttgatttttgttggtttttttctttctttctttctttcttttttttttttttacctcagggtcccttaatcaccaacaaagaagctatgagactttttccccctaatttctgccttagtcctaggatcatatttgtttggtaatatttaaaagaaaccaagatgatttgtatatttacactgccatttatacctggttctttaaaagtctattattgacataactttgtatcattataactttcactgatcatttgcatgaaacagaatggaatttccagagatatcatgtgtagcttaaatttctccctcccaaactttttaatatgtcgtaggaggttaatatccttctgtctataagtaatttcagtcatttgagatcatctttttctctttggtaatttctaaagacacgaaccagagatatatttcaataggtaggaacagaaaaattatatcccatgtcattcctttttgctgtggtctttttatatatatataattttctatttcagagacagacatgtcttctgaaatggccactctgagcatattttgtaataaatttggatgcttacctaatgaagcgcaatcactacacatttctgtttgaacaatgatgcttgattctgaaaagaacacgagacagacaacagcctctcccatgttacatgacatgcagacatgattgttctctagcctgtagctacattgataagtgatatgtggctttgccttttgccactcaggctaaataactcttaaaggttcttcacaggctcttctggaattccaattttgctttatggaatcacaaattatattgagtaattattaatgttctttcagttttcctcttggttaaagtttgatttctgtaaatgtcaagtttctgtgaacagcatcactgacctggatgtattggtacacagtgcaatgttcagatggtgtcactgagcatgtagaatttatttattctaattataggattctggagttggaaagactttagaaataatcaaatgtgacttcttgattttgtagttgagaaactagggcctaacaatataaaattacttttttgcaaagtaataaatatacaaaggttatttataactaatatccagaggtatatctggatataaatatttatttaaaactaatatccagagtatatctggaacaaaaactcagatttcaaaatctcaatcaaggactctttcccttagtccatctagtcacataccccctatactgtgtggtgttcacagatgactaaagatgagactaataaatggccgatatttagatcatcttcagcaagtagatgaccacataaatgattatgaacagacgttttgtacactgagcatgaggcaacatggggtcttggtctttacttattcccaagggtacctggtaactgacatttcaaccattcagcttatcaacttgccatactccaatttcactataaacttctcacaatctgtaaaatcccccttttctcttgcctatttaatgtgtaacagtgacttcacatgacaacagtgaactctacatcaaagctgacaatatgaccaaagctattcacagaggctaattcatagcactaactgcttttatgactggaaaagaaagattgactgtaaatgtaaaagccttcaatccaagtagcacaaaagaaaaagaattcttttcaacaagcatcgattgtatttacatattactcattatgaaaaattaaaacatgttaaagtatataatgatgaattaattagaatatacctgtataaactaggatgcaggaaaagtttaaagcataaatgaataaattagaaaacagataataaaatggaaaaataaacctaccagttggtcctgagagtcaccttctagatcacgccagcccactttgctactaggtaatagagcttttgaaagaacttgtggcatatgagacaggatcacatagggctgggagggagtgctgatcagggtttctctgtgaactcagcccatatccagttattctcaagcctaggcacccccatttctttctctacttgtatctctttctcttaacccaggtaagaaaaacaaatacctcctatttatacatgttataggttcacaggtaaacaaaagacagggaaaatagtaacctgcaaaaaagagagtttgggcctgtgcaaaacagacattcctattaataattttccactatgcagattatgtttatagtttgtttggtaggtgaaccaaatatggtaaaaataccaactgagaagggtacaagaagtaccccgtgaagagcaaagatgaaaaaatattgtggatgtaccagagatgaaagtgagtaaaaatacttggttttcattcagaaaatttttctctctcaattttttcttctacacgaggaaaatcaaagaaaggcttagtcctgtgtagttctgttaaaaaatgaatttattgtaatattcacaaggaatttgtgttcctaaggtagttgtttttgttttttgttttttatttttgagacacagtcttactccataattcaggctggagtgcagtggcatgatgatcacggctcactacagcctcgacttcacaggctcaggtgattttcccacctcagcctccagagtagccgggaccacgggcacgcaccaccacacccagctaattttttgtatttttagtagaggcagggttttgccatgttgcccaggctggtctcgaactcctgggctcaagcagtctgcccacctcggcctcccaaagtgctggattacaggcatgagccgctgtgcccagcccaagataattttcatactcttcataggtagcagtttcatagccttagaaattcaggcagcaaggtactgtgattggtgtatatggacttatctttggagtaaaacaggcactcatcagatagtagctcttgctaattagcacatggactattgaaattccttcctgttaatgccaatcagtcagattttgctacagaacacattttacagaactttctttctttctttctttcttttttgagacggagtttcactcttgttcaggctggagtgcaatggtgtgatctcgactcaccacaacctctgcctcctgggttcaagcaattctcctgcctcagcctcccaaataactgggattacaggcatgtgccaccatgcctggctaattttgtattttaatagagatggagtttccccatgttggtcaggctggttttgaactcctgacttcagatgatccgcccacctcggcctcccaaagtgctgggattaccagcgtgagccaccgcgcccagcctacagggctttcatatgggaaagttaatacttttcagtcctgtgggtctctttaaagcaataagatggcatccttcagtttactcagtggttgctcttgcttttacgcttacatttaatgagttttaaaagtacagttaaagtacttccctgtatttgacatctgtgtctcagtactcaaattttcttttttatcaaaggcattctttacatctgaagtcttacatttctccatatatacttcagtcttttctttgaagaggtttactccctctgctggctctaactgtgaaatgaaagcacgtgtaatctatatagttctgattaccaatctgagggattgcttgcatatgatggtattgccttagacttttttctaaaatgtaaaattaaacttttgtttggctccctctgattctgaataataaaattgcccaaaaatctaagaaatattttatattccttttgagaacaatatgaaattctatgaaactaacagtgatttgataattaagaaattctggcatgcacatttacaatatgtaataggtgctcaataaatattagtttcttgattgcagtcatatttttattgtacatagacattgtgtgtgtacttcattgtaggagcaataaatcacccattctgtttaatgaagtcatctgtgtttctgtagcactttctcaatgccttattatacttccagccacacagtattacagttatttctttttacatttgcctagcttgactatgaactcttccaggacagacatgatatgttatttgtctttatagtctcagcttctgtcttggtaggttgattgcccagtaattattgatgaacttcaacattatactacaataaatgtcttctcatttgctgtacagacagccagaaagtataagtaattagaatttgttctgcactctacttttatcgtgaaaaagtaattgaaagtaaataagatatttattcagaaaagccactacctgaatgtgagcatatctgaactaataaaaatagtatagttaatacagatatatagcaagatgtcctcaccatctacatctgtaataatatatagtggtaattgactcccataatggttataccaaagccctgaaggattcttaacttttactttcatttttaatgcaaaaccaggttttcatatattttgcttgcttaaagcaagatatactagctcttatttttcttactaaattacatgcatacatatatttcaaattttattttagattatttgtgctcaaccccatacgttgtcatagagtagtgcttttcaactcgttttccaaggatcactaattctgtagaatgttaatagatgttatgtgagggggagaaagtcattcagctttgtaaatgctgaattaaatatttctttttgaacaaagctggaggcatcatgctacccaacttcaaactatactacagggctacggtaaccaaaacatcatggcactggtacaaaaacagacacatagaccaatggaacagaatagagagcccagaaataaaaccgcacacctacaactgtctgatttttaacaaacctaacaaaaacaaacaataaggaaaggattccctattcaataaacagtgctgggataactggctagccatatgcagaagattgaaactggaccccttccttatatacaaaaattatctcaaggtgaattaaagacttaaatgtaaaacccaaaactataaaaacccacaaagacaacctaggcaatacctttcaggacataggcacaggcaaagatttcatgacaaagactccaaaagcaattgcaacagaagcaaaaatggacaaacggaagttaactaaactaaagagcttctgcacagcaaaagaaactatcatgtttcttttgagtaaacagcctacagaatgggagaaaatttttgcaaactgtgcatccaacaaaggtctaatatggagcatctataagaaacatacaaatttacaaggaaaaaaaacgataaaaaagtgggcaaatgacatgaacagacacttttcaaaagaagacgtacatgcagccaacaatcacgaaaaaaagctcaacatcactgatcattagagaaatgcaaatcaaaaccacaagagatattatctcacaccatcagattgctattattaaaaagtcaaaaataacagatgctggtgaggttgtggagaaaaaggaatgcttatacattgttggtgggagtgtaaattagttcagcctttgtagaagacagtgtggcaattcctcaaagacctaaagacagaagtaccattcaatccagcaatcccattgctgggtatatacccaaaggaatataaatcattctattataaagacacatgcacgtgcatgttcattgcagcactattcacaatagcaaagaatcattttctttatcattcatgtatttctttatgggtatttggaatcaacccaaatgaccatcagtgatagactggataaagaaaatgtggtacatatacaccatggaatactatgcagctataaaataaatgagatcatgtcctttgctgggacatggctggagctggaggccattacccttagcaaactaacacaggaacagaaaaccaaatactgcatgttctcacttacaagtagtagctaaacgatgagaacatgtggacacatagaagggaacaacatacactggggcctattggagggtggagggtgcgaagaaggaaaggatcaggaaaaataatggatattaagcttaacacctgagtgatgaaataatcagtacaatgaacccctgtgacgcacgtttacctgtaaagcctatgagccttgtaagggcaagaaccataccctagaattcactggcactgagtgttggccaccaagtagcactctgcaaatgtttgttgacttaaaaaaaataattcctacactaattcagagtttctaaactacaaggaaaaaatggcagcatgtgtacactgattattgtccttcagcctccctccgccaaaatagttgctgtggttccccatttttaaattctgtgcgtgggtgaatgggaagactcacaacaaatggaaatgtgactgcgtgacctctttagagggaatgtggtttgccccttaactaagctacagggctataaactgacaaatatggttctatgtttagtgtataatgatgtttcagaattatgtccatagaagaaatctagtaaaaactactatccaacagcttctaaaatgtttacattattaatgttcaaacaaacatttcagaatactaagttcagttctttttcaatgcctaaattgtctaagaactctgtgtgtgtgtgtgtgtgtgtgtgtgtgtgtgtgtgtgtgtgtgtgtgtgtgatgtatatgtagtctatacacctcaagaggaggacaaacagatgcttaaagagttgggagtttgctaagtccgacatagaagggacaaaagtcagaaaaaaagcctaatattttacagttgtcttgaactactgagtcacacagtagtttaagacaatttaaaatgttagtcacaaatgacagacactatttattctgtcattaccaagaaagtccagttagtgctttaataaatccagattatattatccttttagaatacaaattattcagtcaaaagtatagaaagtaccactacacactaattcgaatggttgggaatatcaactgttggccaagatgcggagaaactgtaactctcatacatttctggtgggagtgtaaaatggttcaaccacttggaaaactggtagtatctactaaacgtttgcctactccctgtatatacccaagagaaatgcatgcctgtatccaacaagagacatgtacaaaaatgttcaaagcagaatgtttattttactatatccaaaaactagaaataaccatcaacagaaaaaattgctaaacaaactctggcataatgatgcaatggaatactacacagcaatgaaagggagaaaactatatactgataactacaacagcatacacagtttttacatattatcttgagcaaaagaagcaaaacacatgattcctttatatgaaattcaaggagcagcaacattaatctatggttatataaataggggtgcaggaatggtattgctaggaaaaatacaagaggaccttctgtggtgatggtgatgtaagtattctatatgttggtctgagtggtgtttatataggtgtgtacatgtgtaaagatacatcgaacatgttaagatttgtgtacacctcagtataaatagataaataaatgccttaggcaattatacatgtatatgaaccaatgccaacagaggccaaaattattctttacaagaaatcttttttaagctattatgtataaattttattctattgccgtagttgttaatctagaacacttttcataccttcagaattacacaaacacatggattttttcctccttgttttgatttgctgctttggacagagttcattttttggagtttgggggcaaatttggaagaacttctttatcagaaaagatacttttcttggtcatacatttaacaaatagtcattgaatgcttgccgtgtgtcagatattgcactaagcattggggatccaaagattagctagtaaaccccagtccctgccactgtagcattcaattttatgggggtaacagagatggaagcagattcttctggtcacaccagatgtcagcaagggctgtaagagaggtgtactgcaggagtgtggagtaggaatctgcttcgtctctcagaatattctggaagactttcacagagggtatcacgaggccctgcttctatttttgccatatgtcagagttctcttttaagtatctacaatagtgatttaaaagtacttttcttcacaatctatacttccaacaaaggactaatatccagaatctacaaggaactcaaacaaaatcagcaagaaaaaaaccacaaacattcctttgaaaaagtgggctaaggacatgaatagacagttctccaaagaagatatacaaatggccaacaaatatatgaaaaaatgtccaacatcactaattatcagggaaatgcaaatcaaaaccacaatgcaatactgccttactcctgcaagaatggccataataaaaaaaaaaatggatgttggcacaggtgtggtgaaaagggaacacttttacactgttggtgggaatgtaaactagtacatcactatagaaaacagtgtggagattccttaaagaactaaaagtagagctatcattggatctagcaatcccattcctgggtatctacccaaaggaaaataagttgtacgaaaaaaatacttgcacatgcatgttatagcagcacagttcacaattgcaaaaatatggaaccagcccagatgcccatcagtcaacaagtggataaagaaaatgtggtatatatatatttcattatatatataatgaaatactactcagccataaaaagagcaaaataatggcatttgcagcaacctggatggaattggagacgattattctaagtgaagtaactcaggaacgttaaaccaaacatggtatgttctcactcataagcaatgaggatgcaaaggcataagaatgatacagtggactttggggattcagggaaggggcgggaggagggtgagagataaaagactacacattgggtacagtgtacactactcaagtgatgggtgcaccaaaatcagaaatcaccgctaaagaacttactcatgtacaaaaataaataaatacataaatgagaaaaaagtactttcagttactaaaagatagttaaaatatgtaatacatgtttttcttagatatcactgtgatcacttctgtgattccaacaaatttagtttaaagatctcagttggctttattgcaattctagaaatgggcaacaccacattctgtaaaatagagtaagtgttccagttagtcaaacaaaggagagtggctttatagacagaaaaggggcagaagaaagcagaaacaaaagaacggaaagcagcttggtcatttcaaagttacgtccatgtaagggacagggagacagaacaatagataactgcttaacatcaggttacttcaagttactctattgtaaagattaaaacagagggaacttcattgtcatgctgatttaagatagaaactggcctgtttgggaaattaggctgtctttctcttttgacttctctgtctctcctgatttacccagttttggtttggtgagcataagtgactccattttaacttttagtccagtctgttggggcctagtgcaggagtttagtgcaaaataatggtatgctataatttttgtggaatatttcttaggccattttgaaagccctaacagtttccaggataaaagaagctacctgccacaggtttctagaaagcagtaacattctttgaaatgtttataaatggaaatatagcgtttctttgaattagttctgagttagaagccaagttttactcaaactcagagggttacttttcctttcaagtagtgtttgcatgcagcaaccacactgcccccaacacgcatgcagcatgagtccctgagtctaggtgagaagccttccgctggtttttatgttcacacatgtatctctcctgacagcggatatacctagaaatactctgtaagtccttggtattagtgtggttcttcctagaaactgagacaattttaagaaaagcattgtggctcattaagagcaaatgaatgtatatattctgtaattatttaatcaacagaactatattccctttcaatgatcctttctttcatctctgctcatagaagagatatgaaatgaattttagattttgaggacatttaaaattcagtaagtacagcaaaactgtgttataaaagaaagaggaaattaaataaagggctaggacacatattacatattagacctttttttttagcaactttgaaatcagatggtaaaatctagataatgtcgtcgagtccatacaattgcactgtgttcaaaaccaaagaattcttatgtcaagtaatatgattttttttaatgttgcttagtgactgtgttagaaaatggtgggtcatagtatttaggttccctaaattgtgtattttccttctctcctatttccacagctctagtcttctgtgcattttgtttttttgtaaacaagaaggcaccctttttacactacatctgcataaatgggtgaggggtgattttgaggaagagcctgacatgggcagctggtgagatggtggtctcatttgcagagatagaatacaaaaggagaaaatgttagggaggaagggtgatgcctggtcttcagggaagggatctagggaacagcatagacatgcctgtgcacacagtgcccgacttctggctcctgtgcagaacattgtgggtaggcaaaccttccctaccctccatccaggacccagtcatttgcacatccatgaccctgatccctcaactggcagctatcttggtgaaatcccttggggtcccattatcttagaaaaacaacttcttttgtttttgtcagcttttctggtaaactgcattactatggaaatgttgactattctggaaatacaaacttttttattgtaattaggcttaagaccaaaaaagaaaagacctgaggtcatttagactccacagtgaggagaatgaacctgagttcaataagacctgcttcagatcctggttctgccattggctcttctgtgattctcagcttccttatctgtaaaaatagagtcgttgatactcgcctcacaccattaaactgaagattatataagacaacagataaagttaattcagcgcagtacattacatcttctgtgctttacaaatgtttcctttctctccttccgtagccccctacttatttacactcaaaataaaaatgaaaagttttagagaagagaaaacattacaaggccccacagtaatccattctggtatttaacagttcttattgtcagaaaatacttccttctgtctaacacaaattcctaatgctgcaatctaagtccttctctcagatgtgtcctccttttctgtttgcagttttaatcttgctaaatgaacagcatgaaacaccctaatcttcagaagcatattttctttatgtctttcctttaatagcttaaagcacaaaatatagtggggaccccccccccaccacagtcctctgtagactataaattcatttctggtagcctggattactgggaaatgttgtggctggttttattttcctgcatgcatctcgatgacccatttcagatgggagtgtttgaggaggagagcgtactgcagaatgagctgaatgagctataccttcatgactgcttccacctgacaatctgcaaatcctccccatttaaggaaggcagtgctcatggaattttaaaatgttgaagaatgtgtgtgcctgaacttggattttaaaactatgcttccatttccctcatcacttgcactaaccatataacctgctagtactcatttagtaggtttgcttgcaacctgtgtcaaaaggagcatagtaaccaatgagaaagaaggcacggaccttagaggcatttgactgtttccatagcaaggaaaaacccaatttttaaattcttttacaaatctgagtaataatgtggcctctcaaagcaaatagatttccttaagagttaaaacaacttctaagaggaaacaatgagccctgcagcctgccatatcctgtgttcagaataattttcatttctacttatctgtgaaggttgaaggaatgtctgcaaatatttgcttggtttctatggtgaaagcagagggagatcaaatgtatgattgtttagtgtcaaaatcaaaactatactatactgtacttctacaaagagaatgagtttgttactttaaacataatagacgtttaataagtggtaactattttaagtttcacgagttcaagaggaaatttaaacagtgcagcctgaaggaaaacataggcccttcaggcattttaaaacttcattttacaaaaataaaatggtccttgcactttattaaaaagtcatctgttgactaaagatcatgttggtggactctcagaatgcctggtgtggacatggggacacaactatggcctataaaatttatactataatagaaacactctgtcctgccctgtgttatccctccttatcctgtaactctccattctgctgtcttctggctacccatacatttgttggaacatatgtttattttatgcttgctttatacaacactctgcgagggactgggattaaaagtccacttagaaatactctctaccctcaaagggctggctttgggcctagtagaccgtaaggatacaatgattgagatgcaatgtaagtgctgcaatcatttatgcttgcggaggactaggcagggcaaggttcacaggaattaagaatggggttgtgaagagggcattccagagaagggcctatgggaagaccacatgaggcacgacatagcacacatgtttaaagaacctcacggtctctgacaagttaaagaaagccttcatctgaagggggaacagacaatgaaggcagagagtgggtgggaaccagattatgagagcattggaggtaaattagagttgagcttgaccctgaaatctccagagaatggatgaaggattttaagcaggagagtggtgagcacagcttcagatgcagtaaagaagacagagtggcagggggcatgttggcaggaaaagaccacagaggaagctatttggaccatccaggagaggacatgctctcgatggaattgtcgggatctgatggtggcttcattgaaagtcaagagaagtagggaaactgggtaggtagcgattttgcttacagagagaagaaatataggaaaagcaagtttcagaggaatgacaatgcatgcattttgaatttgagatactggtagcagcactaagtagtgatgtccgggagacagttggatttgtgggtcagagactgcagagttctgaatacagcatggattggagcgggggtggggacaggcacatggagtgctccacaaggattgtgcttcatgtaagaaaagtgactgcctgaggatgtcgccttagattaagcaataatttaaaagagacaaaggcaggaggaacactaggacaggaccgtagcattctgcacttaaattgctacacagacaccacccctccctccaacccagttgtacttcagccaactcatttaactcattgctttcctaatttgcgaccacactgtccaggactaacatggtacctcacagagtagacattcacatgatgaattgactggaagcttactttgacctaaaggcttgctgtctaggccttttgtaggtagatctgcttagacatagataaaatgggggagaggtgtacgactcagtaagaaatggcaagtgccactgatatcacaaaaggtcagaaacctggatccctgaattctacctttgctggtccttcagtgagtcattttcatccctcccctgacacgagtacacagcccccctgtttactgagtggctctcttcccccaagatgcctttcctctctacttggagggaacacccattcagctcattttccctgtgcctttcattgccctgtgagtcttcttacacaatctctgaagctaatcaggtagtgctcttccctccacaggatcatttcctctgttaaagatacatgattactcaaagatattaagttattatgggacagtattgtcctcatattctccagtctaggtgattgcctctatccatcttcagcactgccactgggagtttcctgtggttattgatgtatctagctatcagataattactgagcaccttccatgcatgacactgtaaatgtattgtggccaagaaatggaaaagctataatgcaagatagaaagggtcaagtactatagaagtgcagtggaagctcagagaagagccattacttccagctgggagatcaggaaaggctttgtggatgaagcaatatgtgagtgaggcttgaaagatgggtaggatctggacctgcagagactcagagaaagagaatcccagagagagaatcagagaaccacaccagcaatagcaggtgatgggacatccacatatctaaagggagccagtggccccatgtgagccaaggcagctgtagatgtgaggaaatacagcccttctgctggtaatggatgcatcagagcagaggtgaggacaaagttattggcacagcgctccctgctgtgagactctcatctttgtattgacctcagacatttttttgccatatgtcaaaacatctccttctagcccttagattacaaatgggtgaatttgagatgactccattattattttatgggtatttaatgctttttttttttttttttttttttttttctgagatggaatttcactcttgttggcccaggctggagcgcaatggtgtgatctcggctcaccgcaacctccacctcctgagttccagcgattctcctgcctcagcctcctgaatagctgggattacaggcatgcaccaccatgcccgactaattttgtatttttagtagagacggggtttcaccatgttggtcaggctggtctcgaactcccaacctcaggtcatccgccctcctcagcctcccaaagtgctgggattacaggtgtgagccaccacacctggccagtatttaattcttaatagtttccataaccagttaaggtgttataatgagaagactgtgcttggcagaattagaattccaattctttataatattcttcatttaaatatgtaattttgaagaactaaattatggccgggcacgatggctcacacctgtaatcccagcactttaggaggccaaggagggcggatcacttgaggtcaggagttcgagaccagtctgggcaacatggcgaaactctgtctctaaaaatacaaaaaattagccgggcatggtggtgcacgcctgtaatcccaactactggggaagctgaggcaggagaatcacttgaacccgggagaccgaggttgcagtgagccgagatcacaccactgcactccagcttgggctatagagtgacactctgtctcgaaaaaaaaaagaagtaaattttgcacctctgtgaaaagtcagtgaaattatcactagttttgattttcacttcacacaaccatactagttttctatagggagaaaaacatatgtattagaaagttttatattgctctgatgcaaataaacagattagagcacagtttagaaaaccttcactttgacaaaataaagattctgaagtatttcaaagattatatttatattcctgataaaccattatctatgtttgtatttgagacatgttgttgaagtgggcccgagaaggagaatatcaccacactggaacactccataagtaattactaaaccaaaggacagcaaagatatttaacgataacgttgttgggtccataaagtatatatgtttttttaaatcttcattgccattgccatatcatttagggagtcttaaaatgttaacagaggacaccttatagattacccagtccaaacatcttctttaacagatgagaaaactgaaacttggagaagaagttgccacccacgctggtttctccatctataaacaggatgtatcagccagggtcccaacaggaaatagatggcacactcaaactcaagtagttcaaggatttcttgacacaggcatgatttgcagagatgtgggcttaggggaactcaggggatggtgctatgacctgagtcttactcgcagtcagttcattaccattcccaggccctagaagaagaggggaagcagttactggaatccaggaggaagaaagcaagtagagcaggcttcctgagatggacattgactttgtggtggcaacacagtcagttctagacagctttgctgggaggaaaatcaaagagttgaggatcctgacctcatgcttctccttctctctgaattcctgccgagacttcccattggccaaagccagtaagaaactggaggcatatggcagatacaggtccatttctagggcagagactatctggggcaacaaaaagaagacatccagcacagtgttcataccatgcttttctgccattgtggccatataatgaggatgaatcagataacatctaattttttcaagaccttggtgaaagggtacatgataaaagattgttaaatataacatcaagtgagagcggtttactctgaaatgtattttaagtcagagttggccttggctgtactttttcttatactattattgaacaggttcaaaaaaatgtgaatagagatcaaagcagtttaaacagatacatccacttgtgtaaatatccttgaactcccccctgccttccgctccccctcctgttgccacatccattcagcacctctagaggctgttaatacatgtaatgattgtaataaacatggtatttgctttggttccagctggctccaatcaccaaactctgtccataattcctattgtctttgcttactagacaactgcattgttaccattagtagcgacttttgttacggatttctaaatgttgatctttatatattgcactcattgttttcctcaacatgttttaaaatttaaatttaccattatattttctttttaaggatatttagaattattaaacagaacttctggtagaattgattatattgttgagaactttcacgagctaaaaccttgaaacaattttattgatattattcattctttataaagctttcaaataaaaataagcttctgctcatgcatgacttaaactggttttaagttcagcagtcttccatcagaagtttttagaggcacagaagtataataatgtctaagcaaagggaatttatattttactgtcaggaaaatttgttgcaatttgttctcaaaaacttggatccagatttagttgcagtagatattttaaatcctatgaaattacagaagttgtcataatttgagataattaaaatttcagtgacttaatgtagggactgaaagactgtggttcagaaattatagaacagccaagtaaattaacaaattaaaactggggatgctctcttgatatatagaataatattacataaaccaggaaacaactattagaaaatgctattcttttatatctattgcaaaatatagtagtttgttttccttttttttgagacagtcttgcttttcacccagactaaagggatacaatctcactgcaacctccacctcccaggttcaagcaattctcctgcctcagcctccctattagcagggattacaggcgtgtgccaccacacctggctaattttttttatttttagtagagacagggtttcgccatgctgcccaagctggtcttgaactcctgacctcaagtgatccgcctgcttcagcctcccaaagtgctgggattacaggcatgagccaccacgcctggcccagtagtttgttatttttaaatgtaggcccaggtcattgatggggttattttattagagaattaactagaaatgtaagtcttgaacaatttatactttcttttggaattgaattcctcaaagattgaaccaaaaatgatgtctctttagacagatgttgatagtttaaaatagagtgtaagcataaagttagtctaatttcactctcacttggttacaatgatttacacagactagagcaaaatcttaaggataaaaacgagatatctaaattttagctttcattgaacttattaaatgtgaagtgatgagtagatgtcatatcatatagagaactggaaagtaatggaaacgcttttctttcttttttttttttttttgagacggagtctctctgtcgcccaggctggagtgcagtggcgcgatctcagctcactgcaagctccgcctcccgggttcacgccattctcctgcctcaggctccccagtagctgggactacaagcgcccaccagagttgtaaattttgcaactctgtgaaaagtcagtgaaattatcactagttttgattttcacttcacaaaaccatactagttttctttagggagaaaaacatatgtattagaaagttttgtattgctctgatgcaaataaacagattagagcacagtttagaaaaccttcactttgacaaaataaagattctgaagtatttcaaagattatatttatattccttataaaccattatctatgtttgcatttgagatactgggggaaggaaaacagaaactcaactctcttttagagtttgacaaatgaagtatagaaaaatataagtaaggatttatataagacaaacccttatcaataaagaactttacaaagacagtacttccattacactcccagaacaaaaaccaagtatatacatcattttaaagaaaacaacaataaatcctaccaagtagaaattgtacagatcatagtctctgttgtaattcaataaaagtagaaattcaaccattcaaagatagccataaataacctgaccatatggacatcttaaaacacttttctaaattaaagataaattacatagtatttaaagatgagcaaaaatgagaaaagtttatctacaaatatgtagttagcattttattattaattaaaatggaaaagaaatgagctaaattttaactcaaaaaaaaactcaacaacaacaaagaaattaggagaaaattttaaaagataaaaatagaaatcaacaaattataaaataaaacaataatcctcccaaaatggaaataaaattatgtcagtttttttatataaataatatggctaaacttctgacaaacctgacagatataaagagaaaacaaaaatttacaacattaagaaaaagaaaatcagtataaccaaggaaacagatgaaattaaaatgattataagaaatactatgttcaaatttaagtcaatacatttttaaatctagattaagaatgttcgtaggaaaatcctttatcattacgaaaattggcttctaaagaggttgaaagctgagcagactaattaccaagaagaaattcaaaagaccgttaagacacactgctaacaaagatccagacagctctatgagcgagattgtttgaccctcaagaaactgattattcttctgttgtttgtactattccagaatataataaagattggaagcttgaatatccctgataacaaaacatgaaaaattaacacaaaaaagaaaactacagatcagcctcatttatgaatataagtcaatatcctgaatagatactagcaaatagaatttcagagtgtcttaaaagaataatacacaatcagaaatgatttattccaagaaggcaaggatgctacaatattgggaaatctgttaatgtaactaatacgtcattaataaaacaaaggcaaatgattatatggtcattattaatagacattttaaaaagcatttgataaaaattcattctacattttgagtggtaactaaattttaaaaggaatagagggaatttccctaacatatcaatattgttattatgattttgactgtctatacatttatttatcataataggtataactgactgaagtattgaaaatgaagacagtcagccttactaaagttttttaggatgggtaatcaatcagaaaccagtttcttgctgagcacagtggctcacacctgtaatcccagcattttgggaggctgaggtgggcagatcacctgaggccaggagttcatgaccagcctggccaacatggtgaaaccctatctctacaaaaaatacaaaaatattagccaggtgtggtggcgtgtgcctgtagtcccagctacctgggaggctgagacacgagactcgcttcagcctggaaggtggacattgcagtgagccaagatcgcaccattgcattccagtctgggcaacagagcaagaccctgtctaaaaagaaaaaagaaagaaataatattttccttagaacagcttaaaataaggctgtattcagattaaacttttctttttatgttgctagactttattttgaattgaggtagaaagataagtgtgtgccttcatgatatctgtgtatttctgtcaaccactcaagtggaaccttacagacagtttgcacctgcagttttgtttacagtgtgtcagggaagcaaagaagtgttcctccagctagaaatattaataaagcagaaacaagtaatgtaactaaaactagaccccagtattggacactcttcttagcaaaaacaataccttcccttttggaaatgactggtcattgaattttgcccagttatctttctaggaatgattgccttaaaaggattaatttgataggtgtataagcccttattgttgtgtttacagtactgtgataggcatttacagatataaacatagattaaggcagggccatgtcctcaggaacaaaccatattatgagctatgttacaaggtatgattttcagatagcagctggtgctgcaacagggtggtgctggcatctaggctaggccttgtagaataggtgaaatttacatatgtggagaggagaaagaagagttgcccaggctaggaaaatgatataaacaaaagcatggagacaagagcgatgggatatgcttgcataatctagtggtgttcaaacatagccaagggtgaggattagttgaagaactcaaaaaaaaaaaaaaagaagaaagggggaggcgcagtggctcatgcctgtaatcttatcactttgggaggctgaggcaggcagattgcctgagctcaggagttcgagaccagcctgagcaacatggtgaaaccccgtctctactaaaatacaaaaaaaattagccgggtgtggtggcgtgcgcctgtagtcccagctactcaggaggctgaggcaggagaattgcttgaacccgggaggcggaggttgcagtgagctgagatcatgccactgcactccagcctgggcaacagagcaagactccatctcaaaaagaaaaaaaaaaaggaaggaacaaaagaggaaaactccaacccaaaaagttcagcccacagaaagtctaattcagtggcacaagataagacctatacacctaagtttttctaaaaccccatggggattttgatgaacaggcagggttaaaaaccagtggtgcagtatagatgtgactaggatataaaggctatggaagttctatgggaggtgatgcattgatggaaaatactctgggaggtgatgcattgatagaaagatatgttggggccaaatggtaacttgagtaacattgtttcagtattgtcagttttgtgttttgttttttatttctattatatcacaaccatccctccattagatatcaaccagtattacttaaacaaaacttgacccatgtgtgaattcaaagcaaaatatgttagatgagatatagagggggaacctgtcaagaatctttttccaatttgatgttgccatataatcatctaaagacttaaaacggtcattttattatcactcataatcttgtcagttgaccggactcagctggcagttctgctctgtgtgacattgtctgggactgcagttatatgggaggtcagttggcttgaatgtccaagatggctcattcgcaggctttcagctgagagctcaactggggctgtcaaccagggcatcttcatgggcttctcacagcatgacagctgggttccaagaggtagcatctcaagagaaaaggcctaggctcaggcttcttatgacctaacattggtagtctcagacattacgtctaccatattctgtaggtcaagtaagtcactaaggccaactcagattcaatggaagatgaataaaatccatcccttgatacgagcaacagtgtgtgcaaataaggagagaaggaaattgatggcagccgccatttattgagacttgctactgcaatcttagcacaccaagtaatatagcatcaaaatatataaagcagaattttagaaaatttagatagacatccataataatacaactagacaaaacaataaggataaaagggatctgaataatataaaattctgacgtaatagatttatattctgaattccttatctgacaataaagaatgcacctcccagggtatccatagactatctgccccttcccccacaaaaggaatcacttgaaccccccctatgtactcaaatctgcagccttaacatgatatgctttcttcagccctcaacctggcaggaaaaattgttgtgtttgtttcatctattactatacgctgctctgtattaaatgagtttcttgtctttttggaatcccttcctctgcttggctttttcacacatcatatgaacaattgggttacacattctctcttaagttcttccccactttttacttgttttctgaaaagagcatcatggagaggggttttactttgattccccaagctgtcacggtaagagcagttttgacatgtcctgggtgttgtgtagacttcagggacaccatccagcagccctggcaccatcttcatatatgtgtgtgtgtgtgtgtgtgtgtgtgtgtgtgtgtgtgtgtgtgtgtgtgtgtatgtgtctgtgtgtgtgtgtgtgtatgtgtatatatatatatatatatatatatatgtacagcttttggggtacaagtggttttgggttacatggatgaattgtatagtgatgaagtctgagattttagtgcccccatcacccaggtagtgtacattttacccagtatgtagttttttctccttcacccctttctctaccctccccctttctgagtctccaaagtccattacaccactctgtatgccatcatcttctaatctgccaataatgctggcctggggattgagctgtaattgttgccatcacctgttttccatgtattattttttaaaggcccttaaagggggggagaaaaaaaacggtttctaagtttaaaaaaaatttttttggtctttgctttctgaaactcatgttattatgccatcctagttagacatagagttggaggtgggaacccagtttgtggggatgatgtaatttcctggcctgtcagtgatgagtcctatttacctattgcttctagcgcagtgtccttatatgatttataggagttctttctgaactacatcttgtcattaaaccaccaggtttagtcaggagtctaagccaacagccaccttctcagtaacacttggatccgcttgccattgcaggtcgtcacgctgtggtacagagcacccgaagtcttgctccagtccagctacgccacccccgtggatctctggagtgttggctgcatatttgcagaaatgtttcgtagaaagtaagaaatacattttgtttcactctgctttccttgaaaagagactgtggatctttgtgaatttgagtggcagcatggcatttctatcattaggggtcatgatggccagatccatctaccccaggctaccacttgcaagcctgtcctgaaaccgccttctcagtgcttacagtgttgttttatatgactgtagcttgcagcttctggaaactctgcctgggaaggaataccccactgttcttataagttacattgttttactggtgatgataggacatggtgaaaataacacatattttcgcatttttttagtgaagaaatatctcaaagtggactttatccataggaggagaaccaaggctgttaagtgtatgaaaacttttttgatggaattttgatagtgagaatagttgaaaaaaacaatatttaggctgaaaaagaataggcagtggggatgtcagtgctacttcagagcactttaaatgctgccgtgtacaggagagattagatatattcaggtactatagaggacagaaacaagaccaaggatacagaaattacaaaaagaaagatttttgttaaaaggggtagaaatctaatgattagacagttatctgaagagtggattggggtttgtgagaatagtgagttttcattgtgtgtctaagaagaggctggacctccacacattggtgatgtttcagtagcatttatagggttggtgcgtaggctagatgccctctaagttccctctaagagagcatgtgattcgtttgtttgattttcaggtcacaagaaatagccaaataatataataaagatctgccaggaaaataatccatatctgggtactaagttcagcctagtctaaattaaacagagaacctaatcataatctaatcttttttttcttttctatttttatttccatgggaaaaggtaagttaggaaacagtatattcccattgtatctttaaaatgtagctccatggtagctcacaaggaaaagaagtggtcagccattgcttgcttgttgtttggttggttttaaccaaacaaagttttgtgcatgtaacaaatttttggaactgttgctagtactcagcaaattcatctgtggctcataggataggagatcatcacaaggagatcagagtaaacagatgtttaatgcagccataccatgtgccaagtatagtgtcaaacctcttcttttatgctacctttcttagtcctaccaataagaacaaactgagatggagtggtacatttatttgtctaacattaggcagctaagaagtagcaggggtatgagtccaaaggaagcttgcaagttctattctggtgttgcttttttcccaaggagcggggagaaaaagtaatactgaaatcagctgcagtgtttgccaaacaggctaaattagtgattttgaaagtatggtccctgaaccaggaacctcagcatcaccaggcaccttgctggaaatgcaaattctcaggccccaccccagacctattggttcagaagttcttgggctgggagccagcaacctgtgtttcaacaagtcctccgatcctaatacagcctccaggataagaacccctgggttggatgacagtatgaccagggatgggcagtctttaaaagtctggctcccaggcctctcccttgagattctgattcattactgggctggggccaggaattcttatttttaaaagtaccttcagcgattcttttcatccaacaagtgtagaagacattgggttaaaggcttatggttagaaccaagaataatttactgtcaatagagcagagtaggagttaagacagtcattctacttcatcgcaggaataactcggtacagccaagagttgattacagaaatgcttattggaattatctttatgtgtctagaatagtctcaactgtaaagacagagtccttcaacaattacagacttgaatactagtcatgattgatgctaaaagtcaatttttttaagatgttaaaagaaagataaaattttatatatgtagaattaagtattcactactaaggaatttgctgtataggcaatctccatttgtggaacaaattttattttaaaatgttaaaagcattttccactgaagtgataagtggtcactggattccaagcctagcttgcagaatcctctacgacctggaacatatacaaaacacccattgtgctaattcatcaaaattttttcttctgtgggaaaattcattctatgttccaatccaagactagaggaatacttatctctccatctcagcattgggactgagaagtaggactcaaatattggaggctcaggggagggttcctttgatgatagtggcagcagtctgcttcagtttgctggaaaagtgagacattgggtagagatcctttggcacttcaaatgtgcacataagaaagtaccctttctccagaagccttgcacaaaaatagtaatttgagaaataattgcttgaaggaggaagcagtatcagaaaccaggttcatatgcctttaaggctgaaaggagagtgaatcaaggccaatcataccatccctcctagggtggctaccctgtgtccttggtatttcctatgataccccccagatatccatgtgtcatgcttcttacttatgccagatgagttctggggtccatcaccagcttgacctggttctgacttgactcctgattcagtattgacccagttgagacttcacaagccataggctcttaaagcagactcattcattgctttaggctaatcctaaatcagggaatcctagcatcttttattttttgtagagatgggggtctcactgtgctgccctggttgtcttgaacttctaaactctgggtacccacttgatgctaaggcagtagttaccaaattttgtcctttctttatcaccttcattgtttttgccatattcttatgagactggtactattatttacgtaggttttttttactactctctgtcagtttacttttttatttagcctcatcctaaacaaaagtacagtcatgtgttgcttaacgacagggttatgttctgagaaatgcattgttagacagttttgtcattttgcgaacattgtcgaatgtacttacataaatctagatggtgtagcctactacacacctaggttatatggtatagcttattgctcttaggctgccaatctgtatgacatattatcatactgactaccataggcaattgtaacacaatggtaagtatttgtgtatctaaacatagaaaagatacagtagaaatatggtataaaaaataaaaaatgatttacctatatagaatgcttatcatgaataaggcttgcaggactggaagttgctctgggtgagtcagtgagtgagtggtgagtgaattgaaggcctaggatgttactgtacactgctgtagactttataaacactgtacacttaggctacactaaatttatctaaaaatatttttctttcttcaataataacaaccttggcttactgtaacatttttacttcataaactttttaaattttttggccgggtgcagtggctcacgcctgtaatgccagcactttgggaggctgaagcaggtggattgcttgagctctggagttcgagaccagcctgggtaacatggcgaaaccctgtctctacaaaaaagacaaaaattaaccagacatggtggtgtgtgcctgtagttccagttacttggaagactgagttgggaggatcactggagcccaagagaggcagaggttgcagtgagccaagatcacaccactgcactccagcctgggcaacagaaggaggccctgtctcaaaaaaaaaaaaaaactttttaaattttttaactttttgattcttttgtaatgacacatcttaaaacacaagcaagccagatgcagtggctcactgtaacccaacactttgggaaaccagggcaggaggatcacttgagtttagaagttcaagaccaaccagggcaacatagtgagacccccatctctgcaaaaaataaaaaattagctgaacatggtagcacacatctgtagtactagctactccggaggctgaagtgggaggatcactggagcccaggagttcaagatgacagtgagctaggatcatgccactacaccctagcctagataaccttgtgtctaaaaaaaataaataaataaacacaaaaacattatacatctatacaaaatcttttctttatatcctcattctataagcttttttatttttaaattttttatttttttactttttaaacttttttgttaaaaactaagaaacacacagattagcccagacctacacagaatcaggatggtcaatatcactgtcttgcctgtccacttcttgtcccactaggagggcttcaggggcaataacatgcatggaactgtcatcccctgtgataacaatgccttcttctaggatacctcgtgaagggcctggctgagactgttgtacagttaacttctttttataagtagtagtacactctaaaataatgataaaagtataatatagtaaatacataaaccagcaacagagtcttgtattagcaaatattatgtactgtatataattatatgtgctatactttaatatgactggcagcgcaataggtttgtttacaccagcatcaccacagacatgtgaagtgagtaatgcactgcactacaataacgttaagatggctaggagataggaatcattcagcttcattataatcttttaggaccaccctcacatatgtggttcattcattgttgaccaaaacgttattatgagggtcatggctgtgtataaaaatcagagatttgaccggttatttatttgtctgatacacattagaataaatatataaccactaaaactattcagaaagttcatgcatgtttatcccctaaatcatctcacatgtcaccaacagtaatatgtcacatgttggaaaccctataacaagtgttccattcagtccacaattaacttatggagtgactgttgtatgccaggcccacttctagaggggtgacttaaatcctagtagagaaaaaatccattgcctgcacaattagttaattaaccagaggtgggataaatgctgtgaagaagtgtagagtactgtgagtgggtataatgacaagtctgtttttggagagggaagatttctcagtggaaggccagcagttgggattaaccttctttagaggtcgcatcctagttgtttatttaaaatctttgaggaatagtcatttatgtgtcagcgaggctcaccatcctccataacctagggagaagaaaagaagcaaagggagttaccatttgtcatgtgacaggcccatgccttggcagttgggggttgggggcaccttcatgtgcattatctgcttaaacccctattctgaagacttctttccagagcttacagataatgaactagaccttccacaaggagggtgaataacttgcccatgggcatacaacaatcaaatgacagagccaagaccccatgtctgcctgactcgatcgcctttgatttttctactctgctgggtttctgccattgctgttgtttgacctactaggccatatttttttctgtaatgatttgtgtattactgtgatgtagcagcaatgatattttagagtggtcaagaagcaaatcacacatgtatttaatagctttgatttagaatctgtcctgtattggaaaggttggccaattctctgtcatattattaagaggtgcatgtcttttgttcaaaaatgaaatacctaggaaatataaactcagtaaagagagtcatagggcagatggttgacaaagagccagagagtttaaatatcatctgtcactgttatctgggtttaataactgcccacactggcccacagaagtattctacaaaatgggtaagagctacatttttttatctttctcctttaattcttcatccagagtaacccatccttactccacattgaattgtattttaatactaaaaaaaaattgttataaatttggttagtggccaactagtcagcttaaaggatgagattggatggatggatggatggatggatggatggatggatggatgattggatggttgtgatagattgatttttaactatacagcaaaataaattcacagtattaactccccaggtatctattggttgccttgtaatcctagttagaactgtctgtagtttgaaagttatggggttttccaggttacagcaaagtcacataaaatgcacatttagaaaataaaacatgcggccaggcgtggtgactcacacctgtaatcccagcactttgggagcccaaggtgggtggatcacgaggtcaggagatcaagaccatcctggctaatacagtgaaaacccgtctctattaaaaatacaaaaaattagctgagcgtggtggcatgctcctgtagtcccacctactcgggaggctgaggcaggagaatcgcttgaacccaggaggtggaggttgcagtgagctgagatcgtgccactgcactccagcctgggtgacagagtgagactcagtctcaaaaaaaaaaaaaggaagaaaaaagaaaataaaacatgtttctttgaatacgaagattgtggcaagcagatagtaattcttagaagttctgagttgccagctctgccaatccatagctaagaaatgccaaatgccaccaggaagaatataacaaatagagtcactgttagaaggaaacaaacaaggcttcctgatttgtcatatattgcctcttgtctggtggcctctctaggcttgtcgtcattgatttctatgaattaaacaccagtagctgagaaactgacagtgaaactgtcctttgtgggtcagtggtcagtgagcaaatgtctttaaaatgtcactgactaccttgccaattttcccattggttactgtgttggtgcctccccatagttgagcaccctccctagtgacatccaggaaatgaggtccttcacaagctgacctgaacaccagggtgccagaaggcacgccctagcctgtgagaagaaacccatcatttcaggttaggtcgaaacacgtgcatggaaaccagggcactttagactttcagatttcttaccttttgttggatattttcctagactctgtttttgttttttttttcttcctttaaagaaccagccaaatgggaagatctctttttttttattttatttttttgaggcagagtctcgctctgtcacccaggctggagtgcagtggcacgatcttggctcactgcaagttccgcctcccgggttcacaccattctcctgcctcagcctcctgagtagctgggactacaggcgcctgcccccgtgcccggctaattttttgtatttttagtagagacggggtttcaccgtggtcttgatctcctgacctcctgatccgcccgcctcggcctcccaaagtgttgggattacaggcgtgagccaccgtgcctggctgggaagatctctttaaaaagcatttttatgagtgaggaaatatccaagatggtacccaggaaaaggtccaattttggttgagtaatgcaaacaaggtagttctaagtaagaacaaattaatactttggtaatgttattaatattgattttttaaattcttttttttttttggagacagagtctcgctctgttgcccaggctggagtgcagtggtgcaatctcggctcactgcaacctccgcctcctgggttcaagcaattctcctgcctcagcctcctgagtagctgggactacaggcacatgccgccacgcccagctaattttttgtattttagtagatacggggtttcgctgttgttgcctaggctggtctcgaaatcctgagctcaggagttcaccttggcctcccaaagtactaagattacaggcatgaggcaccgtgcctggcctgattttttaaattcttgatgtgtactttaacatgaatttgaaaaatatatttgttttcatgacatatattgagaagccaccaccagacctggcctttccctgtggcggcatctcttggtcctccaccttcccactccagggcacctccattctcatatcctaggtctgcctgttctgtgatctttaccacaaaccagattttatctgcttagtcttcttctaaccattctatcacatatcatataccactctaccattctttcttccctcttacttcccaagccattgcttccctcttactaacaactgctggtttattacttcttcccatgttcccatccctgttcttagcccccaatacctcccctcgctgactctctacttctgttactcctttcaaatctgactcttggaatccttgtcacataggaagaagttcctttcttccccaaacttttactcacaatcttcttcaaggtaactaaaacccggcctttttctgtaggtgctctatcccctcaagaagggaattgcagtgtttttagctatctgcttcttgggggcacagttccgccaaagcctcccaacttctctttgcaatcctcttacactcctgtctccccagtcctaatggcatgacctggagattttcaggacccatgattttccagcaaagagtcactacagagtaagagtaaatgttactgacagaagtgttttgcaaatacgtggagacagagcagtttgagggtcttgattgactcagcagctgcatcactcagcttgcactctccctgtcccccagcctatacacaagcatttagtgacccccgtgagaattaatgttttcttctcccttctcatgacattgtacattagggacttcatcatccaaatgttccaccactgaaaagaaagctctacttagagacagaaataagagcaactagagcacacgtgcttgtttaacacttgcatctaggcttttggtgggcatgtttcctcccctccagctcccctcctttggtctgagacccacttccatgctaggattcacttctcttcccatccccacgatccttaagccccaacctacttccacacccccaacccaacattcagccccatctccagttaattaagatgagtgaagccctcgaagtgagttccttttctctttcagttcaaaaatttctctttatcttcaccttctccttccttccctccagtttctgagaaggatgcattctccctgcttacaaggcaaatctccctcaacccttgctcttgttcctaccctgcttctaggttctcacttcatccatcatccctttctgacttgcctcgtaagagtcaaatcatgcccttgtctctccattctggaaaagattctcattcccctttgtattcccctagtctttctccttcccttcatgcccagacttcttgaaagaatagtgtctctacatgtagcctccacttcttcttcacttgctcatttcttcatcccttcccatcataaaaataatagataacatttattgcacacttactgtgagccacgctctgtacagttgacccttgaacaacataggtttgaactacacaggtccacttatatacagattattttcagtaaaagttacagcaagtgtgcctgactctcctatctccctttccaccacctccagctcttccaactctgccacccatgagacaacaagactcacccctcttcttcccctttaccctcagcctattcaatgtgaagatgagaaagatgaaaacccttatgatgatccacttcctcttaatgaatagtaaatatattttctcattctcatgattttcttaataacatttcctttctctgcttactttattataagaatacagggtataatacatacaacataccaaatatgtgttaatcagctgtttgctattggtaaggtttccagtcaatactcggccattagtagttaagtcttaggggagtcaaaagttatacatggacttttgactgcacagggggtcagcacctttaacccccatgttgttcgagggtcagctatatttggtgctttaaaatacacaatttcattttaatctcagaataactttataaggggcactgttgtcatccctatttgacaggtaagaaaactgaggcccaagaagaggctttgaaccaggattatttgacttcagagtcctcctgacacttaagctgctatattagaggttgatggtgacctcctcatcattgcatccaggagcctcctctccattctcatttcatttgatgtctgcagcatttgaatcttgtggccactcactccgtgaaagcctccctgtcctcactgttggtaaaaagcacacttctgggtgcctctgcccatatcccctttgctggctcttcatctcccttctcccaaacctaggtgtttacaaagaattctatctagataagatatagatgaccctcagatgggctccagggccaaactgcagtttcttaatggactgactcttccaccaaccacctcacagataccctttcttcactgaacccatctaaccagcttctcttaccttccctttttctgttaatggaaccctcatcccgcagccccccagctgggtcctcagagtcaccctggaatcatcttcatccttctgtatccaagtcctgtggattctgtctccatggggcccctccaatctggcccatttccatcatgacctgcatctcattaattgaggctgcctttaacagtcacccagtaacctgccaatctgtctccctgtttcctgcccattcatgtatttatgataaattaatattcttattatcactgtttttcaaaatcttgctaagactggtgtaggatccttggctctcaagaccttttgaaagaaggctccaactctattctggccattgcatatattattctccaagatgtcactattagtgaaagagacctaccttttggccccaaaacatgcctcaaagtttttctccttagaacccttgctcttctcttgtcctgggtgcccagctgcctctgtcatctttcaaaggtaaatctagaagctgcttctttaacgaagaggcctgaagcactgtactgtgcttacagtagccccatagcattgtgtctgtacctatgtcagagcactttcctgagccactatctttccatgcacacaagttgtccaccataggtgcagcaatgatgtcatgcagagcacggtgttgtttcttaggaaccagacatctaagaatgggttccagccctacccctaccagctttgccactgaaggcaaaccatcaacctctggaacttagcgtctttacctataaaatggagaggctgaaataccacatccatggaattcaaactgtgcttcagagttcttagattcccttcctatgcatagtccagagatttctcggcccttcttgttcccacactcagctttaatcagagtatcttgctttcatcttttttctatattgggcttctgagatttaaaaagaccctaaaacactggaatggatgatgtccaagattcactccaactctgatattctttgagaaagccatatcttggtcatttctgaaactcttactatgtctaatatgactaatgttaatatggaagtataaaatgtgagtattgtctttcctgtactcccctccaaactcccaaagatatccccctggatatacttccacttcttccttattatgaattcaaaagtgtgtgtgtgtgtggtgtgtgtgtgtgtgtgtgtgtgtgtgtcatgcctacttctctaccctgctattcctttttctgaacatttgcattgccatgtggaatatctataaaagtataaaccagctctgtctgggagaaatgtaatgagagccacaaatgtatttttgaattttctagtagctgcattttaagaggtagaaagaaacaagtcgaattacttttaataatatattttttttaccacagtacatccaaaatgttatcatttcaacatgtaatgaatataaatatatggatgaatgagatatttttacattctttctttttactaactgttcaaactccaatgtgtattttacacttacagcacatctcagttcagacttttttcagcacatttcaagtgctcagtagccacatgtactgattggacaatgcaggtctaagtcatcaaataaaaggataaattaaagaagaaacagagacaacttgccatttattgggaagaggggagaaaataagtcagtgcccttctcattgaagtctcattcttctgtgtcccacattgtcttcttttctggttgtgtaggggctatagatgttggggcccttgcatgtaaaaccagccaagctgatattgatgcagctgcctggccttcttctcctgaattaatggtgcttgagctcaaacttgcaagtataaagtgtttatcgacactagtggatcatcctcaatatgtccttactttaaaaaatgcttgcacctggggagcctcattgtctctgtgatctttcactccacgtgacactttaagaaacaaaaattgctgtacgaaggatcaaagtaggagatttccatgcctgttagttttatttaattttaaaaaaatttaaacgaaaaagtaaaataacatagtctggttgtaaaaacacctaatgttaatacagaagtataaaatgtgaacattgtctttcctgtacttctccaaaactcccaaagatagtcccctcgatatacttccagatcttccttgttacaaatgagagagagagagagagagagagagaaagagagagagtttataaatgctaaaatacataggtacacatgtacatatgtaaatttttctcacagaaatgggcttacccgatactcttctgtacattgcttattcgctttattttatcataatatgtcagtacctagagatttaactcatttttaaacagattaataactgtcagttcatttatttcataatttaatttcttcttgatggacatttaggggttttttggtcaaaaaatacaaacaatatttactgcaaacagtgttgcagtaaaatctttgtgcttattttatggagcattcgtccaggtatttctgtacagtaaattccagaagtgaaattacagggtcaaatgacatgcaaattttttaaattgtgctagctaaaccaaattaccctgcaaaaagtttcaactaaactctgtttttagcttgaggtgggaggtaggattgagattctcaaagatgaagaaaggttgtcaagagtaaagcaagaaaagaactcttatgtaagccttgctaccttttctaccactacattaaaacaatatcaagtggaggttggccatggtgccttacatctgtaatcccagcactttggaaggccaaaacaggagaatcacttgagctcaggagttcgagaccagtctgggcaacatggtgagaccctgtctgtacgaaaaataaaatttaaaaaaatcatctgggcatagtgatgtgctcctgtactcccagctactcagaggctgaagcaggaggatcacttgagcctgggagatggagactgcagtgagctatgattacacgactgcattccaggctaggcaacagagtgagactgtgtcaaaaatattaagtggaaaacataagtgaatatggtaattttataaaacttttgttaagtttggtttgatgcataagagacatctttcaactgtaaaattcactgtgggtttcctttttatcagttgggtagtgatagggaaggaatcaacctcattttgtcagttaaaaaaaaattatctcagatcacatcccaagcagtttttcagaccagtttttttccagtgcacaggcagttcaaagattattctacagaatttcagaagtgcctaggcttgaagaataatgtatattgagttatgatattccttccaggcagaatttaggtgcttcatgtcatttttccttcttagtcaccagtgctcatgcatcattactttggatgccttctaggtctactccttggaataactctagaagcttttccatcagctgcttacaataggaaaataatcaaactagtagtttcaagtctacctggtcataaagtctcaggtctacctggtcacatctttcagccattgagtcagatgaaaatattcagcttgaggtccagaagccacccacttttgattataaaacacagagacagtcactattttatacattgaaagccaattctttttttttttaagagaaaaacatacacatttatttaatatgttttatgtgacatgggagccttcagaaatgaagacccaaagaaacagagacaactgtgcatttttatggacagtcatgcagaagtgtggccggaagaccaagggtatgatctaatggtaataaactgggggaaacctggcaaggcctgcttgttcaggtgcattctgtgtccccgggtcttcagagataagaatgctcctatcctccaggtgtagggtgggcacctctggaatgaaagttttatggccaactctaaaggaaaattgtgtcctggatggaaagtcagttcttaccagtctaatctttagtcagtggcaaacttaccatctcatttttctcatgagcaggaggtacttcatagccctacaaaataaaaagaaccacacctgcacaaaattattctagctggggcttggacctccaatctgagttgagtctggccttggtaactcctttaaagtgtggtgtaacatttacatttgttttattgtgtttatgcaaatttactagacaataataaatatagtaaataacttcaggtaaatgtagattgctgagattttattgtatgcctacataatttcccaccaaacacaaccaaggcgctaaattacaacaaatagtaagatgtgtcaaaagattctactaggtcttgtactaaaatgatagggggtagtgacaaaccaagtaactccatacgggcccttgctgtggagtggtctgtggctgtctgatacccttgctcttttgttttgcgctgagcatctacctcccatctggtgttcctatggtggctgaaggagctggtgtctgataagacccagcacttggtttaactgagaaacattgggtatattcttacagaaataaaagatattacctagcttcttttatcccctcccttcatcttctttctcttcttccctccctccacgctcctgttctcctccttctcttccttctctttccctctctccctttgtccttctctccctcccactttaaccataggaaatatagagcattccgcatggtctttcgcctttaaccttctctggaaatacatgatagaattgggtttgtgatttattgctccagttttgcttgccaaattaaatttacaggtattagaatgtactcatagataggattgtttaagagttgttggctgcttaggagcgtgtgtgtatgtgcaaatgcacatacatgcacttttataacaggaaaaagaaaggtgtgacagacagctgcagacatatggattgtacttacttgctaattgaaacattgcaagggacaattcaagatggcagatttctagtggagattagattttaccatgaactgaactggatactaccagctcttctcttatcactggcacagagtttgctggacattcccagtctaaaacttgggaggagatccaatactttgaaagttgggcaacaagagcgtgccaaatgtgtttgcactgtgttgcccaaccatttaattgtaataatttgacatgctaatatttcaatattcagaagtaatttggaagccaattgctttatctgttttgcttatcagagtcatattgaattctctaggcatcagcatgcaataaacttgttttcaaaggcactctgttaggtggcatacagccctgattaaaaacagcactgaacttagacatgtttcatttttttctctaacctagtaccttttttacagattgcatattaacagcttatttttgcatttacctctgtaaaccctcaatcaaaatttatttaaaatattgggagcttttagtttaaagtgatacctactggcccctcaaaacatccagcattaaaaaactaagactggcagtgaaataattatcaaaattataggaagaattttcatttagccagaactgaattgaaaaatccatttggtggccaggtgcaatggctcacacctataatcccagcactttgagagaccaaggtggacagatcacttgagtccaggagtttgagacaagcctaggcaacatagggagactctgtctctacaaaaaaaaaaaaaaaaatgatccaggcatggtggcacgtgcctgtagtcccaccttgggaggctgaggtaggagaatagcttgagcctgggagattgaggctgcagtgagccatgattgtgccattgcaacccagcctgggtgacaggcttttttctgtctcagaaaaatatacatatatatatccatttggtgacacaggtttgttatgtgcacctggaaataggtagatctttattcccctccctcaagtccccttgtttcagaaacacaaggttgacttcggttcagaaaatggccagctcttcccactacctttcctgttgagagctccatagtgctgttgtcttacctactccacagtattacatcttttgctctctcgggtaagacgcttcaaataccagaaaacacatacatgcaaaaaggaactaggggtctggaggtgagaagaatgggatatttagtaagtggggacagagacataagagtaatattagaagaaacatggtagatataaacatctaagctactcagagaccattaaatatttacagaataagttcaaagtaatgtctacattgcattgactacaaattgtctggttagattgctcctcttagaaaatgaaaaacaactatctaaaagaaaaaatgattgtaacttttgaaaaaatactactagatagggtaaagtaacacttcccaaaagactcaaaaaaccaaagaaaaaaattctgaaagtgattagctaaatcagaagaaaatttctaaaagtcagtagactgagaagaatgctagaagacatactctctaaaacagaaaaaaaaaaagccacaagaattgaacactctaaaatgtgaaaacagcaatctgagatggagagaccaatgataagtggaattgtaaggaaactgagtatatagcacagttaaaatctgataggaagcagtaaaacatagaattaatactgtaggaaatggaaccattgacataaaggatgatattggaagttctcacaaaatactgagaaaaaaggaaaaaagatttataaaatggtgagaaactgacaaacatgaaggataaagaatagaaatctggcctaagaaattgatgatcttgaggccgggtgcagtggcttacacctgtgatcccagcattttggaggtcaaggcagggggattgcttaagcccaggagtttgaaaccagcctggacaacacggtgagaccctgtctctaaatacgaaaagagaaaggaaattgatggtcttaaaatgcagtaataaaagccataattaaagaaacatgttcctaaactgaggaaaaacttgagtacacaaattaaaagatcctgtaatatttgggggaaaatcattaaaaagagacattagtacttgagatgctcagggctgtgaatacagaaaactcattctggatccactaaagaataaaaaacttgttgactcacataaacggtgattccagagataggtgagcatcagggttggcttaatccagaagctgcagctccatttctctaacattcccttttctatgtcttggcatcttcaaaggctgttttcattcattggcaaagcggttacagtagttccaggtttcacatctgccctgcaggatactcagataaagagtacgttcttctgtgtcaggatttcaaacaggagccctgagatgcattcttagggctgcttgtgatgtgggcctgcagtggaaccagtgactgagaccggaacaaaggaatttgcttatcagatagatggtagattgaagaacatcagtgttgtgctacaaggtgaaaggggagacaatccatggaattcactccaaagattgacgtggagcacatttggaaaaatgtttgaattgcagggagaaagaaaagaacctacaaggataaaatacgtttctattaaagctatacacaaaggaaagaaaatcaagctggcctcagacttctctcttgttgaaccaaagccagaggagaatagggaaaattctacaactttgttgggggctaagtctataacccaagaactttattttcagctaagttgtcttaatgtgtgaaggcaacacaaagtttagtgatgcaaggattcagtttctatttgtatatttgttaaatacccattgggcatttacctgagctgagaaggatatcaaaatccatacatcaagaacaggatgccatactatgaaaggactggtatgaaagggttgccctgtagtgatactgtcacagaaccaacatccagctcttcacagaagctctgagaactatgacttcagcagacctcacctgtttgtactggccgtgttaatgaccctataggaatgtggttgggttagtatatttttcacaacagcgtctggatgaggtttaaaagcaaataatttcattatgaattattagttcttattatgagactagccctgtaattggacctcagaaattcccccctgaaaagcttcaggcagagtgtaccatcagatttaaaagtctaattaagtatgactaaaattatgtttcattttaccctacctttgactagaaagaaatggtctctaaagacctaaaaaataaatatatgaaaggctattcaaagtgaaaaaccaaagatgaaatggaaagggagatgaatgagataagaaagaattataaagacgtaaaatggagtagctaaattacagtccccttaaggcagacagcaaataacaaaattgacactttaggagaattgagaaagtgatgcaaaggcaaatagggttaaactctcaggtgggtgatgtgttccttctgatatcatgtcttgcatttttcccaattttcttaacatgcatttctctacttgaagatgatctatattaatacaaaaagtgaaattaatcaaaatgttcagtatttgtggaactgcttaataaataacaatctatcaatacgttatgaaatgttgaaattcaaaagtatttgtgctgtagtgttcctccctataagtgagcgtgttgactctcattcatgttattggattacatttccaatattcagtgttataaatattactgcatcccttacccattgttaaaatattgatgtgcttccagacccattggtaaagagcccctccttggagtgccccagctccctggatgcccctgcccctctccaagatcccagggcctccctaagattccaccactagagagttaacagctgacaccagtgttcttccatgtcaaaaaaaaaaaaaaaagttttttagtattatttcaggttatagaaatgcattcctgggagtagacatttgctgttattcctgtattctctttaagccccctgaagtcactctgtttctggcagtggtttcttccagctaccacttgcacaaatgctggtctagagcaattcattatgctccttataatatcaaagaccttctactcctagtccctaactcacttctgatctttatcctgtttcttggaccttaaaggcttctggaaatgggtaaaatttagaatttaatgtcagtgaaattcttcttttggttttgttgttgttgttgtttgttgttttggggcagatttagcattatcattcacccctgttagccatcttggcacagaaatgttcacctgaagtggtacccagaatggtcccctaatatatctacaccctaaacactatgaatttgttacattacatagcagaagggattttgcggatgtaattaaggttatgaaccttaccatagggagattattctggattatctgagggggcccaacctaatcacatgagtcctttaaaaacagaactagcctcgcaccgtggcttacgcctgtaatcccaacactttgggaggccgtggcaggaggatcccctgaagtcaggagatcgagaccagcctggccaacatggtaaaaccccatctctactaaaaatacaaaaattggctgggtgtggtggcgcatgcctgtagtcccagctactcgggaggctgaggcaggagaatcacttgaacctgggaggcagaggttgcagtgagccgagattgcaccattgcactccagcctggcaacagagcgagactccgtctaaaaaaaaaaaaagagagagaattttctcaggctagaagcaaaagagatgtgagagagagactccaagtatgagaaggatcaaacatgctttgctggctctgagacgtagcagccacattaggaaccagagagagacctctaggaacaatgggcagcccccagctgtcaactggcaaggagacagggacctcagtcttacaaccacatcagactgaattcagccaacaatcacgtatgagattggaagcagatttagccccagaacttccagaatggaacacagctctgccgacaccttgatgtcagctttgtacaactctaacagagaaccagctgagccatgccatacttggacttttgacctacagagctgtgagatgatacatgagtgttgtttttttaagccactaaattggtggtaatttgttacaacagcaatagaaattaatatgccaacatgtaaaataacagcaacaacaaaaaaaaacaacaaaagatcgtggaataaacaataaacattgcagaaaacacagttctgaatgcctgttgtcgcgctctggctgagaatgtctacacagtaatgagcaccaaatctgaaggccaaaagcactcagtaggagctttattctctgcactccactcacaacatacaaaaaggattggggttttagggggaaacatgagtgtgtatgtatctgtgtatcatttttggtaagaaaaatattttagagatgaaccattttaacaaagtggccttgttgtagtgctgtaattaaaagagggtgggtgtattgtttgtagcttcttgtttgtttacttaaagtcagtattgcatatagtaacaaattggtgagaagaaaaaactatacaaaggggagattgttttggcaatggtacatgctgtcctatttgtattttacttcttctggtacaattgtaaagcttagacaagcttttcaagatgtgttagcacaaggtctggttgttatttatggttcctaagctctgaaggctacttacctaggctcaacccaactagaaggtaaagtgaattgctttgtggtatgaattacactggtaatgtggaagtttgctgacatatgctgtaattccaaaggtagttaagcacaggagttgatgttggagccagactgtctgggtttaaatcctagctcttccacttactagctgtatagccttggccaagtgacagaaccacccgtgcctcagtttccttttctgtgaacatggataataaaactacctctctcatggtttattgtgagaattttagaatataaagtgctcaaaatggcattgtagcacatcaattggaagcaataaatgttagctataactatgattgttatccttgccttaaacatgaaaatattcatgaaattggggcattcgggctccttggacacaagaaacaattaatcccaaggatccccccaggtgaagatggcccaaccacctgtatgagagaagcaaaccaggacatccagtcacctgttaggcccttctgtccccacttcactggtgtttttaacttcaaattagtgaggctttatagataatgttggcattatagcagtccttgccataaaaatcttcattttttaacaattgacaaacgcatttctcaatctgctgtttcatggaatagtgtttcatgagataataatgggcatgctgtgaaatgatcggtcaatactaaaaatttgggaaacacgagcttaaaggtttctgtgactcagggcttatcacagccctcattattaatgtaaattttgaatttccaaagatatatacatatagtgcatagctcctcaaatatatttgaccgtgagacttttttttttcaagatatgcctcttaaaatttcctggaagtgttcttcacatccagcttgggaaacaactgccctaaaataggagcatattttaccattattatttaacatttatgaattaagatgattatgaattgtagcttgttgtaaaggagatttttatacttacatatcccaaatgtatatgtttatgtatgtgtatccatagtaaaaactaaaactagataaagcagtgaagagtctatttctcactttgtagattaaaaatggtccttgttaggtcaaattaatgatttttcccagtagttcttctctgacacagataatgagatcatcttatagatggtcacttggcaaacactcggtcatccaatacgtattgaactgggcattctaggtttgtcatccatcactttagtgaggccttttataaaataatttgtagtttcagccagcaccatttattgagatggtaagttctataaggttagtatcctgtatgtgaagaaattcctttctattgacataaacttacctctctcaaacatcagggattcatcccttcacttgatattcaagactggtgaatacaaccaagtttacttttgttgattttatatacttcagccttatcctctacccctttggtctttgtctttctcaactaaaaagtccccattttttggtttgtcacttgactcatgtcaagacctgcgaaggatgtgagatttttcccctatttgcaggttaacaaattagtctaccacagtttcatgaatgctggcaaaagacacaagactcttgggttagagacaaagcctagtttattactcacagcaatagcagtagctacagtatcagcatttgcaccagattcccaattcccataggaaaataagaaggggggcagatgacacctgcaagcacgcacgaacacacttacacacacacatacccacacacacacacgggttgtgttacaaaaacgaatccccaacatgaatcttttataatggtcagttaagtcggccttacctttgccccagcagaagctattatcatgtttaagagcaaacaaacctgctcatgctatagagggagacactatcatcttccaaagcagtttacttgaaaatctaatccagcacaaatgcagttagtgtctctacttgcaagatgtgcagaaatacaaagggcccatgcagaattgtctcccaacagggaacagctgtcccctgcgtccactacaccactgttccttcctctgagacctttcaagtttcattatacacacatcaaggtctgtagccaaacctgcaatatttagatgaaaatatattggtgcatttatttcttactatagaacttaaactccacagggcaaggatctttgctttgtttacttggatatcccagaggcagagaactatatccagcacatagtcagcattcaataaagattcgttgaatgagtatatgaatttcctgtattcttatttggatccataagtttattggctttgctgtgcagaagcagcagttatatcggtcccttcaagaaactgcctgcagagattcctggagtcatctgcctggagcattgcccactcacctcctcaactcacctcctggctgctccacgtcattcttccaatctcatcttaaatgttatttccttaaagaaacctttcctgacccagagtaaaatcagtaccttcgggtattcactctcacaacaccttgacttttttccttcatagcacttagcacagtttgcacttatatttattttagtgttttctggcttaaaacctgtttgccctatcactcatgaaactataaaccagaccctctctattttactcaccactgtataactagtacctaacagagcatggcataaagtggctactaagtaaatgaataatgaataaatgaatgaacatactgcagcctgtaggtcagagcccatcactctgtgagtagctctggcataaaatgggccaaatgcatcgtttgctccttgcctttttcaaaacagttttcccatgtttctcttcagtcacttagtctcaagatttttcttcagtagagtttagtcatttttttattttatattcccagaaagcacttaattttaaattcagaggttttatgtcattttactaatcaaaacagtataaacatattaagtcaatactggtcctagcattattcctttggtagttctaatgtttacacttaatatatttaactcagttgcataataaggaaatgaaacttacagaagaatcccatgggattcttctctcaattaatgaatgagcaaatattctttgaaaacctaccaggtgctggccaggcgcagtggctcatgcctgtaatcctagcactttgggaggccaaggtgggcagattacctgaaattgggagtttaagaccagcctggccaacatggtgaaacgctatctctactaaaaacacaaaaatttgccagatgtgatggcaggcacctgtaatcccagctactcgggaggctgaggcaggagaatcgcttgaacctgggagggagaggttgcagtgagccgagatcgcgccactgcactctggcctgggtgacacagcaagactccatctcaaaaaaaaaaaagaaaaagaaaaagaaaaaagaaaacctaccaggtgcttacaatcattctgggcactgtggaagatagcaaaaacctgaagactgagcctgaaggaggttataacttacatgagcaaataaaaatgtgcatgatgtgttagcatgtaataattagcaaacagtatcagaccaggcatatgtaagtgctgagccacatggtacagatttttaaaactgttaagagcttagaaaagtcagatattaccctgaactagaataataggggcttcctgaagttagtcctgagctggattttgaagatgtttgattggatatttaacaagaacttcattaggcaagccacaaaaatagcagtgcattcattctcagaaaagcaagacctggctgtactggaaggtataagttgggaaatagtgtcgtgtatgcacaatcaccgttggattatatgaatcacacagtctttatgactccttttccattcaattcaataccatacagagataaagccacacctttggacaaatacagccggggtgtgagccgccaaaagatggagccttactaaggagtatccacgaagtaaataaactccgaaggaaagacttggaaggtcatccaacatactcataaattccagctattgccaaagatgaaagggaagtgagagccatgaggaacaataggaaggagtgcccctgccccctcttaactgcctgtttacaggaggggaggagcagcagtgctgcccagatggcagagccaaagttagaatgaagcttcttcctcaccctaagacctctttaggaaatcctgtttgtgacggtggcttcactgtgaagtcatcaggagccccctccccgggttgcaggagcacacttctggattgaaccatggtttctaatgctgcttggaaatcttattatcatgtgcactcagcaagatagaaactgcatatcaggtgaagcttgggtcagactttattttgcaagcatttacttatctttcttgtacgatggaaatgctggcaacacaatagcttaaaaacaagataagcctcatcttttttcctgtgtgggtatgttagggaatgatggttttgatggcctttaaaaagcaggaaagggcaaagccctgtgatgccatttctttggcatttcattacttcattaagagaattatcctaaaagcctgggagctgtaatacggcttaaaaactgatgagagctgagtgaaaacaccatagactccaaaccaaattaaccagaaggttcatcccaaagagacccgcttttatattcgcacctggggtgtgtacttttccttctgccactcaagagcttttgcgtgtgggggtgaacaatttgctttccatgccaaacccgatgaaatgggatttgtcttccctctcagacaggtggccaagctgtaacagagagggctctgcctggctgcttgcctctttggacatgcagcactgtcagtgcagcgccaggccccatatctgaccctgtggcctcacaatctggaggcccacattggcagcctggggtggtgacagcttcggtcagttgttgtggagttccactggcagacaaagaagagtaggcgagtgtgctgatccaggttccttctgtatgatagaagaaacctctaaggtcctggtaatgtgtgaaccagtggaatacctgctccaataattaaagtatgagctttccttcctctttttcagggtggaccaggccttgggaaaggaattttggccttcccagactgtacacattacttaatgtgtccttctacacttattacatgcatcaggagcagatttcacaagccttcttcctatgagactaggttagtcactagggttaattattcagtagttaaaggaaatattgtgatggagggaaaaatagatttccagaagccagggagtagagggcctcagaacatcaaattgctccatgaagagagtacacagccatttttatttcagtctttgaacatgagatagtaatcgtgatttgaattctctaaacctcaaaaatattcccttcttagctgtaaatagccacttgtcccaaccccatatatccatggggagcttctgttctcccagagaaaatgcagttaattatagcaaagaaagggaccctaggtctccccttcctgccttaagaggaatctccagtatctctactcatgagataataaaatgtatcattttcagaaatttgaagaaggtaggtcaggactcaccagtgctgtttcaaaagccttttggttgtgagtgccacatctgaccactgcacagatagcactgagaaagaaaattggacccagttctctgcttttgccttccattctccctgtaagggtccacgtgaacagcaagtttggcctggtttccttaggtccctctgggcccatttcttttctttcatcatctttcctaaagctgatatgacaattccatggggaagaaacaaatagtacacttggatgaactttgcgaaacacaaagacctttcctcttatccctgattctaaagggatttttctgtatttaataagtaaataaatgagaacagttttagactgaatagtaagtgtcccatttatatcatatttgtgatgttttgaacagggtgaaggaaaccattcgtgataaagcacatggattaaaaatcgtggttgacttgtttaacagaacccaagtcataaagctcccttgaagagtactcaaaaattctagctacaaccaaagatgaaaagaaagtgaatagacctcagcaggcctgcctcctctgtttcatcctttaggttaaatgtcacctccttaaagaggctttttctattattctccaccagcatatcttattttcttcataacacttaccacttatttaatgattttctttctccctaaactgtaagcctcacaagggcagggaccacgtcagtcttatttctgtgttccctacactcagcatagtgataagcacatcacagactccaaatgtgctgaatgagtgaatgagctgctgaagcgtgctataatggcaaacctgttccaagttcttcatggacttacagactcctctggatcacctctttcttttcttagaaccaactgaagaatactacttggtctcaacatcaggcttaccagtgttattcccattagttcatttgtattttttaaaacccgggatttggccgggcgtggtggctcaagcctgtaatcccaacactttgggaggccaaggcaagcagatcacttgagtccaggagttcgagaccatcctgggcaacatggccaaaccctgtctctacaaaaaattagtcaggtgtggtggtacatgcctatagtcccagctaccttggaggctgaagtgggaggatcacctgagctcaggaggtcaaggctgcattgagctgtgatcacacaactgtattccagctttggtgacagaggtagaccctgtctcaaaaaaaaaaaaaaaaattcttttttcagcctgagtctcaagtccactagcagttccgtagtcatagccaaacgatgcgatgtagtgaagtggtcatgagagccagctttggagcatctagttgtctctatcacttcttagctcaatgatgatgagttatcattaaccatccctcaacctcagtttcctcaattgtaaaatgaggatattaatatatatcccccacatagcattgatctgaggttaaacagtatgtataaagcacttcacttttgtctttttgcattgtacatgttcagtgaaacttagccactgaacttcctgttcataatgttaaattaccttggtgtatcacttttctagaacaggataaaggatggcttcttctcagaggtaacagaagacattagaagaattcagaatcaaaaaagtccaaggacctggagtactgggattctagacagaacctcaagcgtggggtacacagcatgaactgaggtcacagtgggctgggcggcatggccaaatgactcaatagtgaagtgatgactaatcattgtagtgctccttatatctctccccctatatcccaccacagtcaccacaaaggccagagctggtcctagagtctggcaaaaggctgagcatgaaagtgagtttaaggaaacccatctaataagattaaagaaactatgcagggctctggggtcaaggcgtggggtcagctgactcctccacaaggaggagttgggggctcctacttggtcttcccttgttttccatagttcctcacagaatccagagggcagtccccaaggctctcagagtcttactctgagccacaggaagaagtaccttacgccagctcacaggggaactccaaacagtcagcaggaagaaactcagtcactcagatgaaaatgatggtgtctcaccattcttctatgcagttttctaaggggcaagacagagacatttggctgtgagacattaattaatcgaacagaatgtactttaactgttacctttcttatctaaggctgtgtggccggctcactggttttagtcaagtaaagagcaatgacttatgcatttaatgatctcactagacataatttcctttcatattggtttgtaagacaggtgctatcctctcccatctcaggtggagctcagaaggcccatttgttctaatattcctgaaccatgtaggatcagcaatctggactgttttttaaaaatcttataaaaatctgtataatgtatgcatcttatgtaagattattttttaaatagtatgtattatgttctttcatttaacaaaaatatacatggttgttgtagagcttttaaaatacgagtaaagagtataagtctatagtatcttgttataccagaaagtaagaaaatgctcaaaaaatatgggaacataccagaaaggcacagaatttagcttgaaggagccactggacaaatataaaacaatttgggcatcaaaatacataattatagtaaaggattataacctcctgaataaaattaaaatccatgagtccatgctgatataaataaagtgggagaaaagagagctttgtcttacagtagactgacaatcaataataacagagtgaatgatggagttagaaaatcatcaatggatgatgctaaaactactgagtggaaatttcatcaagagatttacgtagtgtcaaaatggctctttacaagatacttactttaaaaataaaaataggaaaagaaagaggaaagaaaaataaaccataaaccagtgaccaagagatgaccattactaatggtttaatagttatctttcaactgtttttcctatgcattataacattttaattttcttgtaaaattagatcatgcttttttgtaatctgcttttcttatataaaaatatatctggatcttatttatttgtatttaaatattccctggtacatagtaggcatgtagtaaatattggttgagtgaatgaaatttgcaagactttaaggaaagctgtgatgcacattggtgtaagtaaagtttttttcattctcatgattattcctttaggactaactcccggaagtggaatagtgatacaaagcatattcaaaaccctgagccctttgatacgtggagccaaattgccctccagaaagatttttctactttattttccctccaggggtgtattaaatgaatgtcattcaatacatttttaaggaggaagattgggattaaatgtgtgtgaaatacccagagtagacccagaagtcgtcagtcagaaagtaatagtcatccaaattcttttccctgtatctgtaggttagattctgtcaggaccaaaagctgggattagtaagagttgtcaaagccttcagtcatagaaaatggagtttttgttgatacgggaagctccaagttgggatagactcttattttcattaagccagtcatataccgtataatgtgctataccatccttcttttgtatctattgaaaaatcctatcagctgcactggacctgaagtctactatgtcaaagtaaatgataaagagaaaaacctggttcctgtttatgataggctagcattgaacatcactgttatcaacacagaacctccatgagggcccccttccatttgcactttgatgctggctacttagcacacttaacaccagctgtttccagtgccgttgccaaaggtgggcagagcaaggtgcaggatacatatacgttccatgggcagctgagcggcgtgctctcttgtgctagccagtgcctgtggcaacccttccctcctgacttcagcctccccactagttgcagccaggtggtgtattatctcctgatctatatatacattaaacatattattaaggagaacccagaagaagatatttagagagatagatacccttggattcaaaagatgagcaatcagaaaaattataccataatttgaatttgcttatattttcctttttggctttcactggctagcatgttctcaagtgatgacagttgggctgattgagagccgttagtcaaatccagtaacagtattaatctgtggttggaaatgactgttaaagtaagtgccaggctattcagttgtggtttttattccagcttccaatggtgccaggcttccagcaggaggaatagaggctgtggtaaaggaaaccgttggcaaatgaaagaaaccagaaactgtcactacccataacaacgaaacaacaaaaaaatttacagaaaaggaaggggagacaaaggaaattgtttaaagtggttgaagcctgtacagtctgatgtgatcattaggcgtgagggtgccgcagcatggtggtgcctaagacactgactccaattttccagtgagaacaggaaggctttaagcaccaaagccatgctgtccagtaatactgctgagcaagaaagcttttcttgaaggaagagaatagcgtttaattgagactatttttgtcagtctcctaacatgctcctcagaccactaatatgcaaaagaacctaaggatctggtcaccaagttacgtcaaaagagtttaccccatagtcctttttactgccttttgcagaacaaacgtttaataatgtcgctattgttcattggttatcaagaaataactcattgtaactcagaagtgcttagcaaagaatctatctcatatgtactttctttatttcaagaactttaaggaggcaggttttctacgtgtgttcaccaaagcgccaagattttttttaatattttgagaaaatattttcagtaaatctgtattcattgaatgaaatattaagtggatccataaagaagcagatgatataagtcccaggataacatcaggagaatctgaacacagtgtagctgaagcatttcatcaccccccaacaagaaaattgctattttgccaactattctaccacattgcagtgtttctaagatctacatttttttcacatttatttctaaaaatcaaaatgtgaattgcagtcaactggtgacatcttagatctgatgagatatggtggttctcctggaaaagcaaaagttagtaattttcagcatatcattggcatccaatgtttaactctgggggggtcaaaagacatcttcaagcactagtgaagaagacatatttaatttgaggacatttttattataatttagtaggtaagtgatgttccttcaaggcattcaaggaacccactctggaatagactaaagagactctgagtcagttagtgttgcccacgagggtcacagccggtcaatggcagacctggactgaggttcctgcccagtctggagggtcaacacagggtgtgttgtcctgctacctgtcagagcaggcacaaagcaagactcagtgaggcagaccccgatttgctctgaagcatccttctatctgggcattggcagaactcccaaatgagtgggtaaaggtaccaaaaaagttcagcctcaaatgagtgggtcagtaagacatgagacagtgaaacgttgttcaattgtgggacatgggattggcttggcagagtcactctgctccatgctcagcctgcagcctcctccctggtatcaaggccttcctacttccaggttcatcttttgaaatacatcatttattttcaaaatatactgatgttaataaaaataatgccaaagatatactaaaagtttattttctatatcttttggaaaatttataaatttccatataaagaaaatgaaaatgtcttttaaattttttagcatgcaaaaccacagtaatccaaagtatacattagttatgagctaaaattataccatctgaaggtgcattttatgagcaatgcatacaatgtctattaacaaattataccaacatgttatttgtaatacgttaaatacttttactcataatgctttgtaagctttaaagggccctacttaattagatgggataaatgaacacagcacaaactttcatttttttttaatgcctttcagcaagtgatcaaattttgaaatttatctcagcgttctcttttttcctgcttccccaaaacatggtaatcaccttgtatgtataccattggccttgtcgttggctgttattgcatagtagatgttgagtttttaaatttgatatttgatcttgacttaacctaagtctcagtttctccctttgaaatgaggataatgatatttacttagcagagtgttattaggagtaaatgagacaacatatgtgaaacaaagcaaagcagcccctttcctgtaataagtgttcagtaaattgaatttattattattattagctgttgatgttgaagaaaagttatttactcaacactttttaggtcacactggtttttatctacttaatttcttaaaaataatgatcttaaggtgaaattctcttacatatttccttaaaattcattcaggatttttatctagccaaaagtgatcagaagttattttatagtttgaaagaatctgaatttcattttcaaggaaaatgtgtccctcagttacaatgccaagactacgagtgatgatcaagaagtctaactggtcagtaattaaactttatattggaagtagacatttatttgcttaatattccaaaatctgactaaattgttttctaaattcaaaaggagtttttgagtaaaacagtcagttgctatttaacccgtaggtctgtaaaacctggcagccctctgtggccacatagtcttaagtacagtatagaagaaatacctcccaaggcttttgttttatgtctacatattcatctctttctaaaaccgtaagtgtagcaacatgtggctgcatttttaacaacttttattgcactttcatattaaaaagcaatataccagcaaaatttttgaagttttcatttaggaaaatacaatcgggctgggcgcagtggttcacacacctaaatcccagcactttgggaggccgaggtgggcagatcacctgaggtcaggagttcgagaccagcctggctaacatggcaaaaccccatctccactaaaaatacaaaaattagtcagcatggtggcgcatgcctgtaatcccagctacttgggaggctgaggcaggagaatcgcttgaacccaggaggcagaagttgcagtgagccaagattgcgccactgcactccagcctgggcactccgtctcaggggaagaagaaaacatatttcataaatattttatcttttttaacatatatttttaccaaaatgtaattatttattcctgtacatgctgttttttatcaaatgctgtttcatttcttatgagtgacataaagcctttgccggtgatatttttctcttatagttataaaatcaaaaatatgacagagagttgtacctctctagagaatgtataatgcaaatggatcttatatataatcatatcccctcagccttctcattcttgtaagttcatttgcttcataaataaactaaatagtttgtactgaaaccagaagttgaccttaatatttgtgttggctgggcacagtggtgcacgcctgtaatcccagcactttgcgaggctaaggcagcagatcgcttgagctcaggagttcgaaaccagcctgagcaacatggcaaaaccctgtctctacaaaacaaaaaatacaaaaattagcctggtgtggtggcatgcccctgtggtcccagctactcaggaggctgaggtgggtgaatgattgacccagaaaatggaggcttcagcaagctgagatcacttcactgcaccccagcctgggcaacagaatgagatcttgtctcaaaaaataataataataacaaatttaaaaatatttcttataacttttttttaaatgtgctacggatagattgcatttaaatacttgataaaatagtattgtttagaaatcatgattagcaaaactgattacagctcctgctcttatcacgtccctgactatgtctaagttacagaatcttctcagccatagtcctcacctaaataaggaaacgcatttatccccttatttgtcattttcctaacttcatcatctataaagttttcttagtgatctttttaaatagcacagcacggtatcatgggtaaattaaatctagagatttgggccaaagataggaccaaaataacagcattgaattttccttgcatatttagtcataatgaaacaaggaaaagaaaccacaggacagagaaaaaggagaaggaaatacagtattaagcaaaaataaataactttggaacgagtaacagttcattctatttgttcttgattggtagccttacttttactgagcaggttaattttatttctcagcagttttaactgcttcattcacatggtttattattttgtgttattttcttccatgatatggagtacgacagaagctgtgatatctgttttttagcagatgagcagagattaagtggcctgcctgcactctgggatttatttgttaatcagttacagagccagcactaagagctggatcttctgtctcctggtctatactcctttccataacatgtggtaaagtgcttctcccttgttctgaagaaatccctacagggaacctaacactgccctgatctggaaacaacattgttacctgacaggccggtttgccagggtgaccattcttaagtgttttagggagctaggattaatctttttttcccaagaggaagtagcaataaactgtgcaccaaaaataacgctttagctgctaaattctgcttagtaggtggtttcccaaagatgatccaatgcaatgagtcatccctctgagcacttactgcacattatttctttttactaatcctcggtgcttttggttgcatgttttttaacctttagagccctcctgggaggttcagagtcttctcactatgaatataaaacagactctactacatccccccacatgtccctcttgtcctttacttcctatacttttcaaatctaagataatccatcacttaggagaacagtcaggatcatgtccaaagataaaagatcagcagtaagtttctccagagttagcagcagctccatctcattcccagtataaaaatcaaaaatgtagatggatgtaagtcaatgtgtagaacccatatcaagaaaactataaaacttgattgagatacataaaaatgactttcctagatatagagaatatttgattattagaaagatattaaatattccattttcctgaacaggaagattgaatagttgtaaggatataaaaggtttccaaattaattcataggtttatgcaactccagtcagaattccagtgggatttcctgaaatgcatttggaagagttaaactggtgaaaatagccaagaattttttgttaccaaaaaaaaaaagttatgaagagaaactcctgctaccaagcactaaaatacattatgcaactacagtaataaaaataatgtggtaccagcagaagtgacagacattaatggaacagaatagagaatgagacttgaaaccctaatttaggaagtgatgcaatttatcataaatcacaaatctgggaggacagaacggcatatgcaacaaatgagaatagggtaattggtcaatttcatgggggaaaaatggtaacctgattagattctcactattcctcaccacagagcaaatgacagatggcttaaagagttacatattaaaagtgaagccataaaagaataaagaaactataggaagtatctgtgaccctagaatggagatatattttcaaagcattaagaagtcacaaacaaaaatactaatatatttgattatataaaaattgaaaacttttgttcatcagaaaataaaaacactgccaagttaaaaagcatgtgataatcttggagaaaatgaatgaatatgacaaaggtgtaatatccttaatgaataaaagagctcttaaaattaattggaaagccactagcacaccccactgtagctacactacattcctatcacactgtgtacatatcacagtgctaaatcattttatactcataatacagttcagatgacacaagacagtattagaaattcagatcttattttccattcacatattctttgtccaaaggcagtttaaggaaactaacacattacattatgctataaatacttcagaacagtttgtccacattgacacttccatttcctaaaatgaaaccctcgctggcccacagagggaaaaaaaaaaaaaaaaggctagctttgttaaccagctttatttcaacaagcacatccacatggtaagaacttcctctgatgagtcatccacagttgtcaaacaccaactttcctttgtttggcccatgcagaaatcaggtctgtggaagcacagttcaagagtctgaatcatttaattgtgttttattcatatctgaatttgcatctgtcacaaacccaatgtgtccaccgtgaaaaattgcatccttcaaatattactgaacaaaaaaccctattcaaataggtctgttctgtctagattgtctgtgaaatttctgaggaatgttgtgggctctgtttcctgtaccaaattgttgagttatcacacatcattggattctacccaaagtgtgctggataggcatattatattcagacaggataccagttgtctttaccattcataaaggaaaaagaaaagattactcctgctccctgccataagatataaactaagaagtgaaaatgtgtgtacccatagtttttttaatgtgtccttgatttcttttcttcaccaagatttgagttttattcagtcatagctttgttatgcactttcttgtcaccctgtacttgttcaaaactaaggactatagtcaagactcagatcctgccctgggattggtgccatcttagcttgtttggaaaaaaaaaaaaaaaaaaaaaaagatctttagagataccatcatatccatttgtatataaaaagagaaaagaatggaagtgatgctgtgtaatttattttcatctatttactctattttccaaattttccacaatgcgtatatattttataatcaagataatctgttactttttaaattttttatttttaatttttgtggatacatagtagatatatatggggtacatgagatgttttgatataggtatgcaataatttgttatttttaacagtacccatgatgaatcattcaaaatataaattcagtaaataagctttttgaaaaagttaaacttgctgttgggccagtaaaattttattctgataaaataaatgctagcttttgttgattaatcaccacactaaactcacaatactagacactggtagacaacatcactgacattcaagggccagagcccttatttatatgttgagcacattataattttttaaggaaaaaatgagaaaatcagtctttcagtgtttggactatttttaaccaatgattgaatccaatttgagaatatttttagatcatttgtaatgctttatgactgatacttttggttccattttgagcaaagcttctttttttctttttaaagaagccacttcagccaacagacacttccatttcagaaaatgtctagtgattattttcccccaaaggcaacatgaaaaccttcagcctcagaaagatgtcattttgctgacatccggctgatgtcaatattagagtttttgcaagagaaaggtgtgtgagcatagaggtgatgataattatatactcaaagacacacccacaacagagcccataagactccctttggcaaaaaatgttgtattgaagacaaaaccagtggattcagaggttaaaagtaagaagtagttttgagagccacattttagttaccgtaatgtatgtagtatttgctgttgaaatgtctctattagacagacttacttttgtattttctaatttttattccttgtatcaatgttgctttgaagtcagcctatcatgagagaaaacttgactcacttagctagttcattttcagaggtgtgtgttactgattaatgtagcactctctcttgctccacctacacagcacttcagaatcattctcaacccagcttacagcctatcgctaccaaccagactggatgaaatctccttgtcatcctatatgtgtaggtagctccaccccagtgaccccctagttgtggttgcctccttagatccagcacttcctgcagactattaatttaaccatgtagacctaaccataggcaatgctctttccctgcaaaagaggcaaggtgcgtatagttttacgaagtcatttactgaaagagagaaataacatcttgaattgtggtatgaggaggggactccccccagtctagtcccttattacacagtagcagtgagttattaggaaaaaagagaataaaacctgtctgtctggaccactttcattctgattgttttgaggtatgctcatttgatttttttaaacagcctgccccactgaaataacaaagaacttaatttttttaaaaaattctgtcttctacagcctcttgctctgagtctcctggatagggtgaccaaccatcccagtttgcctgggacagagaggtttcccaggacacagcattttcagtactgacactgggacaatcttgggcaaactgggctcgttggttaccctattcctgggccctctcctacccaaatgaccaggtattgaagaacaacagtgctaaggttcctactcatgaacgaattccctggtaaagcttttccttctctcccaggaaggcacagtataaagcaagactgggagttgtgagacagaataagtttattatgtggtatggtgaggttctaatttggtcgagtgatatctctagttcagagttctgctgcagagtgaaggcaattgataagccctgagcccagttaataatcagagcctcactaattaatcagtggcactcattttgccaggtgtccctgatcgtctctaatcatctattctgtctccacaccacaccatcacccttgctccaaatgaccttccagcatgttgtcattaaagtttttcaatgctaagcccaatttaaactatagtgagtattaaagctagaatttccacaagggagcagaagggttatccaagctctgtggttatatgaagagacagaagacagtattccccggagtgttgagcctgcgatatctgactattaaagaagcccatagtgacaggagtgattccatgggggtaccatatccttgacttgcctccaattttttaataatactaatataaagtcttcacccttgtgaattatagcttccgaagtttgactcagatttattttcctggttctaaaactttctttcatttgcaaagtttttcagtacttgctagtcgcctaacttcatggttagagtgagaattaaaatgcaataatgcattaggaacccagcccttggaaagtgctaaatacatcatcatttctttcccagccttaagaatccccctgaacagtgtgattggagagcaagagataagggaggctttggaagggaaataaataaataaataaataaataaataatgtaatttggcaagaaaaaatatcaaaaagtatataaaatgaagagttggatcctagtcacagaaagacaaatcacatttattgctgctatagtagacaagaatgtgccagcccagctttttaattttaaaattatggaagatatattacattcattaatatgaagaaggacgtgttactgactgaatgtttgtgtccctcccaaaattcttacattgaagccctaacccccaatgtgatgctatttggagatggggcttttgggagattattaggattaaatgaggtcatgaggatggggctcccatgattggattagtgccattataagaagagacaccaaagagcataccctctctctagccacgtgagtgcatagcaagaaggcaggtacaagccaggaagagggatcttaccagaaccctacattgttgagttaccatgctagcaccctgatctcaggctttccaccctacagaaccacaagaaaattaatttctgttgtttaagccacccagtttgcagtactccattattgcagcctgagtagactaaggcagggagagatgacactgggagaataaaaatgaaattatttgaatatttcagagaagtaactatttcttggaaatgggagatacccattcaatttttgtcatagtgattagaaatgactttttcatctcaacgaccgcttagtcttattttagtcatatgtaaagttgactcagtaaatatattaatttatgagttttgtaatgtttcagaaatctgaagtagtttggtgagttctagtttaattttaatcctcaattttgagttgaaaaatggtagggtttgtccctctgctctccctctctttctttctctccatctctttctctagaggaagttactcatagtccagtaaatatgagccctctgtggataaataaattattcacatcggtaacaaggaaaaattaattcagctatttatttttaaggaaattaccagactcatagtccctcctatggacagggatgccagcacactctctaacttgtgttagagacacaagtctttcctctaagtggcacctcccttccctggcagaggttttttcctatcagtctgggtctctgtgacggaacttcgtctcagattcttctttctgccacggtctttccttgtcattacttgggctttaaattgtttttttccgtgctctttcccaccagcccttctccctttctggaccggttttacttcaagtgcgtctttcccctccccactctccttaatcctataccgttttgcctttgctacactttttctcaacacttctctttctttgtcttccagggagaccatccctagccttcatacctggctgaagcaagcactggagggcaaagttcctatcctgcttgcctcttgctgcttctgtgaaggttttcgcaaggttttggatataggagaataattgtcagccagccccagtttttaaatacacattatttgcaggcagatattgtctggtgccacaggcagattaaagcataaacagatacaacaatataaattggatttggagttggctcttggtgtgtatacatctaatcgtatatatgtacctctgcagatacacctgcttgcacttgaattacccagagatgaaccaaggaagtgaattttgagacaggaggagctgaagttgaagaaaagaagggacagaaagccttcttgcaggggggagcaataaccactcagcatgtattaattgagttccaattatagccaaactgggcagtaaattcagtactctgaatacagaatcaagtgagggttggccctgtcctcagagaacttccagtttgtgtgtagaaatcaacaggtaaacgaatataatagagttgccttagtattaaagtagggaatgaagaagtgaggtgaacagatcatatatgtgcagtgtatggcaagaggcaatgttgtcgggtttttttttcttctgattttaaaactaacactcataaaacgcagtatagaaaagtagaaaaatgcagaaagcaaatcattcatcatctcaccatccaaagtgaagtataagataatagtttcataccagtgcctttttttgcatgcatagacatttttggtttattatttaaccctaatctgataaatcaggtgtttggaaagattcagatcataacaatagattatcaaaacttgcggagcacatgtctccagacaagtacttgattgaatatatggtaaaatgtttgtcactatactttaataccgcatgcttaaagcctttcatatatgtagacctaacagttttcctagcagttttttttttaatttatttttgtgtgtatgtggatggtttccaaatatttagcagtttttttaccctcctcctgaatccgtaatgtttgcttggaaatataatttcttaaccaccttttttaacagctctatcaaaatataattgatataaccacacaattcaccaatataaatagtacaattcagtgtttttttcagtttagcatattcacagagttgtaccactaccaccacagtcgattttagaacatttttatctccccaaaaagaaacgccatacccattagcagtctgtcttactcagcttgggctgctaacaaaataccatgaactggattggcttataaacagcaaaaagttcttcctcacagttctggaggctgggaagtccaaggtcagagccagtatctggagagggttcatttcctcattcattgatgatcgtcatcttgctgtgtcttcatatggtgaaagggacaagggagccttccagggtctctcttataagggcactaatgccttttatgacataattacctcccaaaggccccagttcctaatgccatcaccttaggaattaggatttcaacacaggaaattttcaggggcacagaccttcagtctgtatacagtcagttccctcaaatcccctagtcccaggcaaccaccagtctactttctgttcgtataaatttacattgtctatataaatggaatcacattatgtgtggttgtttgtgactggcttcttttactgagcataatggtttcaagggtcctccaggtagtctcagtatatcattctttttatgactcagtgatattccattgtaagtccataccacattctgtttatccatttatcagttgatggacgttaggattgtttccactttttggctattatgaataatgctgctataaatattcatgtacaagtttttatgtggacctgtatgttaatgcttttgggtatatacataggtatgccaaactaccttttttgcatattattcattctccaatttcagtgaaatgttttatataattttattatacaaggaaaatatttaaaactaaatcagttaccttctaatctcctctccccaccacctccatctatctcattctgccagactttactaataatataatacaaacttaaaatcatgcttctcctctcaagtcatgttcacatttccatcaagttctgatcatcttcttctaaatgtctttgcatctctagccatttccttgtcccacctagttgaggcccttgtcatcttacttgtacactgacttcccagttgacctccttggcttggtttccatcccttcttattgactcagtaaacccctgccaaattagtctttctaaaacactttttctatattgctgttcattgaagtcagacaaatcagcttagccacttactcatctgtgtttccttagatgttactttacttcccatctgtaaaagtaagttaatcaaaccacttcctaacattctattaagatgaaacgattaccgcgacttctgtctcccactggtaaaatgaggtaaacttctattcggtgattctgcatttgtatatcttgtctccttgtctcctgctattaatgtataaatacatattatatgtatatcatatgacttacattatatgtatattacatacattataattatatactttgaaatgtaatttatattttttatatgtgtattttttagtatttcccagcaccaattacagccgcatgtacttactgggtaatcagtcaattagtgtgtactaagtagatcagttaattgattttctgcttcatccagttatttgaataggtggtaattgtaaggtgataagttaacaattttaacttaactgataacaactctagaatagaatgtggtaatgagtataaaataatagatattctccagtaatatttttttgaaagatcactttatgaacatggaaaattcttccactaatcaagaaaaatagctgtcaaagcatagctgcaggtcaaatacaggttacaaaggtgttctataggttaacccatgacttccttgtcttttgagtacaatgaaattattgtaactaaatgaaactttcatcccctgttatgcatgaatcatttcctttctataacagacataccagtatacacttctcatctgttaaaaaacatacccaacttctaaatgttgtttgccactgttactgagattacaaatgatatctatgcatttttgagttgtttttttaaaaaggcatataatctgaaacttagtccccttggtaatttgacctgagaaaatttatctcactgatagacttaaatacttggtgaggtttttggttttttttgttttgttttgttttgttttgtttttttttgcaaaactgcatacaggaagtgatattgccaattcagaattaattaatccttattgaaaaatgtggcattcatcctttagaaaattcttttcttgataaagttgtaagagctgtaacatgtaagcaatatttagtgaccccagaggaaagactgttagacttaaatgtgacttggacctcaccacatggtggcaaatggttccttcctttctacttcactgtgtgaaatactttacatgattatctgtataatattggccaggaataagagaggtgtgtgtgtgtgtgtgtgtgtgtgtgtgtgtgtgtgtgtttagttaccacttaattgtaactctgctataagctgggcattctagtagatgagatatattcataatctcacttagttgatcctatgaggtaagtatcattctttccattttacaaatgaagcaactaagtcaaagaaattaagagactttcctaagatcatataggaagaaacagctaaatagagattcactcccaggacagtccatcgccaaacagaccctttccccagtcaaaaaaaaatcttgaaaaatcagcatgttaactaaaaagaaataaaaggagaggggaatattatgcccttaattaagccatgtaacatctccagtactcagtttcctcatctgaaaatagggataattgtactactacatttctcctggaatttttgtgagaatcaaatgagattatgtttggggcacttggcactaggccagatacaacattcatgctcaataaattataattgttaagattccattttttgcctttttttggaagttttagaaaaaaacttggacttctcaccttgtcatcttttaagacctgtcaagatgtctttcagagcgcaacttcgtgattctttatgaatttggctgcattagtgatatgcaggtggcttatattagttttataggactgctgcaacaaaataccagactggattgcttaaccaacaaaagcttattttctcacagttctggaggctggaagtccaagatgaaggtgtcagcaggtttggtttcttctgagggctctcttttaggcttaccttctcatggttctcacatgtttatttctctgtgtgcatgtgcacccctgatgtctctttgtgtccaaatggcttcttcttacaaggaaaacagtcagatttgattagggcccaccctatcttattttaattacttgtttaaaggctctatctccaaatacagttaaattcggagatcttgggagttgggcttcaacatgaatttgggggaaaaaaattcagcccatcaccttgcaataagtaaattcttttccactgcatttggaaatcattattttcaggaatagtaacattcatagaaagtatggttgagaaacgttaaggtgtgttctaaccactgaaatgctatgactgcaggattctccatatatggccatatatagtgagttcatttattgtgcacagaaaatatttaagaggtcaagtttaaggctgtataatttgatatataatataaaaagagatatgatacctgataatagactacaactattttagtacattaatgttgaaaattacctgtttatggcatttgttgaggaaggaatcagggaacgtttacttgtgtaccataggtgtatgcaaaatgaaataaaatgtttagtaactgcatctgtcagagtaaagctctatggcagggatttatagggaaacctagagaagtctcctccctcaaggggctacttgatcttcttggagaaatgccagaaatgtcacaaaatgaccttttttaattgccagttaaatgctcaatgtagacaaggaaggctgtgtgtttgaagcagacacaattgcctctaaagcccagagttaagatttagaacttgtaatggttagctgccataatattgggaggaagaaaagtggtataattagaaaaatagacccagaggtggttcactgcagcattgaggacaaatgaaaggagagagacccatgaggaagtactctgatagcagagtagtatggaaaaagtgctctgagaaatatcaaagaatctcacctatttatggttcgagactaggatggtggtatgttccaccttatcacgaagttaagcagatctttgaaacctggaactgaatttgacggtagcactgttgtaagaatgactgcaaacagaatgcccgtgattgtaaaacatggaattcatctaccaccaggtattcatgagagatcctaacccatacatgaaatgcagggaaaaccttcacttaccaaaggaaaaatgtctcaattttttttacttcttcccaacccataaagaatattttgcttcctgtgaaacaatgataatggcaaatatgattgaaatgtaatctgagaacatttcttatttaaaaatgtatctttattcttttaggcctctttttcgtggaagttcagatgttgatcaactaggaaaaatcttggagtaagtaataattataattttacaccagtgtccatagcattaaaacatttacagtgactttcctctgacatgcatatcatgtgtttatctcttgtctttcttacttcaagcagctgctgcagacagtgttactatttgtgtggtgagtggagacatggtagaagtgccgttttatgcagagccctaactgctctgctctggaagcttgtatgttgcttgtgtggatctttttgctgctcctctttcttcgtgtggctgagctccagttcttttagttcaaatacattttctgcttgtggtcatttcaaaagcacccaccatcagagatgggatgcctggtgaccaagtacccatccttgtccagtgagcttcctgtccccactgagtatccttggtcacccaggttggttctgcgttgttttgttttgttttcctgggcgaaggatggtatgctacacatctcatttttctttggagcaccaaaatagaaaatgagaaccctaagtctttggcaaaataactctgcaactttgagaaagtcatttaaaacacctcgtgaagggcttacacagtgcctggcacatagtaagcactttaaaaagttatctattactgttactattagagttcatcattaattatttaaccttttatttccttaacttcatctgagaaatgaaactctgacttaaattctctataagatcctttcttgtgctcaaattctttggtttcagttacatcgctccttgatgatttacatagtttcattcatgtctgcatgttcatgcatgtatgcattcatgtttctagaatgtaactggggcacttcttctgacaaagcatgcagtgtggcatccttttttggttttttgtgtttgaaaggcccatccaaattggagtggagtaggaaaaaagtgggagttctagaccaaaaatagccctgatctttggtctgtgacattttataggaatcccagtgatttttatgaaattcgaagtctgtaagactgaaaaaaaaaaaaaaaccacccctaaagaacagattttcatatcagcactgtctactcaagcgtgactgcttaaaacagttaataaaactggaacctgattttgttcttttagtgactagaagcagctagacttctgttaatgccagtgctactgctgagtcagaacatagtagctttaaggcctgaataacatttgctagttttttatgcctgggggcttcctgggtccagggcaggtgatgctactgctcctactactgaccactctgtacagtggataaattcaacacaaagccttcatgttacccctgcttctgaatggcaagttatttaatcactcgatgaactcccatctatttttccccatgactgttgaatatattttgtgtgcatgtgatcataaagaggaaactagggaaagcagacatactgatgaccttctgttaaaaggaaagagaatcttgactaaagtcagcttgccaggacttgaaagccatcaccttctttcccttatttatactacctgacagttgtgtctacctccagcactgatgtctgcaatcttgttaacattgttagtgcccccttagtacatgaggccagtgaaatggaccagaaggaacatttgaccggcatgtttgacctgcttccaaagaaaagccagttctgcttttggcaaagtcctgacaatcgtaggttgccaacagcaaagaagctgtagagttctatggtttgtgcctttagattttactttgtggtttctggcattgtgtcatcaaaattatgttctgtttcctctgaatgcattaccttgccagagaaaagggacaatgctgcaccctagcgtcactgctgaagtacttgaaaaaatatttctgtctcctccatcactgccatttatagattttgtgccctgttgggcttgccaatataaatgtcaacttttaaggcttatattcagctgtccaaatagtggaattaaatgcaagcatttttaatggacctatcagaatttcacaacacatatttgggccataaaagttcattctggacatgaaaccaaattttttttaaggaaagccatattcacatactcttttttatttttttctttggagacaaggtcttgccctgttgtccaggctggagtacagtggtgcgatcttggctcactgaagccttggccttccgagctcaagtaatcctcctatctaagcctcccaagtagctgggactacaggcacagggcaccacaaccagctaatttttatattttttatagagatggagtttcaccatgttgcccaggctggtcttgaactcctggggtcaagtggtccacttgcctcggccttccaaactgctgggattacagccaccccacctggtccatgttcacatactcttaaagggaaaaacatttctgtgtttaggaagatttaagccttcaagtaatagcaagtattaaaagtgaaacaatagttttagcctgtgacatcttagagcatttttaagaatgatgtcatagctaaatggaaataaaatattggaatagagagaacggaactcactctggactctgtgactgagcttgctatctgtgactttggcagttcattttattcctcattctcaatttccccatctataaaatgagactaataacacctgacttacatgtcttaggaaattattacaggaatcagaggaggtgatagacttaaagttttatatatatagttatgtgtttgtttaaaattttatataaaattatataaagttatttgtatatgtacacacatacaaacagagatgtgctgttcctctgaaggcttttggcattcagttgatcatatacttgcaagatgtaattagatgtagatacattcaaagccacaaataaaaaagattttaaatatttctaggagttattaatataatcaatttctagctgactggtgaatatacacaaaaatattgatacacatagacctgacaactaaaaaggaatgaaaggaaatttttaaagctctctaacaagcatttttcattccctcctctgccctgtcccattgtatccagacacttacacgtgcatttcttttcataattaatagtggtatttttggtttttttctttttacttctattgtaggctgtactattgaacaaatctatatattgctcattgtcatttctatttattgcttctagtaaatatgtccatgaatctgtctttgcctcaataatgtagctctctcagtatgcctgatagaggccgaattacagtgtcttccccagacacccaggcagagaagccatgatgacagggttatcttcccagctgaagtctatggcctgggctccgtgtaggtgagggaaggggaaatgaagtgctacagatcttgagacctgtaccacatcttcctgaaatctggaagtacattcataagaacacctcttcctgggccttagtcccaacaagtagaggccaagcagaagaccctaatgtgggccagcacaatttctaactgtagttaaaattatttgttccagtatttgaatagctatgtaccccgtccactaaactatgattttatttttggttcagagttatacagtctgtgtgagaaagaagtccctgcatcctctgattttctctgttcaaacctacttacgacctatatgtaaactataaataatatctatacaatgtataagttatgtaagtccattgacccattaattttttaaagaatcttaagttatacatagatacaagcagttcatattttaagtgtggtagtgatgtatttcctatgcatcttgtattaataacattttctaattataataatagtaggcagtgtattgattgataattgactgtgtgtgatgtatatcaggtgctgtgctttgtactttaaattataaatttatatattactataaattcaaataaagtataactgatcctcattacaactgtaagttattatcattgtatacataaagacactaagggtcatagatgttaagtaatttgtccttacctgccagtaagtggcaggtgcaggatttgaacccaaatctgcctatttccgaagcctgtgcttatcacttgctgttctttccacatttctgatcccagaatggttttcaggggaaatataaataatagtcttttaatttactgtttgctcactttggaataccacagacttccttttataaaatcatgtttgtataatgcaggactagcacgttttagcctcatttttccttctgattctaatgtatatatttaatatgtagggaattgctctttaaccaaaaatgcaaccaaattgatatgttaataaaccatgttggatgagcatcataaaatcatgtcaatactggggtgttcgatcaaaacacaaaaagcattcttggacataaaggaagatatgtaccagtatgggtctcctctgaatacaataagtcctgctttgtcactaagtcagagcttactgcctggtaatatattttctatttctacatcatcccttacatttagtgtctgctaccagagcaatctcttatctcctcccactgaattttacaattcttctgtgagattaccctctcccccatggccaccatattgcagtaggacagagataaacagagaccctgccagtgataaagtgaaggtctcctgggactctgccccccatgtctcccccttagattttgcctttctctggaaattgatgagaaaacagcttctgcatagtagctaatgcttatgtccatgtgtggttcttttgtagcgtgattggactcccaggagaagaagactggcctagagatgttgcccttcccaggcaggcttttcattcaaaatctgcccaaccaattgagaagtttgtaacagatatcgatgaactaggcaaagacctacttctggtaagtttttctgatgtcaagctcgtctgcactgtgccagtgagacacctgctctacccagactgggtggtgggcacaaatatcagttcagtagctgctataggcatcacatgccacagccacatggagcaggaggcaacagtccctccagaggtttcattttcacacttgtagcagctggtggcttttgattctggaatgtctttctgatccacatttttttaaatctgccatctttgaatgtttatttcaatgcaggtttagaagcctctcaattcactttgacatatgtttctttagaagtaaatattatgtttcctttcttacagtttcatgctactttaagtaatttgtttgtcattttaacgtgccttttcttaaacattcacaactttggggagatgtttttccaaaagaactatatagcaatacttcttctagttgctgatttatttaataagtatttagtgtgccagggacatataaaatacctcactgaaaataaggacttctgtgctctgagactcttaatgctcaaccatatacataatttcctatacttggaggccagaacaataggtagaaaagtgtacctgttgggctgttcttgatgtctgaaacccagtgagtaatgagtgtctgctttacctcctgaattaacagcctttgatatctgcttctgcccgtgggtgaagcacaggtcttctccatgtgtctcatgctggggcccatgccagagaggcagcagctccctggggcatgtttttctcatgatagaaggtatcgatgctccagaagggcaagcagaaatatgcaatgcccctgaaggtccatacttggaagaagtacccgccactctgcccatgttccattggccaaagcaagttccatgcctaaggccaacttgaatggaggaaagaatgctccccctatggtgagaggggagagaaaagagggaatatgtactaaaagttatccaatctaccatagtatccaactcttgactaagttgtgattccaaaagctcattttataagtaaactatttggcaattaaactaaattttcttgcagaaacaatattattaacacaaagttttttaattaaccctcaacctggcaaccttgttcctgaagtagagcaataatagaacttaaacaccttttttttaaccatatttctataggacaaaatgtattaagacttccaacgtgagattctcccacacccccacatttggctaaggtgttctccttctctccaccctcttcccagctttaagccatcagtgtagctgtgaggaaagggcttcctctcacataatcctctagagacatgtctctgtattgtgaatgtattcccacagctcttttctcttctttcctatgtcctggagattaaatgccactacctaattccactacctaattttctccttcttgggctctgggaaaagagaactcaggctcaggaattttgcccctgctttccggtcctttgggaattcagcccttgcaaagcttttctagagatgtttcttgctgttagagacagttggaacctttctacagacaagctctttcttccacttgccctttagctcttgatgttcagaagatcctatagggaggctagcaaccatggactgatggggatctcaggataaatcagatttcagaggacccaagaatttgcctgaaattacacatagaactttctgtttgtatttgtttttctaggtcagtagccttcgatagaatattagagaggtccctaatccagttggaacctgactaggactgtgagcaggagtcctattaatatcatggttatgcagacctcttaagtggaagaggtcttccattaaccatgataatgtgaagtctgtaaattacatagaagactggaatgcatagacatttcatatacccagttcactttaggatggagaagccagtgtggcttccctgctacttgtgagctcctgtggcaatgaggaggtcttactcatcactaattagtgcttgccacctgctaggcacccagcaggaggcgttgatggaaggagaggaggaggatttgagtaacaagattacctgaggtaggggtggaaatgagactgaaattagggacacattctaactaatttaggtatggacagtttgggaatagagattgctgctactgcaaaggtttccctttccctcctttcaccttctacctcagtagctcagccaaactgcccaaaccacttgactaggaccaggagcttcttaagcgcaggcaccagctcattcaccttggtagccctacacttgagctgtcagcctggaatagagtttagtgactcgaactgaatctaatggtcccctgagagagctactgctagccatgtggcaccttggtattaattaaaaggaagatagccctgcctctgagtggtgtagccttgaggcaggataataagttacggtgaagtctccgactgtagcactaagtttgctagcactggaagaattactaaataaagttatatgcatactttaatggcttagtgagaaatcctgggcaggaaacagtccataggcacccaaaagggtcttctcctgagggacattttatacattagggatatatatgagtactgtctccatattatttagtgtccctttaaataaatactcattcccactgtagatgcgcttaacatatgacagtgaataaagggataactctgtaagtacattatttacattgatgtattgtatatcaaccaattatttttttctttattacagaagtgtttgacatttaacccagccaaaagaatatctgcctacagtgccctgtctcacccatacttccaggacctggaaaggtgcaaagaaaacctggattcccacctgccgcccagccagaacacctcggagctgaatacagcctgaggcctcagcagccgccttaagctgatcctgcggagaacacccttggtggcttatgggtccccctcagcaagccctacagagctgtggaggattgctatctggaggccttccagctgctgtcttctggacaggctctgcttctccaaggaaaccgcctagtttactgttttgaaatcaatgcaagagtgattgcagctttatgttcatttgtttgtttgtttgtctgtttgtttcaagaacctggaaaaattccagaagaagagaagctgctgaccaattgtgctgccatttgatttttctaaccttgaatgctgccagtgtggagtgggtaatccaggcacagctgagttatgatgtaatctctctgcagctgccgggcctgatttggtacttttgagtgtgtgtgtgcatgtgtgtgtgtgtgtgtgtgtgtgtgtgtgtgtatgtgagagattctgtgatcttttaaagtgttactttttgtaaacgacaagaataattcaattttaaagactcaaggtggtcagtaaataacaggcatttgttcactgaaggtgattcaccaaaatagtcttctcaaattagaaagttaaccccatgtcctcagcatttcttttctggccaaaagcagtaaatttgctagcagtaaaagatgaagttttatacacacagcaaaaaggagaaaaaattctagtatattttaagagatgtgcatgcattctatttagtcttcagaatgctgaatttacttgttgtaagtctattttaaccttctgtatgacatcatgctttatcatttcttttggaaaatagcctgtaagctttttattacttgctataggtttagggagtgtacctcagatagattttaaaaaaaagaatagaaagcctttatttcctggtttgaaattcctttcttccctttttttgttgttgttattgttgtttgttgttgttattttgtttttgtttttaggaatttgtcagaaactctttcctgttttggtttggagagtagttctctctaactagagacaggagtggccttgaaattttcctcatctattacactgtactttctgccacacactgccttgttggcaaagtatccatcttgt

SEQ ID NO: 24866 - DNA, 651 bp, Homo Sapiens
cggctgcgaagtctgtaaacctggtggccaacatctcagttataagaaatgcacatctccgctcaaggtcccctgggacagtgcaaggaaagaaagaagcctgcggtgaaagtgacactgagtgattgtaagtcaggagactttccttcggtttctgcctttgatggcaagaggtggagattgtggcggcgattacagaaaacatctgggaagacaagttgctgtttttatgggaatcgcaggcttggaagagacagaagcaattccagaaataaattggaaattgaagatttaaacaatgttgttttaaaatattctaacttcaaagaatgatgccagaaacttaaaaaggggctgcgcagagtagcaggggccctggagggcgcggcctgaatcctgattgcccttctgctgagaggacacacgcagctgaagatgaatttgggaaaagtagccgcttgctactttaactatggaagagcagggccacagtgagatggaaataatcccatcagagtctcacccccacattcaattactgaaaagcaatcgggaacttctggtcactcacatccgcaatactcagtgtctggtggacaacttgctgaagaatgactacttctcggccgaagatgcggagattgtgtgtgc

SEQ ID NO: 24867 - DNA, 3190 bp, Homo Sapiens
gggcatcctcacttccggattcttgttgctctacccaacaaggacagcaggggctcgagaaaggaactggtgaaaccctgatccatctgaaagtcaactctgcgtgctcctttctccatcccttcctcactctggagcagcctttccttcaggcttgccctaatgtttgggctgccggggagggggccaggacaagggaagaggcatccggagctcacagtgggggtgggaacagatttttgtgggggcatctctaatgctcacttatatctccctagaacatcactcttttggtgctgtgtccttcaaatgtatgtcaacagtggtggctgaaaagggactgctttggggaaaacaggacccaaccattcacccagaattgacccattaaatctcttccagtcctagtgttccctgagcccctcttggcacatatataagtaagctagaaattacaataagggacagtccattcctctatgacagcttgctggactgattcatgacaaagtggagaaatgtactcaatactccccggttaacacagtctagaaacagagtttctttatggatatccacacccaagtcatccaaactttcttgattccttttcactgccatcaaggtcctctagaaattgagtttaggtatcatcctttgaaaagttcccaagatttctaccaggaggtacacacaggcgttccctgtctagggcaggaggactatcctagcttgaccttctgatccactaaaataagactggcgtatgatgcctgtcatcagaacagactggcacaagtagtgacatcaatgaaccacagcacaatcttccaagtgatgtctactctccacctaaaatggaattttccccatgaccttgtaaaacataattgtcacatcttccatacccctcctgacagcccccaagtgtcaggagaaaacagtcaggggctaagggcccaagggacttgaagaaacaacagtttaaggtctgcagtttggtcaacttaattcttgtcctccgaccagccctgcctctttcatttccagaccttggagaatttttcccagctttgattcagaaggtactagttataacccctttccttcttcttaatccaataggcctcactctcactgggaaatccactcaaaggaacaaggcaatgtctctcattctatttcccagttccaaattccaggtgcttgtctggagtgaagctacccgttactttctcccagcttttctccacccagcatgtctcctgcccatgcagctgaagacagtggggcaacctcaggagaagcagacctttccatgcccaagttcatctcctgagcaacagtgacacctagaaaatgaggactttggaagtcacccaaaagatggtggctactttatggagtcctgaagatacacagccaccactcctaaaggcaaagaaagaaaacacgaatgtaggtcagggatagagtggaaccctggtcatcggggtttttagcctcatcgtgggaaaggtggtaaaggaggatgatggcatctccatccctagaggccaagaattgaaatatcattgtcaaggattagaaacaattcagcaaagaggccacaaaaagggcctgctgactcccagaagacctctttaaaccccaggggaggcaaatacttgctgatggagtctgggccgtttccatattttaaagaagacctgcctctggggcaaatgtcagcacagagaggactgggaggagaatggaggcaagaaaagggcatattttgactccctctgtgcctcttcccagttcatggaaggatgtgttcagcttacccacccacagtgaccagtgtggtggagccgctgacatctcaaggatctatttgggaaggtgagaagagtactcattccatctgggggtgttgttccagccacatcagcctacctggtgggatgtgggggtgtctgccaccctgtcccccctctgctgatgtccctcccctcaggctgtccaggtgccacctgacacaggctgctgtgcaaaggcaggcggggaagcccaaacctcactcccagggaggccctcagccgccagagtccaggttctccagaggctacgatttgaggaggttgagggggaagacaggagggaaagaaaagtcctacaactgtcaggaatggggcacctttccctgtccctaagcaaagctccctcttcccactgccctccccagccccagctccctgtcctccccaacacctagtgagaaagacggtgcgtggaagggagtcccatgggcagatgcttacacgacctctttgtgaagcctcttctgggtttaacttcattcatcaatttattcttatgtcaaagcaatgaaacttttctttctggagccagataccaatacaacaggtgaacgggtttctgccacatctctacattgacgggggatgcttgaacaacccccctcactacacagacacacaccgttaaggcacaagggctggggttgagctctagatgagggactttcctgctcctgcaagggtgagcactgtatacacagacaggagggtgcagtagagtgactcccttggaaggaagtagtaccatcagaacctactattattatgacataaattctatttacatacattgagagaatactacaatcaacactttttcctgggatgactttaagaggtttgagccacagcacctgaagtggcaaagatccatggtctttgtagggtattagagaactctcccagtcacctctgaaagcactctagatcttgcagctgagtggatgaagtgtaacaaatctgttgcacgctgagaggagtcagaattagcatttttcatgaaagttccccacgtctcttctaagaatgaggaagaaaagactaagactaggtaattacacagaggcttgaaatgttacatcaccagagccaagtcctctcccttcagatcagttactggctgctacacagggacacccccaccttttcagggcatcccatgcactccacttctcaggatctaaggaatttgactttgtagggatcccagaaagggcactgtgccacttcccctggtgtgaatcagacatacattgtacattcatttctaaaattcactcatgcacctcaaaccaaggtcattatccaaaaaaaaaaaaaaaaaa

SEQ ID NO: 24868 - DNA, 2392 bp, Homo Sapiens
gctgtactgttggatttaacacccaccccgctgaggcaagagggtcctggcttagagatggcaaagcccgccttctgggcagggcagaaggtggctgtgcagcctcctggagctccagcaggaccggcagagccctgagtcagcctcgtaaattgtgtgacaggcaagaccagaaagggctgatgttgaaacctggagaggagccctgcaggagctctccaggagggagggccctctcctaatgatgctggcctgaaagggcctgaggccgaaaggtgagggggcgggggctgttcaggacacctggtctgtgtactcacggcctctatctaccctgttcaggggaaccccaaacctgcttttctttctttctcagcctctcctcccttctcacaccctggatgctgagagcagggcccagctctgctctttccacaacatttgggccatgttggcacagagcgggggcctcttgggctatggtggccacactccccgggctaactgagttacctgattcccagcggaaaggtcaggaagggagggaagaaacttgctgagctacaaattcgagactgctggggctttctaggacaggccaccttcctgcaattgtccctctgtgtccccaactccccgcagtcccgcaggccaggaggtgggtgcctgatgagcggtgcttccctcagatgatatgtgggcaccctgaagctctcacgtaatggttctgctgtgccgggttgtgacccagctgtccttggtaggctctcctgtttaatgagcaactgctatatgccaggccctgttctagaaacagatgaggcccctgttcccatggaacttagatctgagtatgtggacagagtgagtaggttgccagataatgtcagaggtaagaaaaaagccaggcagaggacagcagtgctggtttagacaagggttggcaaggcctccctgataaggggacgtatttgcgcagacacggaagcagtctgatggaaggcttgccctgtagggacctggggtgcagactgagctgggagggctcttggcttgctccaatgaggtaggggcgaagagagggcagaatggcccccgtgctggtccagatgtggccagcgccagatcgtatagagccgtggaggcacggtaaggacttggggtttgagggagatgagggccctgagcaggggtgccatgatctagcctctgctccagaaggatctgtctggctgccatgtgggggacacggagtggagcaaagacgggagcccagtgagagtcgagggagaggtgacctcagcttgggctgcggtgcaggccatgggactggcaggaggtggctggggttacgctgtcttttctaacattcagcattggctcaggggccaggtcagggctcacagactgttgctataaagggctgggtggctttcttccccacagctactcagcctaatgccattgcagagcacatgtagccatggacaacacaaggggcgtatccgtgttccaggacagccatattgacaggaataggcaggaggccagatttggtcctcaggctgtaatttcttggccccttgtctagggagaggtaaacgaggggaggagagatcagtcaaggatgacgtgagggtttgctgggagcaccaggaatcctggagaaggtagtggcaagagggtgcagcaagctcagctgggcggggatcaagtctgaggacttaatgtctcctctgatctccagacccataagggagatgctgagtagacaactggggcttatgggtctggagttcagaggagagatcgggaaggtgtccatttggagtcatccacgcagagatgtgtgaaggctgctcaatgattttgaggtttaaagaaaaaaagagatgtgaaaccaggggccctgatgaggctgcccaggtggtaaggaagacagaagagaagccatgggacagctgagcccgggcaccctcaagccttggaggcatgaagtttggtggggatctggcaaagaacacctgggagcagccagcgggcagcagaccccagagtagcagggaagacaagcacttcaaagaggcagcgtcagccaggggcagtggctcagctgtaatcctagcactttgggaggccaaggatggcagatcacctgaggttaggggttcgagactagcctggccaacatggtgaaaccctgtctctactaaaaataaaaaattagccagccattggtggtatgtgcctgtaatcccagctactcgagaggctgaggcaggagaatctcttgaacccgggaggcagaggttgcagtgagccgagatcatgccattgcactccagcctgggcaacaagagcgaaactccgtctcaaaaaaaaaaaaaaaaaa

SEQ ID NO: 24869 - DNA, 2392 bp, Homo Sapiens; identical to SEQ ID NO: 24868

SEQ ID NO: 24870 - DNA, 17350 bp, Homo Sapiens
gaaacttgcacttgattctgaggctcctgcttcttcaagaacactgctttgggttcgcttctcctgtccctggggtctccctttgtgatggtggtgagctgcttcctttctgaatccagcttcaaccctacagttctccagaagctggacgatggggtggagtaaagtcagctccccccgcagtgagggacactgaagctccattctcatctgcggatcacagaggggaagccaggaagagccaggggacggtggacttggggctgggaggtcatctcagagggataaggggtgaggagctctggtttcaagttccaaagccctaggacctccctcttctctgtctgcctgcatttctagcagcctcagcagctgcaggcccttgggcggggctggatgtagggaaggtcattgtaccaagaagatagttgggtaaatgtggtacctttgttgtaggattctcttgggagatgtctgcatcaatgaggatggcataaagtaaccagagtcaggatgtggggtctgactcagtgacagaaaaagtggcagtgtgtctctcatagccaaaggggcccttggaccggcagtcgggagtctggggttctctgttggctctgcctcctggcacattgggtttctggacctcagttttctcctctataaaaccgggcagttgggtgggcacggtggctcacacctgtaatcctagcactttaggaggctgaggtgggcagatcatttgggcccaggagttcaagacctgcctgtgtaacatggtgagaccctgtctctacaaaaaatacaaaaattacccaggcgtggtggtatgcacctatagtcccagctgcttgggaggctgaggtgggaggattacttgaacctgggaggtcgaggctgcagtgagctgcgatggtaccactgcactccagcctgggaaacggagcggaccctcaaaacaaaaacaaaaatgaaaaacaagcaaacgaagaaataaaaaaacctagggggttgtagtcgatgatctgtaaggtgagttataattgatgtattggaatatttaggaaaagggcactgggaatatgctaggaacacctgatggaggtatctttatttccacggcagcttcgtggatacgtctcattgattctcatggcatcactttccccatgtaggtgggcagacattgttacccctgtttaataaacaaggaaccaacagaggcttaggagaggagttgcctgatgtcgcatgattggtggcagagccaggatcaacagtggggcagggtggggggacctggccaggcagagactggatgagacctggggtgaggaatggcaggcacccagtcagggcagaaaacgagggttgggacttactttgagttttggattggatcagtaaattcccaagaaagagggagactaggaggctagtgaagaactctggagtaaaggggaggattactaagggacatggagtacctatcatgtgtcggacgcttatctatatctctcccatctgaacaaatccttacaggaaccccaggagacaggttatctccactctgcaaattggaaaacagatccagacaggttcagttatgtgtctgagaagttcatttatgtgtccaagacacattcttagctaaaaagctaagcattctgaattggaacccagagaatttgactcccagactctggatcttttcactgctgtgatccatctgggaaaggctagtgatgtgggcaaggggcttattgccccttggtgtttggttgggagtggtcggattggtgggttgggggcacaaggcagccagatctgggactcctgtgcttgtgactggactacaaagagttaaagaacgttgggcctcctcctcccgcctcctgtggcctcctcctccagctcttcctgtcccgctgttgcaacactgcctcactcttcccctcccaccttctctcccctcctctctgctttaattttctcagaattctctggactgaggctccagttctggcctttggggttcaagatcactgggaccaggccgtgatctctatgcccgagtctcaaccctcaactgtcaccccaaggcacttgggacgtcctggacagaccgagtcccgggaagccccagcactgccgctgccacactgccctgagcccaaatgggggagtgagaggccatagctgtctggcatgggcctctccaccgtgcctgacctgctgctgccactggtgagaccagggacaaagggaagagtgggctggtgggcgaggcaccttccggctggcgtgggccctctccgggagggggccgagcctctcctgcccgggcctggtcctggcgccagcctcaggcctgcaggtcctaacctcagccactgccagtgtggggttccccattcatccgccttttggagtaggggctgcgctgaggcaggggaatgggagaagtttgaaagggagagagtaaaaggaagccctggcccctgacagcggtggaagtttgtgggcggccaagggaatgtgggcaggagataggcccagggtggggcagatttggcggggaaaagaagggagtgggagtaggaagattagtgctcggggagtccagacggttctgaattctgtccctccggtcagctggctggcctggagggtgttgggccgtggggaggcgaggctgcctgtggaacttggtggagcacaccctgtagggcaggattttggcggctggtgaagtgggggagtgagttgaggagtggggatgggctggtgtggtgggtttgggatgctcatggtgggaggtatttgagaatgggctgggacactggatggggcagggcaacccagtggacagtgtccccagtgccctggccaagccccggcctctcacctggggacattctttacccttttgcctgctgctaggcaggtagccgctgtgggactgagccttcccagggagctagtcctacccccacctggtcagtgtccctgggcctgtcctccagcttcccctccccgctgcttctcacagacctaaacaacaatcccttggtttcttattctacagttcagtttggggaagttggtagaaagttgttttcgtcactggaaaatgtccctttctctggcctcagccttgtttcaatgtatccttgatcgtcctccacgtcttggtccgggaatcatcctgttcagatgtcctgggcccatctagtcaggcagattttccctgccctgcccggcctctgaaggctgcgcctacctcccctctctttagtgccttatactcttcctctcctaccattcctttcttccagcaatctccccagactctcctcagacttctcagagcctctttttttgaaatcttttctcgctaatcctccttcccctcctctctgctccgctctggtcccggccccaggtccccaggcagcacgtctctggtcagggtctcactcttcttcttctgcctcctcctgcctccttagtcccacccgctcttcccttcttcccactgtccttcccccacggtctccccaccagccagctgccctgacatcctgcttctgttttctgtttgggggcggcccctggctccctcacatacctcctgcatgaacaagagcagcttatataacctaaccttccatgccttcgtttctttatctccaaaatgggtgtcacagtcttgacctcatactgttgttttgaagattgaatagactgatacatgttaagtgttcatttgatttattaagtgtgcgctctgggctagacactgtgataggtgctgggattacagcagagaacaaaatccctgcccacagctttgacagtccatcaggggaataggttgtagcaaatagaaagcactcaataaagtttttatattgctgtgactagtagtaattactgggtggctacctgtgttgggaaaacagagggtaaaggtagcctgaacaggtaaagggaagtgcctgcgtcctggggtgcttcagcccaggtgggattatgtctcctaagggacagaagcctggcctggagctggaggaaagggaaaacaaagggaatgcaacatccttctgaatttctcaccattcagtgggcaatgcagagctcacagtgtgtgtgtgtgtgtgtgtgtgtgtgtgtgtgtgagagagagagagagagagagagagaagtggggtaggggagtagggaagaatgatacaggagagactgtggcaaagcaaacaggattttgctgctctcaaagagcttacagcctagtaaccaagatggcttacagtgaaaaatgatttcagagcaatcccgaggaaaatatccacaaatgcattgtgatgtggtgtcctggagcaccagttgggaggaggaggaactggggaaggaggtgagccttagtccactgcctttccttgcttagcaggtctcagctcctgcgctcagctccagaaaattcaggagcttccccacgctgcttcagtgtccttcactgtgcaactgcagcactccctgtatagatctcagtgcctacaactgactgtctttgactcaagtgagagctcttgagagcacgagctgtgtattatccacctcagcatccctagcacccatacgggacctgtcacattaactgtgccccttaactatttgctgaaggaattaaggaacaagagatgtgtcagatgggatggcggagggaaagcctcatagaaaagtggatgtggagctgacatctgaagtcactgcctgtcagggtagctataaaggagggaagcagagttggatactgatgtgaggaagaggagaggaatggagagatgggattttgtgttgatgggcagggtggcaggaagccagacaccttggttcgggagtggaaaaaccatgttgagaaacactaagaaatgtgaatgggagaattagagggagtgggggagaggatggaggaagagtgttgaatatggttccaggtggaggaattcattcattcgtttattcagaagctgttctcctagggcacattctgtgcccagactgtgattagaagtgaggtgaggcatctcagatgggtgctgtggttcatgcctgtaattccagcacttcaggaggccgaggtgtgtggattgcttgagtccaggagttcgagaccagcctgggcaacacagcaaaaccctgtctctacaaaaaatacaaagattagcggggcatggtggggcgtgcttgtcatcccagctattcgggagactgagctcgggaggacggcttgggcccaggaggtggaggttgtagtgagccctgaccacaccactacattccgtcctggtggtgaaggttgcagtgagctatgattgtgccactgcacttcaccctgggtgacagagtgagaccctgtttcaaaaaaaaaaaaaaaaaagtagtgaggcatctgtggaagtcttcagatcatttccatgaccatggaaatgctgtttggagccaggccctggagatggagaggaaggttcacacacttgtgcgtgcaagttaaagcctgaatgaagatttaaaaagtgtgtaggacggatgggagcaggagagaggctagaagacacttgcaataacccaggtgtgaggcaacccaggaatgcggagaggactgagagatcacagggggaggcctcgcaagatgaactgacacatgggatggcggcagggatagggatggggccctggggagagagcgtggcaagttctcagcattcgtccgggaagtcgatggtgtgtcatttgtctaggtgaggagatggatgaattccgtctggggcatgttaagggtcagggaaatggtcatgtggaagggtgcgcctaccaagctggaggagaggtgctgcaacttctttctgcctttgtatcattcagacacactgtgttcactcatcagtggttctcaaaaggagaggagcacaccagactcttaagtaagggtgtgtgtgcttgtgtgtggggaggtggggggatggtctgaaaactctcccccggagataaatatattcctaccaggggtgctgtctcctcacctccctctttgggaatcactggcttctactagagtggaagacagatgtatcattagatcgatcagttgatccatatttatctgctcccagtctggaggtctggttctgggagctgagaggacaccaggggaggataagacactttctgaccaagacatttttttgatctctcatcttataaggttcgtggtcactttggggagatcatatctgtcacccaacataaccatattatgataagagccaaaagtagatagggtcagttcacgtgcttcgagttcacagggactatgggtctaaggagccggggtggaggaaacagacatcgtcaatggtggcttcacgggagggagatgggatctcaactgggcccttggaggagaagctgccacgacctcccccaacaccttgacattaaatgaacagacacatgaatgagggggaaaggaagactaattgggtccctgcaaggtggctggatcggggtcagaccacaaggccgatctcagcgtcgcctccccactctgcagccccagcacaggaagtcacactttaaagcctcctctggcggaaattgtgggggagttggaggggtgttgggccaccccctcaactgtctctccacaggcaccccagcttcctgcccttctgctccaggctggagtctgggcctaaagagctcacctcctgtttctcctgttttgcttcatttacgcaactgctgaggactgggcttactggggccagctggtgccagcagtggtgcccagtggtggggagtctgagggccctggctcctagggatcagagagggctgacctggagcattctgggggccaggggaagcctaggaagcagggctggttcttccatccggcatcccttcttgcctgctccctcgttcctggaagtgggtgttcagggctctggaggctttcctgtattgccagtgggcttggggagggtctgtggagactcagaactggccttgtttcctaaggattgtctggggaccccagggaggcccccaaacccagcacaactggtcagaaccagccaggctgtgggaatgcggtgaacccagggtgggagggcagccttggcttgcttcctgctgggacgggggagtgttgggggatggagtgagagctcacggaatgggtttagctgttggagacttgttgaactgggaggaggagctggggcggggcctcagctaaaggccgctgaggggctaggaggagccaagtggccctcagggaagggagggcacagacctgatgggcggaagccagggtcgagggagacttcccttcgggatggaatggggagagggaggcatttcccggaacatgtgggccaagtgggacaagggtctgtggcctggctctttgcatggggaggggatggatgggggttgagtggggatgggaaggagggacttggccataggaagaagggattagatggagtcccacttgcatgcaggctggtgccttctgcctttctgctgactcatgacccttgaggagctggggaagctgctagttccctctcccctccctaggtctccctccctctggcctgagtcactggggcggagttgctgggaaaagatttccctttcccggatctgacttaacccccagagtgctggaaagagaagggaacacgtggcctgagaaagcctctctccctccctccctccagggaggctcatcccccactggccagaggtccctgaaaagctccctttaaggctgtctggggctggcgtcccccagttcttcatcatgactctgcctcaagccccctggatgggattcaaagtaccagtgaccttaggtgctccagtggcttcttcggggaaaggaaccacactttcaggactgggaagttcttcccatcaccaccccaaacccttcctgttgccctggaagccccagtcctgttctcagcagaggtggcacggtgttggctggtgcgggcaggggaaggttgttgtcctctgagcaggggcacacgcctccacctgcgggggctgctgttgtgtttctgtgtgtggcttcccctgtttgcggctgaggcttgaacttccgggcctgcacagcttacagctgcagcgtctccccgtggctgactcagggtgactggcctcctgctccgaaatgtggagttggtgaggctgggtggctgtgggctgcctgaccctccttccctgccctagggtttctgtgatctggtgagtcagttgctccccagtgtttaacagacattgaggacaccctcttatctttacacaaagtgtctcttatagtagaaaaaaaaaatgaagcccagggaaaaccagaaatgaagctggcagagatcaaagtccaagttagagctaaatattcactcctggctttgctttcctggcactgatgccggaacaggacaagccatttagctgctgtggggttggcctgagactgcaaagcacaccttccagaatgccatggtgtgcagggggctccaggactccccagcacgccctcagctctgacctgacagtcatccaagctgggtcgctagccttggccagctctatttgcctatgtcctgcacacctttgcccactcctgcccccgtctcaactttgtcccccgtctacccatgcaggatccccaacctttcccttttactctcctccccatttgtccttgccaaccccgggtgtttgtaaattttgaggtggaggggatgggccagggaatgtgagggcggaggcagattgaggtttgatacaaacatgtaaataaacttccttcttctgtccactccccaggagtggtgctcacgggaacatcactcgcccccaccgccagctgactttttcagaaagcttttcatggtgtaacatattcctgggatgtgcatagatcctcattgtttacctctgtgaatgttcgcaaagcgatcacacggtgaacccagcacccagatggagaaacaccgccccaatctttagggctgcttgttggaagaaggggccatcactgaagtaacctgccaattcccaatcaaaaacacatcctttcaacatctgccctgtgtccagcactgttagctgctgtgggggatttcacagtaaggataaaatacagggctgggctcacgcctgtaatcctagcactttgggaagccaaggtgggaggatcacttgagcccaggattttgagaccagtctgagcaacgtaacaagaccctgcctctactaaaaataaaaaaaaattagctgggcatggtggttcacggccgtagtcccagctattcaggaggctaaggtgggaggactgcttgagcgtgggtggtggagggtgcagtgattgcatcactgcactccagcctggacaacagagcaagatcctgcctaaaaaaaaaaaaatacagcttagatctggggcctactagctttgagttgagggaacaaaaatgaacacacaggacaactagagaacaattaagcatcagattgtatggccccaactgtctaagtttcaaggaagaactctaaacttagtgagtggcgtggcctgggcggaatgtttcactgaggaaggacttgagccagggaagttttagatctgctacccctaagcttcccatccctccctctcttgatggtgtctcctctatctgattcttccccaggtgctcctggagctgttggtgggaatatacccctcaggggttattggactggtccctcacctaggggacagggagaagagagatagtgtgtgtccccaaggaaaatatatccaccctcaaaataattcgatttgctgtaccaagtgccacaaaggtaggggcaagtggaaacggtgaatgccctcaggtctggggtgctgcttctttctctgcttcttccagttgttcttccctaactttgctgtctctcctgggctgggattttctccctccctcctctcctagagacttcagggaatcggccctggctgttgtccctagcatggggctccttccttgtgttctcacccgcagcctaactctgcggccccattcacaggaacctacttgtacaatgactgtccaggcccggggcaggatacggactgcagggagtgtgagagcggctccttcaccgcttcagaaaaccacctcagacactgcctcagctgctccaaatgccgaaagggtgagtgtgcacaggcaggagagtcaggcgggtcttgagtggtgtgtgggtgcctgtctatgtgcaggctggtgggtgtgggcaggaaggtgtgtgttttggtgggacactgcatggatgtgagtgtgtattacagagacacacacttaggggtatgtcaggaaggggatgcagggacaggaggatgcaggactcataccccatcttctcccctcaccagaaatgggtcaggtggagatctcttcttgcacagtggaccgggacaccgtgtgtggctgcaggaagaaccagtaccggcattattggagtgaaaaccttttccagtgcttcaattgcagcctctgcctcaatgggaccgtgcacctctcctgtgagcgcagctctcctgaggccaagccctctccccaccccaggggttggccccttccccatgcggtggcacttcctttccttccccctcctgtattctgtgggtctgacaaccaactcctctctggccgcccccaccctgtccctcgtcacttcctctgtcctgtggggtgggggtgcaggcgctcctcctttagctgtgccgcacttctccctacaggccaggagaaacagaacaccgtgtgcacctgccatgcaggtttctttctaagagaaaacgagtgtgtctcctgtagtaagtgagtatctctgagagctgctgggcactggatggtggcatgggttgggacgggtgactggtgggaaccattagctgggcaacagatgccaggatgccccagagtgctcagggtcctactggctgagtaggagacacttcgttaagacaccaggcagtccttccccttgctcttcaaatctgaagaagtctttgaggatggaagatcatgccccaagggctggcagcccttccaactcagatatgtagattcttggatctacgatagctcattggttctaggacatacactcttatagctctgaaatcaaacctcctataactggtgactcatcatggttgaattggcagctctgtttgcgtctgggtagtaatgtaaagaaaagtgccttttattcttgatggcgtcttaggtttgatgcaatatggtatttcctcattagtcactgtccaggcctccttactcctggctccacagaggctgttcttgtcactcacttgcaaagaataaactctgagggctctcagagtttgaaccccagcatagccacttactggctatgtgacgttgggcaagtttcttaacatctctgagcctgacttttcttttggtgttttttttttttttttttttttgagacagggtttcactctgtcacccaggctggagtgcagtggtgcaaccgtggctcagcctccacctccagggctcaagccatcctcttgccttagcctcctgagtagctgggattagaggcacacaccactacacccagctaatgttttactttttgtagagacagggtcctactatattgcccaggctggcctcggactcctgggctcaagcgatcttccgcctcagcctcccaaagtgctaggattaccggcatgagccaccacgcctggcctgggccttagatttcttatatttaaagtaagcataatgacattcatttggtgaatttgtgagaaccaaaaacaaagaaacaaacaaaacctacaacacgtctgacacaaaactatttattttccattaatcttcttttttttttttttttttttttttgacacagagtcctgctctgtcgcccaggctggaatgcagtggcgcgatctcggctcactgcaacctctgcctcccagattcaagcaattctcctgcttcagcctcccaagtagctgggattacaggcacgtgccaccatgcctggctaatttttgtatttttagtagagatggggtttcaccatcttggtcaggctggtctcaaactcctggtgatccacctgcctctgcctcccaaagtgctgggattacagccgtgagccactgcacccagccggcttcatctcttcttgaaatcacttttataccattctatgtggttctcaccatgagcttgagtggtgggctaaagtgcctctccctgctttcagcttcctgctgggaactcactctctcaagttccttccagcaccaccccatagagttcccatcactccacactgtccagtgacaactcccaacatggaagatctgctagttctacagggtgctctctggctgccccagtaacatgtgtttttaaatttttcacatgcatgtttgaccccgactccccgaagtcaggtactgtaactagcagtgtcatttaagaaaaagccctttaacctctctttgccaaaggattcttatcagcaaaacagtgatgaaacaacaatcccataacagctagctggctaccttctcaagcacttattaaatgaggcataatgattttgcttaatcctcaatcctgagaggtgggcgatccctgtggtgatgaggaaaccgaggcttgggggttaatggcttgcctagattcacactgctagccaaggaatgaactggaatttacaccctgaccctgactgcttttcacattttctacacagccttttcaagatccctgccaattctaaaattaaatgattctatgattaactgtgtttcattcttctgcatcagttcccaaaacaaattatatcaagagacagcaaaaatatttgtaaagaaaggatgtccaacaatctgtgtggttgtttttctgtgttcctccaatggtagggcctctgttcaccagtgccgtctcttcttttagctgtaagaaaagcctggagtgcacgaagttgtgcctaccccagattgagaatgttaagggcactgaggactcaggtgaggagaagtgacctggtgcccatgctcacctgccctctccctcttcttgcccccacccgtccatccatcccacccatccatctatccctgcggcccccctctgcccgctcctctgaccaacacctgctttgtctgcaggcaccacagtgctgttgcccctggtcattttctttggtctttgccttttatccctcctcttcattggtttaatgtatcgctaccaacggtggaagtccaagctctactccattggtgagtgggggctttgggagggagagggagctggtgggggtgagggaggacatgggtgggtgcgatggacatgtgtggagggaggtgaggagtgtcccctcagttcataccgctggggactctgggcagaaggtggccctggatggctggggagatgtcgagctgcatcagtagctctctcgtccctggggccacataggccctgaggcatgtcaccacaagtccccactgccagctgagtccagggtgccagggctgagagaggaagtgaaatttatgatgctttctttctttttcctcagtttgtgggaaatcgacacctgaaaaagaggtgagatgaaatgagagagttactcccaaatgtccctgaccattccttataattgcctaatgctcagatcccctggaatcatccttcactttccgggggctcgcctcattccctctaagtcccaacccccacgtagaataaagagggccggggctggttttcgctgccgcactaatgctgcgccaccttctctctttcagggggagcttgaaggaactactactaagcccctggccccaaacccaagcttcagtcccactccaggcttcacccccaccctgggcttcagtcccgtgcccagttccaccttcacctccagctccacctatacccccggtgactgtcccaactttgcggctccccgcagagaggtggcaccaccctatcagggggctgaccccatccttgcgacagccctcgcctccgaccccatccccaacccccttcagaagtgggaggacagcgcccacaagccacagagcctagacagtgagtttctcccgcggctggagacgaggaggctgggggagggccgggggagcgcgggaggcgctcccagaggggaccacgagaggcggagggcgcgggatgcggggcggggcctggggttgccgcccgaggctcaccggcccgcgtccccgcagctgatgaccccgcgacgctgtacgccgtggtggagaacgtgcccccgttgcgctggaaggaattcgtgcggcgcctagggctgagcgaccacgagatcgatcggctggagctgcagaacgggcgctgcctgcgcgaggcgcaatacagcatgctggcgacctggaggcggcgcacgccgcggcgcgaggccacgctggagctgctgggacgcgtgctccgcgacatggacctgctgggctgcctggaggacatcgaggaggcgctttgcggccccgccgccctcccgcccgcgcccagtcttctcagatgaggctgcgcccctgcgggcagctctaaggaccgtcctgcgagatcgccttccaaccccacttttttctggaaaggaggggtcctgcaggggcaagcaggagctagcagccgcctacttggtgctaacccctcgatgtacatagcttttctcagctgcctgcgcgccgccgacagtcagcgctgtgcgcgcggagagaggtgcgccgtgggctcaagagcctgagtgggtggtttgcgaggatgagggacgctatgcctcatgcccgttttgggtgtcctcaccagcaaggctgctcgggggcccctggttcgtccctgagcctttttcacagtgcataagcagttttttttgtttttgttttgttttgttttgtttttaaatcaatcatgttacactaatagaaacttggcactcctgtgccctctgcctggacaagcacatagcaagctgaactgtcctaaggcaggggcgagcacggaacaatggggccttcagctggagctgtggacttttgtacatacactaaaattctgaagttaaagctctgctcttggagacagtggtctgtcgggatgggaggtgggggcagaggcccagatcctgaggggtgagatgggaaaagccctgcactagggccaggtagcccatcaccatcacgccaagtgacagaggagtagcaggttcttgttctgaacaccgtcatctgttgcccaagctggagtgcgctcactgcagcctccaacccttgggctcatggggtcctcccgcctcagcctccggacacaggcacaccaccacacctgggtaatttttaaaattttttttttgtaaagacagggtttccctatattgcccaggctggtctggaactcctgggctcaagggatcctcccacctcagcctcccaaagtgctgggattacaggcagccatgcccagccagggcagtcatttttatgcacaactttctgtggggctcaggtgcacctatgatacataaatttacagttcttgatccccaaacagagcaggaggcagggtgcctgggccaggcttcctttgggaaatgtggtccttgaggtagagtcacagatgccggagggtgaccagcactactggggagagatctcctctgggagagatgcatgccaaaggtcctctgcattcctcatacctctctgaaaagacaggagggggtgttaggcgacattcagtggcaacgggtgagggtcaggtgaagagtgaggcggagagcccttcctgcctcagcccctgttcctgctttgccctctttctatactacaccccccaccaccatacagacatccccgtctgccccctcccaggccagcttccctccagcacttacgatgcggacagaggggtgtccagctgaatgatgtggggcccccgcatcctctgcagctgggcccgagtcagcttccgtggcctgctgtcccggggctcctcggccccctcaatcctttggctggccagctcctcccggatctctctgagcatgtcctcagcccgcattgggcgcagggatgtgtggccagctttcaggaacagaggcccctcttcttcctcctcccctgaggactcccaggggctttccccggcagagtcagcatgggttggggaggagggaagctggccccgaagccgggccctgtggagtgtttccaccaccacattccctcgctcggaggccccatcttcttcctcagaccaggttggtgggtcttcctggggaagactgcctccttttaggattccttccggcagttcgggggcgcttcggcgttgaggagcttgggggtcgggagggtggggacgcagagggatgtcccggagttccagggtggagaaggtgaggcgagggtcccgccgaagggctctttggcgtagacggctcagtggggagcgggaccccgtgggggtgcctgggatcaaagtgccgtagccagagtctgaggtatcatctggcacaaggggagcatcttcatctgtgtcttctgtcaccaccaggtgggggataatggtcgagaactcaggagtcctacagttaatggcaaagagtcagatgcgtaggggtcaagttcaagtccagggagtttcccttgatcactacatccagaaatggcccctcctccaaacttattttggtatcatctttccatcgcactgtgattgtttttctcatctggctggctagattttaagctcctaagagagtacgggctgcctctatactgttttatccatagcatctggtccaggatcttgtatcgagtgggtagtcaggtttttgctgagtggttcctgaacttacctgatattatcctcaatgatcgattcttcttttctccttaagctgctgccaagcagtggtgctatcctagacgaacctcacactccccggggatttggcagctctaatattctgcagatccacacctaccttcactctcgagcttgctcctctcacagtgctcctgtgtgactctaggcaggctaactctgtaggctgtctgtgccctatcccccacctccaacccaacacggctggtaccaaccttccgacccaacacagctggtaccgagcttccctaccctgccctacgcctgcgttcctctat

SEQ ID NO: 24871 - DNA, 3155 bp, Homo Sapiens
ccaccttcctcccaccccgggaacccggaagtggaggaggaggcgcggcggcggcggcggcggcggctgcggtggccaagcaggcagatactgcctgacccgttcccgggagcgtgtctgggtttgggggcgggagacaggctgagccgcctgggcggcctggcctgtacggggcgggggaggccatggcctcggctgagttgcaggggaagtaccagaagctggctcaggagtactcgaagcttcgggctcagaatcaggttctgaaaaaaggtgttgtggatgaacaagcaaattctgcagctttaaaggagcaactgaaaatgaaggatcagtcattgagaaaactacaacaggaaatggacagtttgacatttcgaaatctgcagcttgccaagagggtagaactacttcaagatgaactagctctaagtgaaccacgaggcaagaaaaacaagaaaagtggagaatcttcttctcagttgagtcaagagcagaagagtgtctttgatgaagatctgcaaaagaagatagaagagaatgaacggttgcatatacaattttttgaagctgatgagcagcacaagcatgtggaagcagagctgaggagtcgactggccactctggagacagaagcagcccagcaccaagctgtggttgacggtctcacccggaagtacatggaaaccattgagaagctgcagaacgacaaggctaaactagaagtgaaatctcagactctagaaaaggaagccaaggaatgtcgacttcgaacggaagaatgtcaattacagttaaagactcttcatgaagatttgtcaggtagattagaggaatccttatcaatcatcaatgaaaaagtaccttttaatgatacaaaatatagtcagtacaacgctctgaacgttccactccacaataggagacaccagctgaagatgcgagatattgctgggcaggccctggcttttgttcaggatcttgtgacggctcttctaaactttcatacctacacagaacagaggattcaaatttttcctgttgattctgccattgacactatatctccattgaatcagaagttctcacaataccttcatgaaaatgcgtcctatgtccgccctcttgaggaaggaatgcttcatttatttgaaagtatcactgaggatactgtgactgtcttggagacaactgtgaaattgaaaactttttcagaacacttaacctcctacatatgttttcttaggaagattcttccctatcagttaaaaagtttagaagaagaatgtgaatcctctctttgcacatctgcgttaagagccaggaatctagagctgtcccaggacatgaaaaaaatgacagctgtgtttgagaagctgcagacttacatagctcttcttgccttgccaagtacagagccagatggactccttcggacaaactacagttctgtgttaacaaatgttggtgctgctctgcatggatttcatgacgttatgaaagatatttccaaacattatagtcaaaaagctgcaatagagcatgaacttccaacagcaacacagaagctgataacaactaatgactgtatcctgtcatcagtagtggcattaacaaatggagcaggaaagattgcatccttcttcagcaacaatttggactacttcattgcttcactgagctatggacctaaggcagcgagtggattcattagtcctctttcagctgaatgcatgctacagtataagaaaaaagctgctgcctatatgaagtctttgagaaagcccctcttggagtctgtgccttatgaagaagcactggcaaaccgccgcatccttctcagctctactgaaagtcgagaaggccttgcacagcaagttcaacagagtttggaaaagatttctaaactggagcaggaaaaagaacattggatgttggaagcacaattagccaaaatcaagctagagaaagaaaaccagcgaattgcagataagctgaagaatacaggtagtgcccagctggttgggctggcccaggaaaatgctgctgtgtcaaatactgctggccaggatgaagccacagctaaggctgtgttggagcccattcagagcaccagtctagttccagatgtggaatctcgtgaagacttaattaaaaatcactacatggcaaggatagtggaacttacgtctcagttgcagctggctgacagtaagtcagtgcatttttatgccgagtgccgagcactgtctaaaagactggccttggctgaaaagtctaaggaagcattgacagaagaaatgaaacttgccagtcagaacatcagcagacttcaggatgagctgacaactaccaagaggagttacgaggatcagttaagtatgatgagtgaccacctgtgcagcatgaatgagacattatctaaacagagagaagagattgacacactaaagatgtccagtaaggggaattctaaaaagaacaagagtcgatagttttgaaatagctggttggcgactgttctttccagacctgctcctgctgcacagagccgcagggctgagaccacgtccatgctggctgccttcaggaagctaaagtattgttggacctagtaaactagtcagtgttggaaacggccttgaaatatttaaaacatatttgtaaccagtgaggcaaatacagaagttgatgtcggcagtaaatggaaaacaatacgtatgtcatggatattgtaggtttccttatgctgtttttactgtgcactttttaaaattaggttttaatttcagtatgtaagaacaaatattttgtatactttcaaactcaattatatggtaatcgatttggtatctatggaatagatatatgtttctggaaaaaaatgcttaaattgtcaaactgtcattacttcttattatagttgaaggcattctccagattctttttaaaagatttgttcaaatttctctctctctctctctctctctctctcttctttctctctgagggagagggagccctccaaacttcagatcctgtgggtttagtatcattatcttcagctctttgatcccctgtgttagagtaatagctaaaggaagttcatgtcaataaattcatacttatatcccaaaaaaaaaaaaaaaaaaaaa

SEQ ID NO: 24872 - DNA, 1704 bp, Homo Sapiens
cgagggaggggaaacccgaggggttccttggagaaggtggtgcgtcctggggcggcagctgaggaagaaagacgcagtgccccgaagcccctgagctgaaaagggccagaaagggggcggcatggcatggcccaaactgcccgcaccttggctgctgctctgcacctggctcccagcagggtgcctgtccttgcttgtgacggtccagcacacagaacgctatgtcaccctgtttgcctctatcatcctcaaatgtgactacaccacctctgcccagctccaggacgtggtggtgacatggcgcttcaagtccttctgcaaggaccctatctttgactactactcagcgtcataccaggcagctttatccctgggccaggacccatccaatgactgcaacgacaaccagcgggaagttcgcatagtggcccagcggcgggggcagaatgagcccgtgctgggggtagattaccggcagcgcaagatcaccatccagaaccgagcagatctcgtgataaatgaagtgatgtggtgggaccatggagtgtattactgcaccattgaggctccaggggacacatcaggagaccccgataaggaagtaaagctcatcgtcctacactggctgacagtgatcttcatcatcctgggagccctcctcctcctgctgctgattggagtgtgctggtgccagtgctgtcctcagtattgctgctgctatatccgctgtccctgctgtcctgcccactgctgctgtcctgaggaagccctggcccgccaccgctacatgaagcaggcccaggccctaggtcctcagatgatgggaaaacccctgtactggggggcggacaggagctcccaggtttcatcttatccaatgcacccgctgctgcagcgagcctcccgcagatgccaatgacccagaccaccaatcagcctcccatcgccaatggtgtcctggagtatttggagaaagaactgcggaacctcaacctggcccagcctctgccccctgacctcaaaggcagatttggccatccctgcagcatgctgtcctccctgggctctgaggtcgtggaacgcagaatcatccacctgcccccactgatcagagacctgtcatcctcaaggaggaccagtgactccctgcaccagcagtggctcaccccaattccctccaggccctgggatctgagggaggggagaagccaccaccattaccctgatttccaccaggagctccaggaccgggggccaaagtcttgggcattggaaagaagggagttggacccatcgtggagtggaaggcaccgtagctctaggctgaatgggtcacccatacactggtcagacagggacagcctaagcgatgtcccctcatccagtgaggcacgctggcggccgagccaccctcctttcaggagccgctgtcaggagaggccccgcaggcccagcccccgggagagcactcagaggcacgggagacgacgcaggcaccgcagctactctcctcccttgccctccggcctcagttcctggagctctgaagaggacaaggagaggcagccccagagctggcgggcccaccgccgcggctcgcactccccacactggcccgaggagaagccgcctagctaccgctcacttgatatcactccaggcaagaatagcaggaaaaaagggagtgtggagaggcgctcggag

SEQ ID NO: 24873 - DNA, 19889 bp, Homo Sapiens
gtgtttcctagagtctcggcgtttctacctcttcgcaccctttcctgccaccctttgtcccctggaagcccggagacatcagcggctgcaattttgctactcgctgctcggcgtggaactgtcaggtaccgcagttcagcacttttggctccgcaggtcctcgggcatccctgtgccccgtgctgtacattcagttatcctccaacttcctggtgtcgatgttattacctgctgggttttagaagctattgctttaaatctgagaaaagaaaaatcccagaaagataagatgacttgcccaaggaaacatagcgtgcgtggaagacagagctccaattacaagccgggtcgctgtgcctcattcgtcttgtcatcaactcctgtcagtttatccaagctccaaaagcgaagttgttttagcttttgcttcccaagatttatgtgatagtctcatttctgtttccttcatttattctttagttcattattggaaaactttacagcgtgccagtactggtcataaaccccaagtaagacagtcttgtcatcacggagcgtgtagttccagcaagtagacaatttaagtgctgtgtagtgaagtaattgctgagatagtgtatggaagcacagagtacaccattcatccaacaagtaattgctggaggagcaaatagggacacctaaccattgcaggggcgactcaggatatcctttctggaagaaaagtctgatgaaatctgaaggaccactggttgaagttagccaggaaagaaaacgtgttgcagcatacttggttttgctgtttatcctccgagtactttattgttatgaaagcctaattccactgtgtaacttccatgcataacactcagaagccagttaagtacagtgctgaagcaggttagtagcagtgaagatgggaaggaccagctgaatggaggagaaaaattgcccaggtagaattaaggggatgtgacatcatgggataatggtagggtggtcagagatagcaaagatttcaactggctgctttggaggattatggtatccttaacgttagcagaagaatgcagatccggggttgagaaagatttttacgtatgttataatttttggaaaacagaaaaaatctgtttatgtcagggggcattttaatatagaagtgtgaaaaatggaaaatcagtctgaaaggggacgtcttaaatgtcgttttgaaggtgttgcatttgaagtactgatgagatactgtcagtggaaacaaactcaggtgggaggttaggtttagaattttatgttagtgttatggagttacttatacataattttcctgtaatgtagattgctttctgtggtatgaaagcagtcttgaaaggaaacattgtagtaaagattatatgtgagattcattcccctgattaccacctttctgttaaagtacctttaatattaactttattttctttttttgagacggagttttgctcttgttgcccaggctggagtgcaatggcacgatctcgggtcaccacaatctccgcctcccgggttcaagcgattctcctgcctcagcctcctgagtagctgggattacaggcatgccccagctaattttgtatttttagtagagatggggtttctccatgttggccaggctccaactcccgacctcaggtgatcggcccgcattggcctctcaaagtgctgggattacaggcatgagccaccacgcccggccaactttatttattgttattattattactaattatttttgagatggagtctcactctgtggcccaggctggagtacagtggcaggatcttggctcgctgcaacctctgcctccctggttcaagcgattcttgtgcctcagcctcctgaatagctgggactacaagcgtacgttaccacgcctggctcatttttgtatttttagtagaaacggagtttcactgtgttggccaggctggtctcgaactccagacctcaggtaatccatccgcctcggcctcccaaaatgctgggattacaggcgtgagccgctgcacctgaccagtgttaactttaagtgtagaataataggctgggcgtggtggctcacgcctgtaatcccaacactttgggaggctgaggcaggcggatcacaaggtaaggagatccagaccatcctggctaacatggtgaaaccccgtctctactgaaaacacaaaaaattagccgggcgtggtggcgggcacctgtagtccccgctactcgggagggtgaggcaggagaatggcgtgaacccgggaggcggagcttgcagtgagctgaaatcgcgccactgcactctagcctggcgacagagcgagattccgtctcaaaaaaaaaaaaaaaaaaaaaaaagaataataattattttcttagattgtaccatatattgaatattatgagagtcctgtgtacttattatgaggatactagtttggcaattgttttttcattctaattttaaagtgcctgatttgatagcctctgacgttttcataagcagatcagatagtttcagcattttttgaaattgccgttttctctttcatgcaagtgtccttagcctgtggctactattttctggctttgagaacttgatatagtatttaacctaaggtctgatacaggctcttgagctcacctgcatcagaagcacctgggtcttatttaacatgctgattcctgaaccccattccaaacttacaaactaagaatcttaggaatctgtgttttaagtcagctgcctatgtgatttgtataacctctagagattcataaccactgacctaacgtctgtgggcagcagtttgttctgtaaaacgagaataataaaacctatcctttaagattgtaaggattaagtaacataggtaacatagctactgtaatgtggtcccctgatcagcagaattagcaacacctgggagcttgttagaaatgcaaattctcaagtgtctcctggaaacagctactgaatcagagtagtttggtgggaccaaagaatctgtattttagcaaggagcatagatactttctgtgggccaggcacagtggcccaggcatgtaatcccagcacttagggaagcctaggtgggtggtgggagttctaagtgggcagatcccaggagttcctgtgcaacatgggaaacccatttctacaaaaaattagtcccaactactcaggaggctgaggtgggaggatcgccggagcctggggaagtcgaggctgcagtgagccaagatcacgccactgcactccagcctgtgtgacagagcgagaccctgtctcaaaaaaaaaaaaataatttctatatatattaaagtgtgagaagcagtgctgtagcacatcagcttcatataagtagggactatgaaattcttatttactaatatattgtcagtacctagtatagtgcccagcacagagtagatattcactatatttaatgaatgatttttaaatatattataccctcttactgaaactaacacattcaaagagtttttaaagttctttagtaatcaagtgccaaaagaggtttttaactccacagaataaaactggatatttgagttacttagaattaggacatcttttgcatgagtctagtatagatgtaatcatttgtggtgttctctttcataaatgtatctaatgaggaaagcaaaaatgacatttatagccatcgattattttcttttctgttccattttagcttagcttacaagtggttatgggttaagtggcatgtagcttgatgagaatgttgatcagattaaaacaagacccactcagttttttttaaagtaatctttttgatagaaatttatttttgtattatttaattataactttttaaagaggtgttatgttaagatcaaggacttgcagtcagtcagatctgggtttgagaataataaattgtcatttattaaccatgtcagagtttttctaccgaactctggggtaaatggtgggaaggaacagatttgggagcaccagcacccccaggcctcccctggccaccccaaggagcaggtgatcaatatctcagcatacctctacttatttgtggcaccccagtgtgtcttaggccttaatgggctgtgaggtgcatgaccttaggtaagttacttctctgattttcagtttccttatctgcaaaatggagaccttagggagttaatgtgggtatgagaaatgtgcataaaacatattgcacgaggttgaggcatatagtatgtgctaataaatggtaagttgctgctgctatggttgttaataattataaaaagcaaatggaaagggcttgaattgaaaaaaaatttagatacacggttttttgctttattagcctgcattgtatttttcattttttttctttaatgcatctttccaggacaaaaaataatatccaaagatattttggcactaacggcgctatctgtagcaagaaagttgagcagtgtgaactgttgagacttccaaggagacttcagacaaccaagacagtgtaaaggaaaacagagaaaaagacttgttagacattattaagggcacgaaagttgaattgagcacagtaaatgtacaaacaacaaagccacccaacagaagttcacttaaaagctacaactggcgggcctcaaagagctttaggacatgctccaaagaagaggtaaatttaattgtaatttgaatgttgtttgaaagtaatttttaaaattccagtaagctttttctttttgcaaaaaatgtttttagtacaagtacttgggagatattgaattaatgaagaaaaaaatatcagctaataaacacagggagtctaataattacttgagaaatgctgtaattgtattatatttaaataacaagaggatatctgtacacaatccagtgaaaggaagagagaagtgatctcattgagaattctacactcttacatacttattggtgttattaactgctacttaactgcctctttaagctgttaattaacaatatcatttacatcttgatttgaaggtagcttcatgtctgtaaaggactcacttatttgaaattttccatttaaaaaattttttctggaataaagtttagcacgttgattacaactgctctgtatgacttcctgtgaccaataactatccgtgctttcagctttcctggcttcctcagagcattgtaattacttgtgcttgtcaaaagagtatttaattctaagtgcaatcagtaatatcttggcattgtgttgtaggttaaatggcagtttttttttttaatgatacataatgatgtatttcagggatgtcattaattcaagtagtaaggtgtgtggctttaggatacccatcactgacttcccttatcagaacaaacagataatataggcttctgttttccagaatgatttaacattttaatggaacttcttggtttctacatggtatcaaaaatacctctggaaagtataattgggtggtagagtaagctaattcagacaatcagtacccataataggtacttcctcctcgtcctactctttagaaacaaaacagttacatataagtatgtggaagtaaataacacaaacatataaatacatatcaagaatggcatttttaaggctaccagacctgtttatgacccctcatgccctttattttaatttaattaactattacagaaatggtaaagtgagttgaatgctttggaaagagtcagtaaaggtcacgtaaacaatttctttccaattaggcatgagtgagacaaatatacatacgcaggagcatcatacccttagattgctttgtaagctatctcacattcttgctccacttttccacttaaaccaaaattgaaaatattgcaggatgggtgtgatgtatgtaaaatatatgccttagaaccttttatcagtggtcctgtgtttaaaaaagaggctttggtcctacatcaaaagactggtgaacaaggtgcatctgttttgagtttttaaaaggtgtcttttaatgatttttgcctcccctccccgcttttcaaggacttccaggatgcatgggattagatgagtcatgatctttgcttcatgaggcactgtcatcatagcttcatgcatagcctgcttttctttctttgtattatatattaaatccccattgatatggttaccatagttacactacctcccaaacttagtggcataaaacattcactcattatgctcacagattctgtgggttagcagtttggctggaacacagcggggaaggccagtctgtgctctatgatgtctgggtcctcagttggaagacttagaaatctgaggctggaatcatctgaagtttgcccactcataggtctggcagttgatgccagctgtcagctgagaccttagctgagggtgttagcagaaacacctacatgtggctttctttgtggcctgggctttctcaccgcatggtggctgggttccagggtgggtgtctcaagagaaagtgagccaagaggaagttgtattttgttttgttttgttttgtttttgagatggagtctcgctctgtcacccaggctggagtgcagtggcgcggtcttggctcactgctatctccacctcctgggttcaagcagttctctgcctcagcctcccgagtagctgggattacaggtgcctgccaccatgcctggcaaatttttgtatttttagtagagatggggtttcaccatgttggccaggctggtcttgaactcctgactttgtgatccaccctcctcggcctccccaagtgctgggattacaggcacgccaccgtgcctggccagttgtattttctttttaatgacctagccttgtaataagattggacattaccatgtttaccctcttccacattgattttcctaggatatttgtttttaccacaaccacttctgagacaccgtcttaacaaggataatgtcattgataggaatggagtaatatacatttggccctctgtatgcgtaggttctgcatccacagataacttctgataacgttttttaagaaacacagaaaaaaataccaattaaaaaatacagtataacaactacttatgtagcatttgttatattaggtattacaagtaatctagagatgatttaaaagtattctcgaggggcctggagcagtggctcatgcctgtaatcccagcactttgggaggccaaggtgggcagatcacttgaggttaggagctgagacctacctgatcgacatggtgaaaccctgtgtctatcacaaaaatacaaaaattagccgggtgtggtggcatgggactgtaatcgcagttactcgggaggctgaggtgggagaatcccttgaacccgggaggtggacaatgcagtgagccgagattgtgccagtgcactccagcatgggcaacagagtgagaccctatctcaaaataaaaaaaaaagttatgaaggggaaaagtatgtattcatgaaatagttttaattacaggattgaatagattgttaaaagatactttttttttttttgagatggagtcttgctgttttttgcccaggctggagtgcagtggtgtgatctcggcttactgcaacctccgccttctaggttgaagcgattctccttcctcagcctcctgagtagctgggattacaggtgcactccacaatgcctggctaatttttttggttttagtagagatggggtttcaccatgttgaccaggctggcctcgaactcctgacctcaggtgatccacctgcctcggcctcctaaagtgctgggattactgccatgagccaccacgaagccctgaaagatactttaacaagttctcattacattgttaaaatctatgaagaaagatccttgtatgtaaaaattatcttgttcaatgacacaggctccctacaatttttattaattagaactttataaattataaagccagagactataactatgaaggaaattattgttatgaaatgcatgattctgaaaaatgaatattcacctatgttctgtgcctactctgatcaaatacatatattaaaatttgaaaatgaagtttacaagtggtttatgaaagaaataacaatgatgtggaatacggttaaagctttattcacagataacagttctgaaagtacatttcattttaactattatatttccttttttctttttctttttttgagacagggtgttgctctgtggcccattctggagtgtggtggaacaatcatcactcactgcagcctcaacctcccaggctcaagtgatccttccactcaacctctcaagtagctgggactgtaggcatgtgccaccactcctggctaatttttttttttctttttgtggagatggggttttgccatcttgcccaggctggtcttgaactcttgagctcaagcgatcctccctccttggcctcccagagtgctggaattacaggcatgagccaccatgctgaaccccttttttcattcttctatttttcttccattcctatcagattttagatcttccatatatatctcaattaagtccttaaaatctttctccaagaactttaggaatttgggagctttaatttgaatattaggtaatagatcataatacagaaagccaggcataataaaatattaatttgggtcccacttattgagatggcagttctcagtgagtttaaaaatgtcgcaaatagccaggtatggtgacagatgcctgtagtccaagctactcaggaagatgatgtgggaggattgcttgaacccaggacttcgaggccagacttcacgacatactgagatcccatctcttaaaaaaaaaaaaaaaaaaggaaacaatgttgtatacagtttactttcttttcataataggatgtttttatattaacttgctctaatttatttaggaagcttttaaaagctttttcttatgaaaaatttaaaatatacgcaaagtacgcaaaatggtacagtgaacccctttatactgtcacccagcttcaacaatgatcaacattttactattcttgtattatatataccttcacccagttttcatctcctacttgataatgattgatggcttttttttttcaggtaaaatttacatacattaaagtgtacaaatcttagctggaggattttgacaaatggataagcccatgtgacccacacacttaaccaagacactgtgtttcccattttcaccttcccagttagtagccttctgtcctgaggcaattgttgtcttgattgttttttcacctcagattagttttgcctgttctggcacttgacagcaatggaatcatacagaatatattctgtgtccaacttctttcacttgctctaatatctgtgagaatcattcatgttggcatgagctgagtactcttccattgtttggatatctgacaatttgttttttcattctaacaacagaccttaggttggttccagtttggggctattatgagtaaagcttctgtgaacaggttaagctgccttaatatttgcttgcaatatatattgtttttgaaatacaatagcatctaattgaaaattccactaatttataatttttgaggctgatccctcatccctccaccttaatatattgttctgaattagcatttcaaagtttatataaaactggtacctaatagttgagaattcctgcttttgtcagatattgaattgaatgatacttttttgatcaacagaaaattttccccccaaaatcattttgcttttcactaaactactggcataataagcaatctctcttttttctttctcatttggttttcattttctttttcagaaatgagcccctgagtcctgagttggtggcagctgcatctgctgctctgttttgacaagcaaacaagccagaactgctcaggcagctccgtagcatgaggaagagtcaggggcacagagagatggagagagacctagttaggtaagtgaatcaaaccattaggttagtaatgtttatatctcaaaataggccattttcatgtggctagtaagtaatacacataatatataccacataagtggaatttacatatagaatataccatataagtagaattttagcaattcaagtttttaaaaaacttatgtcttaagtaagattatagttttaagagaccaattgaatagttactgtccttttaggaagttacagtttcttgtccatgaaacaaggaatgataaattcagtaatgttattaaaaataacagaataagatagcttttctgagaaaagtaatttttttttcagttaaatagcttgctggttttatgcatggtatagcaatcttcaggtctgtttccttctctttttcctcctattcttatgtttaagctgacatctttccacttactctcttcatctctcattattttatgctacgttagactccttgctgcctacattgtagtaagtggtaacactgcttcattttggagagtgatctaaatctgttattcccaatgagcgtgtgtaccagatgtatttcgggaagttaaaagaaatggccatgtgtggtggctcatgcccgtaatcccagcactttgtgaggctgaggtgagaggatcacttgaggccaggaatttgagaccagtctgggcagcaaaacaagaccccatctttacaaaccataaaaaaattagctgggcattgtggcatgtgccggcagttctagctactttgggggctaaggctggaggatggcttaagtccagagtttgaggctgcattgagttaagataggcaccactgccctccagtctgggcgacagcgagagaccctgtctctgaaagaaattatatttaaaaaaaaagaaaaccataaatatctgtactgtcagttcagtgactcattttgtttgtgtttgaacaaatacaagggcaataaataaatacatctatcttggttttaatttagttattgaatataggtgataggcatacagatactgattgtactttctgttcattttcttggaataatttttcatgtgacacttttatgtttgaaatgaatatttctgaagaacatctttaaaagacaagtaaacaaaaattgtaatgttctgttatgtgaatgttaatagatgactttttaaaatttaatttaaacataactttgtatgctgtataattagtggataaaaatgaaataagaattaaatgttatcactgtcctgtttcagaaagtttattactgttctgtagctaaggtttctttatttttttatttttttggagacaaagtttcactcttgtctcctcggctggactgcaatggtgcgatttcggcttactgcaacctccacctcctgggttcaagcgattctcctgcctcagcctcccaagtagctgggattactggtgcctgccactgtgcccagctaattttgtacttttagtagagaggggggtttctccatgttggcctggctggtcttgaactcctgacctcaggtcatccacccgccttggcctcccaaaatgctgggattacaggtgtgagccaccgatcctggctgtagctgagatttctaatgcacttgacctttttattatttcagtttcaataacaaaatatcagatatgaaaattgccagatgtgctacagctagaattaatataaggccagagcatcagattcagtttgaccaaggctatgacaattatcctggcctggagaagactgctgatcttagaaacaggtatcaggctttgtagtctgctgggttttgtttgtatagtttggttttaccttgactgtagatttaccttattgtgggtgtgtatgattgctgttggatatgtgagcattatgaatgcatttacatctgtgttcttactctctgtataccacttcctagagagggaaccatgtgctggagttagccagtcctgcatttttctataccttaaatcaaaataggccatgcttcatatctacccatgatgaatagggttcctttgatttagaataaatagagctgactgaattctgaacaagtgagtattttgtaagaaacattatttttcattttaaatatcaatgcctaatactgtgtattcatttaccctttatatctctatacatgcttatcttttgttacaccttagagaaatgacccaccatcaacgaaaagaaagaaaggcgtaggctgggcatggtggctcacgcctgtaatcccagcaatttagagggccgaggcaggcggatcacgaggtcgggagttcaagaccaacctggctaacatggtgaaaccccatctctactaaaaatacaaaaattagccggacgtggtggtgagctcctgcaatcccagctactcaggaggctgaggcaggagaattgcttgaatctgggaggtggaggttgcagtgagccaagatcgtgccactgtaccctatagcttaaaatggtagattatttgtggctatttgaaattactgaagttcttaaagatggtgagccatgtcttacatagttattttagaatctaaagttgttctgtatttacataaagtttctattctttctctcctttaaaccctgaaagtggtagttgagaaggaggagccagatatttggcatggtctgacaaaagttaacgtgtcttttatttatttatttgtttatttttttgagacggagtctcactctgtcgcccaggctggagtgaagtggcaccatcttggcccactgcaacctctgcctcctgggttctagcgattctcctgacagcctccccagtagctgggattacaggtgtgcaccaccatgcccagctcatttttgtatttttagtagagacagggtttcaccatgttggccaggctggtaactcctgacctcaagtgatctgcccacctcggcctcccaaagtgctgggattacaggtgtgagccaccacgcccggcctaacctgtctttatagcaggatatgctcacagttggagtgttttcaatacattgtgtattccgtggatttgttttaagtaaaatcaggcacttgagttaactccttctgggtgttaaattagtgatttatacaggaaagttggaaaaggtggttagcagttaacacaggaagttcaagagtttatggtgactttggaatattatttgaattactaatttaaagtgatttagtatctgttacatattattgaataaagtagaaagtgttcttggagttttacttaagaatgtttaactgagtcagttaataccggagaaaatttaactgaatcattcagcttgcatataatactgtgcagctacatcgggatggcatatttgatttttaatattagatttgatatttaatattttaaaaattaggtggcaaaggagaaactaaaaaagtaggaaaggggttcctgtgccttcagtgtgttaaaaagccagctaaaggggagtaaggggaagcaatggtgagatgccaagttgttcaccctgatatgacttgggcagggtctggggtatcaaccccagacaacccaggcctggacttattgcttctgttggaaattgacagttcacactggcctttctcagaatgttggcactgccactgactaattctgtgaccggggcaccttttatagcctccatcagcctgtttccccagctgtaaaatgctgaaagtgaaacctagcttaaatggctttcttgaggaatagaaaagaaaccacgtataaactctctggtacatagtaggtgctcagcaaatgtccattccctttctctgttgtgcattcctcttttgaagttcagtgctttaccaaggcatttcctctctgccgtgacttgctttaatccaccatcctgttcaccggacgttcggttgagaaagaagaatgcaaggcactgaggaaagttctggagcagaaaagcctttgtttacaaataacttgggaacctgctagaggaaaacttgtatgacttgaaatcacattacttaatgttcatatgatattttcattttttccggttctatttagtagagaaaagtagtttagtccataaaaaaagaatttagaattatttttaaaattagccctccagtttataaactggattttaatctgccagtaagtttattcaagtaaatatgtaaattgatgcataaaacagttgattatcaagtttgcaagaaaatgttacctgttaactctgatattaatttcaatggttaaaaagtcatgtaaagaaagttaattattttacagaatgattgctttatgaaagggaatgttgtgatttacctatataatcttttgtaattataatttgtaattaaacattgcagtgtttcctgcccttaaaaacaagtgttgactctttttaacagcttcttttaattataatttgtaattaaacattgcagtgtttcctgcccttaaaaacaagtgttgactctttttaacagcttctttttagcatagttttataatttttcacaacatggagtttttaaaacttaatataaaagggaacaaataaaaattaatgctaattgagctaatcttttcagttggatattttggaaattaagttgctgtaactgatttgttgtattatgaagcaaaacttcaagtgcacatttctgtttttagtctatcagtcctaaaaatgtggcaatttagctaagatgtttgatgtacgtcagtggaattattttgaatttttacatagaatatttcacttaaatttttttctcataattttgttgacagtttatattcattaaaatgttcttttttttaggaaaaatatattcagggggaagagatgtaatagatttcacattatggcagttactaaagaagcacgtgaacaggtttgttaagaataactatttctcaggtggaaaaatattccatcttttcaagatgtccttagtgttctgatggtgtaatagttggatattttaatattccctcctgtcattggcctggattcgaatcatgaatgtggcggttgttagaaggaaaacttgggactgtaaattgggaaggcattgagagaccaaagaataatttgggcaagaccagcttgatgaatagatgagtttactaggacttacctactggacatttctgggcagctctagagtcaccctgcctcttatctctaaactgcttttaagcttatatgctggctgtttgcctacatgtgtgcacaatgaaactgttttccttgatatgttttgaggtatgtcctgggatgtttgggttctcagggacacctgctcctcagctaggcactatggccttggctccctgcccagccttcagggttcaaccaacacacatatacccttaagtaacctggtgggagacataccacactacagttattgacattgctagttgtggttcagtttccctcttgaaatgttgcattctgtgagataatgggaggtgagtactactgattacatgaatccagaggtccagattagccactaatttgggttagaacattattaatcacctaccatttgcagtatatctctatgctattacataaagacatagtggttcctgtccctaggcagcttgctatctagaagaggagatagcatttataaaataacttattgaagtgatttagtgattgttcaggagatgggaagaacattcaaggaatatatttaagagacttgtgtttttttcttaacacatggttggtctttgttccctattcttccccttttctttgggtaagaaatttaccattttaagtctaaaagagaaatgagtgtcctcttgcttggcattaaatttggtttactagtaaaataaatgaagaaactcagtacaaatggtctccagagtgtaagtgatgagcatttctgacgaatagaagttagttttttggattttgatagaaataatgttgtatatggacttaggaggctaagacaacaggatggcttgggattaggagttcaagaccagcctgggcaacatagtgagatcctttctgtaaaaaaatagaaaaaaattatctgggtatggtggtgcatgcctatagtcctagcaacctgggaggttgaggtgggaggatcactggagcccagaattcgatgctgcaatgagttacaattgtgccataacactccagcctaagcgacagagtgagaccccctctcaaaggggaaaaagaaaatgttgtatgtgatagataagttcctgggccagcctccaatgactcatttaatctttctaccagttatttatatgaacttctgattttccccctatttaataaactatgttagaggctagatctcattcatgtctgtataccctatagcatctactcatgtggcttacagatcgtaggaactagttatcttaatcttaaattcttttttgaagaaactgtagtataaaatatacatctataaaggaaagtagtgaattcaattaacatttgttcattagaactgaaggtgaagctaaaagaacaaccccctgtattacaaaaactgcattctgttgtgtatgataaaaaggaaatgcaaaatgcatagggacaatgaatcacctctcccctgctcaaatggtatccgttaagtgtgcatcagaaaggaattttttgtcagggcagctgctgttgtccagccaaaagagacacttggattctggaaggagcccacttgctttttaaaataaaataatcttatttctaaaactgaaattagttggcaagaaggcatttaaattttatgtattttataaaacagtatcaaatgattatactctagtgaggaaagtagcacacaaatttatgtaataatttactctgaaagtactgtttgtgctatacttgcatgagtctaaagaatgttttttgtttccagttaagtagaagaatagcaacatatggaaacttaaatttagcaatttttcattgttgttatcttaccatcccaaataatgctggaaatataattggcattcagtaattttttttattgaccgattgaatgagttattctgttccatgattcccacttcttgttccccactaagttcttaccactgctacaaaggatatagtcataggccctactggttatcccagagtcgacaggcagtatagctcaacagaaagagtgttggtgttgtgtaggtctggattcaaattccgattctgcctcactaacctttccccaactgtaaaatgagggttagtatgtacatctgaaggatcaaatgaggtcatctgaaaaaagtgtgaggcacagtgcctggaacatagtacacatttaataaatgtttgcaactattagcaagtgtaaaatatgatgatcctaatgatgatggaaaagacataggtcggtcagtgtccaccaaataaaagataactgagacaattaagttatttcattggtgtgattgctctgtaaatgtggctagttaagcctaacagttgtgatagttacccagtatcagatgaactaggccaaaatatttaatatctgccagtcagtatgtggttagacacatctctgcacataaaggctcatagaaaccgattcagaaaaagcaaatagataaaataaggcttacccaggtagaagagtaaatgagctatttgttgacatgctttagggggcttgacaaaagtgtgtaaacaggtagagtggaggataaatcatatgcaatgtacacctctagcccagaaagataaaaaatgtttgaaaaaataattaaggatgaaaaattagggaaaaaagtagccaagggatagagagtgatattcattttctttttacaactttattaaggtataatttgtgtgcaaggaactgcacacatttagaatatataacttgactagttttgacaaatagatacacccgtgaaactgccacttagaaatctgaacattttcatgtccttttgcaacacacacacacacacacacacacacacacacacacacacacacacacaatgcaggcaaccactgatctgctttctgttaaaatagattaagttgcatctcttagaattgtacataaatgaaatcacacagtacgtactcttttgcatctggcttgtttcactcagctaatgatttgagattcatccatgctgtaacatgtactagtaatgcatttttattactgaatagtatacagttgtatggctgtattactgtttttttttttttttttgagacggagtctcgctctgtagcccaggctggagtgcaatggcgcgacctcggctcactgcaacctccacctcctgggtcccggttgaagcatttctcctgcctcagtctcccgagtagctgggattacaggcacatgccaccatgcccagctaatttttgtatttttagtaaagatggggtttcatcatgttggccaggctgttcttgaactcctgacctcgtgatctgcccgcctcggcctcccaaagtgctgggattacagctgcgagctaccgtgcccggctgatgtattacatttttgtacctattcacctgttagtggacatttggattgtttcccaaattacaacccacatttggctattacaaagaaagctgccatgaactttcgtgtacaagtctttgtgtggacatgtattatctcttgggtaaatatccagcgatgaaatagctatgatgaataacagatgtatttttaactttttaagaagccatcaagctgttttccaagatgtttgtaccattttacgttcccagcagcagtaactggtcggaatatggctcattttcaaaagatgttctgaaatttcaaaagtaaaaaagttattgaaacatgtaatatgatggtggtaattagccaactcacagggttggttgtgcagattaaatgtactaatgcataaaaaaatttaagcacagaggaagtactcaagtgttcattagcagttttattgttattctgttgatctaacttctttggttgttaacagtagtacattagtgactaattttgatagagttaaaataaacagtctagagtttaaaaataagtcacatattgtataaaaaatattcatattcataaaaatacctttaaacaaaatacaaatttatttttttttccagtagaaggggtagtgattacctggcattgttgtaaaaccaaagttaagcttgccattattgtagttatagtctttatttatttatttattttttgagacagaatctggctctatcacccaggtcggaatgcagtggcccgatcttggcttactgtaacctccgcctcctgggttcaagcggttctcctgcctcagcctcccaagtagctgggattacaggcacacaccactgtgcccagctaattttttgtattttaagtagagatggggtttcaccatgttggtcaggctggtattgaactcctgacctccccaccttggcttcccaaagtgctgggattacaggcatgagccacagtgcctggcctagttatagtctttaatataatttttgttgctgttatctctccgtgagtaactttttattatatactgtaattatgagtgtcaaggtattaaaaatacacgatcaattcaggattggttataacattttttaaaaagatatttacattgacttgttcttatttaaaatgtcttactatacagacacatcaccttcactttgggatatggaatttgataagcagttagccacagaatatgaacaaccccttgagaatgagattgaagaactgatccaggggacaaaagaggggaaactgagagttcccaattaataatgaagcag

SEQ ID NO: 24874 - DNA, 1239 bp, Homo Sapiens
atgcccatcatgggctcctcggtgtacatcacggtggagctggccattgctgtgctggccatcctgggcaatgtgctggtgtgctgggccgtgtggctcaacagcaacctgcagaacgtcaccaactactttgtggtgtcactggcggcggccgacatcgcagtgggtgtgctcgccatcccctttgccatcaccatcagcaccgggttctgcgctgcctgccacggctgcctcttcattgcctgcttcgtcctggtcctcacgcagagctccatcttcagtctcctggccatcgccattgaccgctacattgccatccgcatcccgctccggtacaatggcttggtgaccggcacgagggctaagggcatcattgccatctgctgggtgctgtcgtttgccatcggcctgactcccatgctaggttggaacaactgcggtcagccaaaggagggcaagaaccactcccagggctgcggggagggccaagtggcctgtctctttgaggatgtggtccccatgaactacatggtgtacttcaacttctttgcctgtgtgctggtgcccctgctgctcatgctgggtgtctatttgcggatcttcctggcggcgcgacgacagctgaagcagatggagagccagcctctgccgggggagcgggcacggtccacactgcagaaggaggtccatgctgccaagtcactggccatcattgtggggctctttgccctctgctggctgcccctacacatcatcaactgcttcactttcttctgccccgactgcagccacgcccctctctggctcatgtacctggccatcgtcctctcccacaccaattcggttgtgaatcccttcatctacgcctaccgtatccgcgagttccgccagaccttccgcaagatcattcgcagccacgtcctgaggcagcaagaacctttcaaggcagctggcaccagtgcccgggtcttggcagctcatggcagtgacggagagcaggtcagcctccgtctcaacggccacccgccaggagtgtgggccaacggcagtgctccccaccctgagcggaggcccaatggctacgccctggggctggtgagtggagggagtgcccaagagtcccaggggaacacgggcctcccagacgtggagctccttagccatgagctcaagggagtgtgcccagagccccctggcctagatgaccccctggcccaggatggagcaggagtgtcctga

SEQ ID NO: 24875 - DNA, 2034 bp, Homo Sapiens
atgctgtcatccactgactttacatttgcttcctgggagcttgtggtccgcgttgaccatcccaatgaagagcagcagaaagacgtcacactgagagtatctggagaccttcatgttggaggagtgatgctcaagttagtagaacagatcaatatatcccaagactggtcagactttgctctttggtgggaacagaagcattgctggcttctgaaaacccactggaccctggacaaatatggggtccaggcagatgcaaagcttctcttcacccctcagcataaaatgctgcgccttcgtctgccgaatttgaagatggtgaggttgcgagtcagcttctcagctgtggtttttaaagctgtcagtgatatctgcaaaatcctgaatattagaagatcagaagagctttccttgttaaagccgtctggtgactattttaagaagaagaagaaaaaagacaaaaataataaggaacccataattgaagatattctaaacctggagagttctccaacagcttcaggttcatcagtaagtcctggtttatacagtaaaaccatgacccctatatatgaccccatcaatggaacaccagcatcatccaccatgacttggttcagtgacagccctttgacggaacaaaactgcagcatcctcgcattcagccaacccccccagtccccagaagcacttgcggatatgtaccagcctcggtctctggttgataaagccaagctcaatgcaggttggctagactcctcacgctcccttatggaacaaggcatccaagaggatgagcagctgctcttacgatttaaatattattctttcttcgacttgaatcctaaatatgatgctgtccgaataaaccaactctatgagcaagccaggtgggccattctcttagaagaaattgattgcacagaggaagaaatgttgatctttgcagctctacagtaccacattagcaaactgtcgttgtctgctgaaacacaggattttgcaggcgagtccgaggttgatgaaatagaagcggcgctttctaatttggaagtaaccctagaaggtggaaaagcggacagccttttggaggacattactgatatccctaaacttgcagataatctcaaattatttaggcccaagaagttactaccaaaagctttcaaacaatattggtttatctttaaagacacatccatagcatactttaaaaataaggaacttgaacaaggagaaccactagaaaaactaaatcttagaggctgcgaagttgtgcccgatgtaaatgtagcaggaagaaaatttggaatcaagttactaatccctgttgccgatggtatgaatgaaatgtatttgagatgtgaccatgagaatcaatacgcccaatggatggctgcctgcatgttggcatcgaagggcaaaaccatggcagacagctcctaccagccagaggtcctcaacatcctttcatttctgaggatgaaaaacaggaactctgcatctcaggtggcttccagtctcgaaaacatggatatgaacccagaatgttttgtgtcaccacggtgtgcaaaaagacacaaatccaaacagctggccgcccggatcctggaggcgcaccagaacgtggcccagatgcccctggtcgaagccaagctgcggttcatccaggcgtggcagtcactgcctgagtttggcctcacctactaccttgtcagatttaaaggaagcaaaaaagatgacattctgggagtttcatataacaggttgattaaaattgatgcagccaccgggattccagtgacaacatggagattcacaaatatcaaacagtggaatgtaaactgggaaacccggcaggtggtcatcgagtttgaccaaaacgtctttactgctttcacctgcctgagtgcagattgcaagattgtgcacgagtacattggcggctacattttcttgtccacccgctccaaggaccagaatgaaacactcgatgaggacttgttccacaaattgaccggcggtcaggattga

SEQ ID NO: 24876 - DNA, 5121 bp, Homo Sapiens
atgggagtccccaagttttacagatggatctcagagcggtatccctgtctcagcgaagtggtgaaagagcatcagattcctgaatttgacaacttgtacctggatatgaatggaattatacatcagtgctcccatcctaatgatgatgatgttcactttagaatttcagatgataaaatctttactgatatttttcactacctggaggtgttgtttcgcattattaaacccaggaaagtgttctttatggctgtagatggtgtggctcctcgagcaaaaatgaaccagcagcgtgggaggcgttttaggtcagcaaaggaggcagaagacaaaattaaaaaggcaatagagaagggagaaactcttcctacagaggccagatttgattccaactgtatcacaccaggaactgaatttatggccaggttacatgaacatctgaagtattttgtaaatatgaaaatttccacagacaagtcatggcaaggagttaccatctacttctcaggccatgagactcctggagaaggagagcataaaatcatggaatttatcagatccgagaaagcaaagccagatcatgatccaaacaccagacactgtctttatggtttagatgctgacttgattatgcttggattaacaagtcatgaggcacatttttctctcttaagagaagaagttcgatttggtggcaaaaaaacacaacgggtatgtgctccagaagaaactacatttcaccttctacacttgtctttaatgagagagtatattgactatgagttttcagtattaaaagaaaagatcacatttaaatatgatattgaaaggataatagatgattggattttgatggggtttcttgttggtaatgattttatccctcatctacctcatttacatattaatcatgatgcactgcctcttctttatggaacatatgttaccatcctgccagaacttgggggttatattaatgaaagtgggcacctcaacttacctcgatttgagaaataccttgtgaaactatcagattttgatcgggagcacttcagtgaagtttttgtggacctaaaatggtttgaaagcaaagttggtaacaagtacctcaatgaagcagcaggtgtcgcagcagaagaagccaggaactacaaggaaaagaaaaagttaaagggccaggaaaattctctgtgttggactgctttagacaaaaatgaaggcgaaatgataacttctaaggataatttagaagatgagactgaagatgatgacctatttgaaactgagtttagacaatataaaagaacatattacatgacgaagatgggggttgacgtagtatctgatgactttctggctgatcaagctgcatgttatgttcaggcaatacagtggattttgcactattactatcatggagttcagtcctggagctggtattatccttatcattatgcacctttcctgtctgatatacacaacatcagtacactcaaaatccattttgaactaggaaaaccttttaagccatttgaacagcttcttgctgtacttccagcagccagcaaaaatttacttcctgcatgctaccagcatttgatgaccaatgaagactcaccaattatagaatattacccacctgattttaaaactgacctaaatgggaaacaacaggaatgggaagctgtggtgttaatcccttttattgatgagaagcgattattggaagccatggagacatgtaaccactccctcaaaaaggaagagaggaaaagaaaccaacatagtgagtgcctaatgtgctggtatgatagagacacagagtttatctatccttctccatggccagaaaagttccctgccatagaacgatgttgtacaaggtataaaataatatccttagatgcttggcgtgtagacataaacaaaaacaaaataaccagaattgaccagaaagcattatatttctgtggatttcctactctgaaacacatcagacacaaattttttttgaagaaaagtggtgttcaagtattccagcaaagcagtcgtggagaaaacatgatgttggaaatcttagtggatgcagaatcagatgaacttaccgtagaaaatgtagcttcatcagtgcttggaaaatctgtctttgttaattggcctcaccttgaggaagctagagtcgtggctgtatcagatggagaaactaagttttacttggaagaacctccaggaacacagaagctttattcaggaagaactgccccaccatctaaagtggttcatcttggagataaagaacaatctaactgggcaaaagaagtacaaggaatttcagaacactacctgagaagaaaaggaataataataaatgaaacatctgcagttgtgtatgctcagttactcacaggtcgtaaatatcaaataaatcaaaatggtgaagttcgtctagagaaacagtggtcaaaacaagttgttccttttgtttatcaaactattgtcaaggacatccgagctttcgactcccgtttctccaatatcaaaacattggatgatttgtttcctctgagaagtatggtctttatgctgggaactccctattatggctgcactggagaagttcaggattcaggtgatgtgattacagaaggtaggattcgtgtgattttcagcattccatgtgaacccaatcttgatgctttaatacagaaccagcataaatattctataaagtacaacccaggatatgtgttggccagtcgccttggagtgagtggataccttgtttcaaggtttacaggaagtatttttattggaagaggatctaggagaaaccctcatggagaccataaagcaaatgtgggtttaaatctcaaattcaacaagaaaaatgaggaggtacctggatatactaagaaagttggaagtgaatggatgtattcatctgcagcagaacaacttctggcagagtacttagagagagctccagaactatttagttatatagccaaaaatagccaagaggatgtgttctatgaagatgacatttggcctggagaaaatgagaatggtgctgaaaaagttcaagaaattattacttggctaaaaggacatcctgtcagtactttatctcgttcttcttgtgatttacaaattctggatgcagctattgttgagaaaattgaggaagaagtcgaaaagtgcaagcaaagaaagaataataagaaggtgcgagtaacagtgaaaccccatttgctatacagacctttagaacagcaacatggagtcattcctgatcgggatgcagaattttgtctttttgaccgtgttgtaaatgtgagagaaaacttctcagttccagttggccttcgaggcaccatcataggaataaaaggagctaatagagaagccgatgtactatttgaagtattatttgatgaagaatttcctggagggttaacaataagatgctcacctggtagaggttatcgactgccaacaagtgccttggtgaacctttctcatgggagtcgctctgaaactggaaatcagaagttgacagccatcgtaaaaccacaaccagctgtacatcaacatagctcaagttcatcagtttcctctgggcatttgggagccctcaaccattcccctcaatcactttttgttcctactcaagtacctactaaagatgatgatgaattctgcaacatttggcagtccttacagggatctggaaagatgcaatactttcagccaactatacaagagaagggtgcagttctacctcaagaaataagccaagtaaatcaacatcataaatctggctttaatgacaacagtgttaaatatcagcaaagaaaacatgaccctcacagaaaatttaaagaagagtgtaagagtcctaaagctgagtgttggtcccaaaaaatgtccaataagcagcctaactctggaattgagaactttttagcatctttgaatatctccaaagaaaatgaagtacagtcatctcatcatggggagcctccaagtgaagagcatttgtcaccacagtcatttgccatgggaacacggatgcttaaagaaattctaaaaattgatggctctaacactgtggaccataagaatgaaatcaaacagattgctaatgaaatccctgtttcctctaacagaagagatgaatatggattaccctctcagcctaaacaaaataagaaattagcatcttatatgaacaagcctcacagtgctaatgagtaccataatgttcagtctatggacaatatgtgttggcctgcccccagccagatccctcctgtatccacaccagtaactgaactttctcgaatttgttcccttgttggaatgccacaacctgatttctcctttcttaggatgccacagacaatgaccgtttgccaagtaaaattatctaatggcttactggtacatgggccacagtgccactctgaaaatgaagccaaagagaaagctgcactttttgctttacaacagttgggctccttaggcatgaatttccctttgccttcacaagtatttgcaaattatccttcagctgtaccacctggaaccattcctccagcctttcccccacctactggctgggatcactatggaagcaactatgcattgggggcagctaatataatgccttcgtcgtctcatctctttggctcaatgccatggggaccatcggtgccagttcctgggaagcccttccatcatactttatattctgggaccatgcccatggctgggggaataccagggggtgtgcacaatcagtttatacctctgcaggttactaaaaaaagggttgcaaacaaaaagaactttgagaataaggaagcccagagttctcaagccactccagttcagactagccagccagattcttccaacattgtcaaagtaagtccacgggagagctcatcagcttctttgaagtcctctccgattgctcaacctgcatcttcttttcaagttgaaactgcctctcaaggccatagtatatctcaccataagtcaacaccaatctcttcttcaagaagaaaatcaagaaaactggctgttaattttggtgtttctaaaccttctgagtaa

SEQ ID NO: 24877 - DNA, 1878 bp, Homo Sapiens
aaagcctgcgagcgccagccgagatcgcagcccaacccatggccgggtctcctagccgcgccgcgggccggcgactgcagcttcccctgctgtgcctcttcctccagggcgccactgccgtcctctttgctgtctttgtccgctacaaccacaaaaccgacgctgccctctggcaccggagcaaccacagtaacgcggacaatgaattttactttcgctacccaaaagagtctcactctgttgcccaggctggagtgcaacggcgcaatctcggctcactgcaaccttcacctcccaggcttccaggacgtgcatgccatggtcttcgtgggctttggcttcctcatggtcttcctgcagcgttacggcttcagcagcgtgggcttcaccttcctcctggccgcctttgccctgcagtggtccacactggtccagggctttctccactccttccacggtggccacatccatgttggcgtggagagcatgatcaatgctgacttttgtgcgggggccgtgctcatctcctttggtgccgtcctgggcaagaccgggcctacccagctgctgctcatggccctgctggaggtggtgctgtttggcatcaatgagtttgtgctccttcatctcctgggggtgagagatgccggaggctccatgactatccacacctttggtgcctacttcgggctcgtcctttcgcgggttctgtacaggccccagctggagaagagcaagcaccgccagggctccgtctaccattcagacctcttcgccatgattgggaccatcttcctgtggatcttctggcctagcttcaatgctgcactcacagcgctgggggctgggcagcatcggacggccctcaacacatactactccctggctgccagcacccttggcacctttgccttgtcagcccttgtaggggaagatgggaggcttgacatggtccacatccaaaatgcagcgctggctggaggggttgtggtggggacctcaagtgaaatgatgctgacaccctttggggctctggcagctggcttcttggctgggactgtctccacgctggggtacaagttcttcacgcccatccttgaatcaaaattcaaagtccaagacacatgtggagtccacaacctccatgggatgccgggggtcctgggggccctcctgggggtccttgtggctggacttgccacccatgaagcttacggagatggcctggagagtgtgtttccactcatagccgagggccagcgcagtgccacgtcacaggccatgcaccagctcttcgggctgtttgtcacactgatgtttgcctctgtgggcgggggccttggagggctcctgctgaagctaccctttctggactcccccccagactcccagcactacgaggaccaagttcactggcaggtgcctggcgagcatgaggataaagcccagagacctctgagggtggaggaggcagacactcaggcctaacccactgccagcccctgagaggacacgctccttttcgaagatgctgactggctgctactaggaagttctttttgagctcccattcctccagctgcaagaagggagccatgagccagaaggaggcccctttccacaggcagcgtctccacagggagaggggcaacaggaggctgggaaatggtggggagtggggccgtaactgggtacaatagggggaacctcaccagatgcccaacccgactgccctaccagcctgcacatgggtagaagaggccaaattgaggcacccaagtgatccactggccccacgtcacacagttacagtgaagcccaagccaggcctggttgagggtgataaacgccactgtctctaaaaaaaaaaaaaaaaaa

SEQ ID NO: 24878 - DNA, 6117 bp, Homo Sapiens
ttcgagcttcccggctgctttgtttacctaatcaagcctgggcaatggcgggcgcccctcccgcagcctcgctgccgccttgcaggttgatctcagactgctgtgctagcaatcagtgagactccgtgggcgtaggactctccaagccagtgagatgaactcggtatctcagatggaaatgcagaaatcaccgtcttctccatcgctcacgctgggagctgtagaccggagctgttcctattcggccatctttgctcctccctgcaactaactccattcttaattgaccatcaaggaaatttccatccacacagattagcagttgaaaatgaagctgcacacatacatgtaagagaagcaaaaatgtcagatgatatcaggaaaaggtttgaatttccaaattctcttatccaatcacaggctgtgggtcatcttattgctgcagtcctaaaggaaaatggtttttcagaaaagattcaccaatctacaaatcagactcctgctttgaacttgctgtgggagaagtgttgcagtgacaatgtagtggttcgaacagcctgctgtgaaggtctggtggcactcgttgctcaggatcatgcagagttcagctatgttctcaatgggatactcaacttgattccatcaaccagaaatacacatggcttgataaaagccattatgcacttactacaaatgcaagctcttaaggaaggacaaggtggggaaaagaatattcagagtatatataccattagaaatcatcctcatcctttgataactgtgcttgaacacagacctgattgctggccagtgtttttgcagcagctgacagcgtttttccagcagtgccctgaaaggttagaagtttcatgcattcaaataatggcaccatttctgtggtatctgtattgtgaaccatctcagttacaagaatatgctaaactccgactagccctgctgaaagtcttacttcaaccccaggttctttgtgacaaagatcaaccatcaatactggaacagcagatacttcaactgtgttgtgacatagttccatgtttgcaggtaaaagatttgatacagacaacagaggcgatgatgtttattgaggaagtatgtttaagccttttgcgtcatcctgttttctggaaaattcagcttacccagatgagtcttcagctgctgtgtgtcagtgaagtcagcttaaagataactggtgaatgttcatcttcaattcaccttttagagcacagtgttgaacttctgaaggaggattttcctgttgaactggtcataattggaatagctttactacttctacagactccagcaagtcagcagaagccaatcttaaatctagctttgaagctcctctctgttactgaggatcagaaaatcccaaagtcctctctgctgctagtgatgccaattctgcagatactatcttctactgccttggaagactgtatatctgtggatgaagaaggtccctctaggcagcagttggctctaaaccttttggaaatgatacagcaggaatgttacagagatgaccaccaaaagctctcctacaagcttgtgtgccctgtaaccagtatgtatggtacaatatttacagcctggaggattcttgaagtaatgacagactcgtctgctgcaagtgactggttggcttcagtagagtcattgcttcctattactgctgtgatccctgcgcctgcctttcttctgctggctcacctccttgttgaagacaaaggacaaaatcttcaccaaatactcaaggtcactacagaattagcccaagtagattcctcccaggtgccaaatctgattccagttttgatgttcaaattgggaagaccactggaacctatattatataatgatatattgtatactttacctaagcttggtgttcacaaggtgtgtataggacaaattctacgaataatacaactacttggaaccacaccacgactaagagctgtcactttgcgcttgctgacatctttgtgggaaaagcaggaccgagtctatcctgaactgcagcgtttcatggctgtgtctgatgtaccttctctttcggtgggcaaggaagtccaatgggagaaactgattgcaaaagcagcatcaatcagagatatatgtaagcagaggccatatcaacatggtgcagatatgttggcagctatttctcaagtgttgaatgaatgcaccaagcctgatcaagctactccagcagccttggtattacagggtcttcatgcactctgtcaagctgaggttgtttgcattcgctccacttggaatgctctctctccaaagctgagttgtgacacaagacctctcattctgaagacactgagtgaactattttctctagttccttccttaacggtcaatacaactgaatatgagaattttaaagttcaagtcctcagcttcctctggactcatactcaaaacaaggacccaattgtagcaaatgctgcatatagatccctggccaactttagtgcaggagaacacaccattcttcatctgcctgaaaagataagaccagaaattcccattcctgaagagttagatgacgatgaagatgttgaggatgtggatctttcagttcctggctcttgctatctcaaactgttgtcactcactccccctttggttttaccagctttggaggaattttttacatcacttgtgaagcaagaaatggtgaatatgcctcgtgggatatatcactctgcattaaaaggaggtgcccgctcagaccaaggaaagactgtagcaggaatccccaattttatattgaaaatgtatgaaacaaacaagcaaccaggactgaaacctggccttgcaggtggtatgttattttgctatgatgtttccatgtatcagagtaaagatggaaaaccattgaacagactgatggccagcagagggcgaagtttcaagcagacttcacttgctcttgtacatgaggttcatatccagctttcagagtggcaccgtgcaatttttcttccacaggcctggcttgcatacatgaatcgagcttatcatgccattttacagggaagactaggagagctggagttgcagttaaaacatggaaaagaagaacctgaggaggtgcagtacaaaaaaagcacagcctggctctgggttagagacatgctgactgatgagatcaccaaggcagctgcaaaggagagtccggtagtgaaaggcaatgcgctgttagctctaagcagccttgctgtcgtcgtatctagacatgaagccagcctctcctcagactctgacgggctcctggaggttcaacctaatttcctttcaatgaaagagtgggtttccatggtacttgatacactcttggtcattgtggatagccattaccaacccagagggcaacttctctcctggttttattataagtcctattctggtgaaaacacagctagtgccattgcccgttctgctgccgccacggctttgtctctccttgtgccagttttcattatctcttgcaaagagaaggttgaggaaatcctgaacatgctgactgccaggttacctgggaaaccaagtgctgatgagtctcaagccgtgcaaatccacatgggccttgctttagggatgtttctctctcgcttgtgtgaagagaaactcagtgatatatctggccaagagatgaaccttcttctgatgaagtcgttggatgccctggaaaattgctgctttgacactagtcttgaatacaacacgggctgtatattgggagttggacttgttctgtccctcatgagccacagcagccaaatgcagtcccgcgttcacgtagcagcattgctccggaagctgtctgcgcacgtagatgacagcgggagccagagcagaacgtttcaggaggtccttgcctacacacttagctgtgtatgtacatcagcgttcagtgctggaattattgaggctacagaggctgaggatgttatgaacaagcttcgactgttagtggagaatagccagcagacttcaggttttgccctggctttaggaaacatagttcatgggttgtctgtgtgtggacatggaaaagctgaagacttgggcagcaaactactccctgcctggatcagaattgttctaacagagggcactcccacaatgctttgtctggcagctcttcatggcatggtggccttggtaggctctgaaggggatgtaatgcagctgaaatcagaagccatccagacctctcattttcaaggcagacttaatgaagtcattagaaccttaactcaggtcattagtgtctctggggtgattggtctccagtcaaatgcagtctggcttcttggacatcttcatctatctactctatcctcaagtcaaagtagagcctctgttcctactgactatagctacttgcctgaaagcagttttattggagcagctattggcttcttcattacaggaggaaaaaaaggtcctgaatctgtgcctccttcccttcttaaagtagtgatgaaacccatagcaactgttggagaaagctaccaatatcctcctgtgaactgggctgcacttctctctccacttatgaggctaaattttggtgaagagatccagcaactgtgccttgaaattatggtgacccaggcacagtcatcccagaatgcagctgcactattgggcttgtgggtgacaccaccactgatccacagtctgagtctgaataccaagagatatctcctgatatctgcacctctgtggataaaacacatctctgatgaacagatcctgggttttgttgaaaatttaatggtggcagtttttaaagcagcttccccacttggaagtcctgagctatgcccaagtgctttacacggtctgagccaggccatgaaactgcccagccctgcccaccacctctggagtctgctctctgaagctactgggaaaatttttgacctcctgccaaataagattcggagaaaggatctagagctgtatatcagcatagcaaaatgcctcttagaaatgacagatgatgatgccaatcggatcgcccaggttactaagagcaacatagaaaaagctgcctttgtcaaactgtacttagtctctcaaggacgattccccttggtgaacctgaccgatatgctgagcgttgctgtgcagcaccgtgagaaagaggtgttggcctggatgattctgcacagcttataccaggcacggattgtgagccatgccaatacgggcgttttgaagagaatggagtggctcttggaactgatgggttatattagaaatgttgcttaccagtcaacatcctttcacaatacggctcttgacgaggctttggacttcttcttgctgatatttgcaaccgcagtggttgcatgggctgaccacactgcccctctcctcctcggcctcagtgccagttggttgccatggcatcaggagaatggcccggctgggccagtaccaagcttccttggcaggagtccaatgcacagggtcactctgcaggaggttctcactctccttcccaatagcatggctctgctgctgcagaaagagccatggaaggaacagacccagaagttcattgactggctattcagcatcatggaaagccctaaagaagccctctcagcacagtccagggatcttttgaaagccaccctgctgtccttgagagttctcccagagtttaagaagaaagctgtatggaccagagcatatggttggtgaacagttttgcagtaaccagcagcattctcagctggatgaggaaaaccatataagtggaagaagtttttcagaattcatgcctggtattgctgagacatgatgcagagagttaagggtcatgaaaagatggccacatcactgacagcttgacacatgcctcctaagagaggagtgcattgctttagtacccgggccagttgagactgaaacaggaacttggattttctttatttggcttgagttcaatgtggagattttctttgtgaaagcttgaagatattatcttctccctgctaaattccagtaaaataatgttgtcaattttgaaaaaaaaaaaaaaaaaaaaaa

SEQ ID NO: 24879 - DNA, 1952 bp, Homo Sapiens
gtataatccaggagtatccaaatagacatttacttctttatatgcagcaaaacacatatgtgttaatggtcccctgagctatcaagtaaaagggactcctggctaaggaatgaaattacatatggtttatatagttatatatagttataagagtgtggtactgtgaagataaggtaacaagtttttatgtcaatgccaattttcagcgttcacccattgccccagatacagttattctttctctatcaactgtgcctcaccaatatatttcacattcttataattacaaccattctactttagaccttttttttgttgttattttgactattgcagtggcctcaaatttcgttcctccactttcattcatcttgctcaaaagctacccaccataatgatggaaaattatcttcctaaaatgcaaattattaaacttttgatagatctggccccttcttgcctctcctgtcccttctgctagttatccaacgcaaatcatacatttccacacgttcaccatcattttctagtttacacactgttgtcttttgcttactcctaatagtttttctaatacaccgtacttttccctgttttacctgactgtacctacacatttattcctttagattcagtttaggtttaactttttttcggaacacctttcctgattccctatgcccaaactccaccatttcctccagactctccatgttcccaatggtgcgtgtgtgggtgggtgtgtgggggtgtgtgtgtgtgtgaatatcattcatctgtctccttcactagactgtaagcagctggagggtagagcttgccttatatcttgctttctatatcttcagtgtcagcacttagaaaatgtttgagtgactgactcgtgttcttaatatttctcgctttggggttaccatggtcattcctttacctagggaacaagacgtcaaatcaccatgtaacctgatacattatttagctaaaaactgcttcaatgaatattgttgcaacagtttttctacagactaaaggtattataatgtatacctttttttttgctgctgtcctgacctttagtctcaaggactagaatgtaactccatcagggcagggatttttttatctgccttttctattctgttcccaacactaggacaacataggtgctcaataaaaatttattgaaacagatgaaactgcttttttctcttttttttagctgttacaagcttctgtgtattacattgtttctaatcaatggcagggtataaccacagatatgatttgtttaaataaaagaattttcaaattatttagttttatagcatagcatcattttggccaggcatggtggctcacgcctgtaatcccagcactttgggaggccaaggtgggcgaatcatgaggtcaggagttcgataccagcctggccaacatggtgaaaccccgtctctattaaaaatacaaaaaaattagctgggcgtggtggcaggtgcctgtaattccagctacttgggaggctgaagcaggagaattgcttgaacctgggaggtggaggttgcaatgagccgagatcctgccactgcaccccaagcccaggtgattgatagtgcgacactccgtctcaaaaaaaatatatatgtgtgtgtgtgtgtgtgtgtgtgtgtgtgtgtgtgtgtgtagcatcatttcttttatgtttactttctcagtgggatataccattggcctttgcctaatattaaaatgagcatacatatccattgccagaacagattccagctaacagcaaagagagctacccacacagcatgctacattatataaaatttggagaagtttatctagttcagggcattgatctgcttagatcttttcatcttaaagagagagagaaaatacaaattatttttagacctgaaatcaagtgctcaactccaaacaacatttct

SEQ ID NO: 24880 - DNA, 7554 bp, Homo Sapiens
atggtgggggaacggcatgctggggacctcatggtgcccttagggcctcggctgcaggcatatcctgaagaactcattcgacagaggcctgggcatgacgggcatcctgaatacctgatccgatggagtgtcctgaagtgtggggaagtgggcaaagtgggtgtggaagaaggcaaagcagagcacatcctcatgtggctgtcggctcctgaggtctacgccaactgccctgggctgttaggtgagcgggcactatctaagggacttcagcacgaaccagctggggtttcaggaagctttcctcgagatccaggaggcctggatgaagtggcaatgggagagatggaggctgatgttcaggcgctggtacgcagggcggccaggcagctggcagaaagtgggaccccaagcctcacggccgctgtgcttcacaccatccacgtgctcagtgcctacgccagcatcgggcccctcactggtgtcttcagggagacaggagccctggacctgctcatgcacatgttatgcaatcctgagcctcagatccgccggagtgcaggcaaaatgctgcaggctctggcagcccacgatgctgggagtcgggctcacgtccttctatcactgagccagcaagatggcatcgagcagcacatggattttgacagtcgctatacattgctggagctgtttgcagaaaccacatcctctgaagaacactgcatggcctttgagggcattcatctgcctcagatcccaggaaagctgcttttctccttggtgaagcgctacctttgtgtcacgtccctcctggatcagctgaatagcagtccagagctgggagctggagaccaaagctccccatgtgccacaagagagaaaagccggggacagcgggaactggagttcagcatggctgtgggcaacctcatctctgagcttgtgcggagcatgggctgggcccggaacctcagcgaacagggcatgtcacctccccggccaacccggtccatctttcagccctacatttcaggccccagccttttactccccaccattgtcaccacccccagaagacaagggtgggtcttccgccagcgctctgaattctccagccgtagtggctatggagaatatgtgcagcagacactccagccagggatgcgagtgcggatgctggatgattatgaggagatcagtgctggggacgagggcgagttccggcagagcaacaacggcattccccctgtgcaggttttctggcagtcgacaggccgcacttactgggtgcactggcacatgctggagatcctgggccctgaggaagccactgaggataaggcttcagcagctgtggagaagggggcaggggctactgtgttgggcacagcatttccctcctgggactggaatcctatggatgggctgtaccctttgccgtacctccagcccgaacctcagaagaatgagagagtgggatatctgacccaggctgaatggtgggagctgcttttctttatcaaaaagttggacttgtgtgagcagcagccaattttccagaatctttggaagaacctggatgagaccctgggtgaaaaggccctaggtgagatctctgtgtccgtggaaatggccgagagtctgctgcaggttctcagtagtcgatttgagggcagcactctcaatgacctgctcaactcccagatctacaccaagtatgggctgctgtctaatgaaccaagcagctcgtctacttcacgaaatcactcctgtaccccagatccagaagaggagtccaagtcggaggccagcttctcagaggaagagactgagtccctcaaagcaaaggccgaggcccctaagacagaggccgagcccaccaagacaaggaccgagacccccatggcacagagtgattctcagctgtttaaccagcttctggtgactgaggggatgaccctgcccactgagatgaaggaggcagccagtaaaatggccagagccttgcggggtcccggtcctcgcagctccctggatcagcatgtggcagcggtcgtggccactgtgcagatatccagcttggacacaaacctgcagctttcagggctctctgccctctctcaggctgtggaggaggtcactgagcgggaccaccctctggtccgtcctgacagatcgctgagagagaagctagtgaagatgctggtggagctgctgaccaaccaggtgggagagaagatggtggtcgtgcaggccctgcgcctcctttacctgctcatgaccaagcacgagtggcggccgctctttgccagggagggtggcatctatgctgtgctggtctgcatgcaagaatataagacttctgtcttggtgcagcaggctgggctggcggcactgaagatgctggccgtcgccagctcctcggagatccccacttttgttactggccgagattctatccactctttgtttgatgctcagatgaccagagagatcttcgccagcatcgactcagccacacgcccgggctctgagagcctgctcctcactgtccctgcagccgtgatcctgatgctgaatactgaggggtgctcttctgcagcgagaaatggcttactcctgctcaacctacttttgtgcaaccaccacactctgggagaccagattataacccaagagctgagagacacgttgtttaggcactcagggatagcaccaagaacagaacctatgcctaccacacgcaccatcctcatgatgcttctcaatcgctactcagagccgccgggcagccctgagcgtgcagcactagagacccccatcatccagggtcaggatgggtcccctgagctactgattcgatccctggttgggggcccatctgcagaactactcctggacttggagcgtgtgctgtgccgtgagggcagccccggaggtgccgtgaggcccctcctcaagcgcctccagcaggagacccagcctttcctcctgttgctgcggactctggatgctccggggcccaacaagactctgctgctgtctgtgctgagggtcataacccgactgctggatttccctgaggcaatggtcctcccctggcacgaggtcttggagccctgcctcaactgcctgagtggccctagcagtgactccgagattgttcaggagctgacctgcttcctacatcgcctggcctcgatgcataaggactatgctgtggtgctctgctgcctgggagcaaaagagatcctctccaaagtcctggacaagcactcagctcagctgctgctgggctgtgagcttcgggacctggtgacagagtgtgagaagtacgcacagctctatagcaacctcacctccagcatcctggccggctgcattcagatggtgctgggccagatcgaagaccacagacgaacccaccaacccatcaatatccccttctttgatgtgttcctcaggcatctctgccagggctccagtgtggaagtgaaggaggacaagtgctgggagaaggtggaggtgtcctccaacccgcaccgagccagcaagctgacggaccacaaccccaagacctactgggagtccaacggcagcaccggctcccactacatcaccctgcacatgcaccgtggtgttcttgttaggcagctcactttgctggtggccagtgaggactcaagctacatgccagccagggtggtggtgtttgggggtgacagcaccagctgcatcggcactgagctcaacacggtgaatgtgatgccctctgccagccgggtgatcctcttggagaacctgaaccgcttctggcccatcatccagatccgcataaagcgctgccagcagggcggcattgacacccgggttcggggtgtggaggtcctgggccctaagcccacattctggccactgttccgggagcagctgtgtcgccgaacatgtctcttctacacaattcgggcacaagcctggagccgggacatagcagaggaccaccggcgcctcctccagctctgtcccagactgaacagggttttgcgccacgagcagaattttgctgaccgcttcctccctgatgatgaggccgcccaggcactgggcaagacctgctgggaggccctggtcagccccctggtgcagaacatcacctctcccgatgcggaaggcgtgagtgccctgggatggctgctggatcagtacttagaacagagagagacctctcggaaccccttgagtcgagcagcgtcctttgcttctcgagttcgtcgcctttgccacttgctggtgcatgtggaacctcctcctgggccttctcctgagccatccactcggcccttcagcaagaacagcaagggtcgggaccggagcccggcgccttcgccagtgcttccaagcagcagcctgaggaacataacccagtgctggctgagcgtggtgcaggagcaggtcagcagattcctggctgcagcttggagggccccagactttgtgcctcgttactgtaaactctatgagcacttgcagagagcaggctccgagctgtttgggcctcgggcagccttcatgctggctctgcgcagtggcttctctggcgccttgctgcagcagtccttcctcactgctgctcacatgagtgagcagtttgccaggtacattgaccaacagatccagggtggcctgattggtggagcccctggagtggaaatgctggggcagcttcagcggcacctggaacccattatggtcctttctggtctggaactggccacaacttttgagcacttctatcagcattatatggcggaccgtctcctgagctttggttcgagctggctggagggggctgtgctagagcagattggcctctgttttcccaaccgcctcccacagctgatgctgcagagcctgagcacctctgaggagctgcagcgccagttccacctcttccagctccagcggctcgacaagttgttcttggagcaggaagatgaggaggaaaagagactagaggaagaggaggaggaagaggaggaagaggaagctgagaaagaattatttatcgaagatccaagtccagccatttctatactggtcctgtcaccacgctgctggcccgtctccccactctgctacctgtaccatcccagaaagtgccttcccacagaattctgtgatgcccttgaccgtttctccagtttctacagccagagtcagaaccatccagtcctggacatgggaccacatcggcgactgcagtggacgtggctgggccgggctgagctgcagtttgggaagcagatactgcatgtgtccaccgtgcagatgtggctgctgctgaaattcaatcagacagaggaggtgtcagtagagaccttgctgaaggattctgacctctccccagagctgctgctccaggcactcgtgcccctcacctcagggaatggccctttgaccctgcatgagggccaggactttccacacgggggtgtgctgcggcttcatgagcctgggccccagcgcagtggggaggccctgtggctgatacctccccaggcatacctgaacgtagagaaggatgaaggccgaaccctggaacagaagaggaatctcttgagctgtcttcttgttcgtattctcaaagcccatggggaaaagggcctccacattgatcagctggtttgtctggtgctggaggcctggcagaagggtccaaatcctcctggaaccctgggccacactgttgctgggggtgtggcctgtaccagtacagatgtcctctcttgcatcctgcacctcttaggccagggctacgtgaaacggcgtgatgaccggccccagatcctgatgtatgccgctccagagcccatggggccctgccggggtcaggcagatgtccctttctgtggcagccagagcgaaacctccaagcccagcccagaagctgtggctaccctggcatctctacagctgcctgcaggccgcaccatgagcccccaggaagtagaagggttgatgaagcagacggtgcgtcaggtgcaggagacgctgaacttagagccagatgtcgctcagcaccttttggctcattcccactggggcgctgaacagctgctgcagagctacagtgaggaccctgagccactgctgctggcagctgggctgtgcgtacaccaggctcaggctgtacccgtacggcctgaccactgccccgtctgtgtgagccccctggggtgtgacgacgacctgccctctctctgctgcatgcactattgctgtaagtcttgctggaatgagtacctgacaactcggatcgagcagaaccttgttttgaattgcacctgccccattgccgactgccccgcccagcccaccggagccttcattcgtgccatcgtctcctcgccagaggtcatctccaagtatgagaaggcgctcctgcgtggctatgtggagagctgctccaacctgacctggtgcaccaacccccagggctgcgaccgcatcctgtgccgccagggcctgggctgtgggaccacctgctccaagtgtggctgggcctcttgcttcaactgtagcttccctgaggcacactaccctgctagctgtggccatatgtctcagtgggtcgatgacggtggctactatgacggcatgagcgtggaggcgcagagcaagcacctggccaagctcatctccaagcgctgtcccagctgtcaggctcccatcgagaagaacgaggggtgcctgcacatgacctgtgccaaatgtaaccatggattctgctggcgctgcctcaagtcctggaagccaaatcacaaagactattacaactgctctgccatggtaagcaaggcagctcgccaggagaagcggtttcaggactataatgagaggtgcactttccatcaccaggcgcgggagtttgctgtgaacttgcggaaccgggtgtctgccatccatgaagtgcccccgcccagatccttcaccttcctcaatgatgcctgccagggactggagcaggctcggaaggtgctggcctacgcctgcgtgtacagcttctacagccaggacgcagagtacatggatgtggtggagcagcagacagagaacctggagctgcacaccaatgccctgcagatcctcctggaggaaaccctgctgcggtgcagagacctggcctcctccctgcgcctcctgcgggccgactgcctcagcacgggcatggagctgctccggcggatccaggagaggctgcttgccatcctgcagcattctgcccaggatttccgggttggtcttcagagtccatcagtagaggcctgggaggcaaaaggacccaacatgcctggcagtcagccccaggcctcctcagggccagaggcagaagaggaggaggaagacgatgaggatgatgtgcccgagtggcagcaggatgagtttgatgaggagctggacaatgacagcttctcctacgatgagtctgagaacctggaccaagagactttcttctttggtgatgaggaagaggatgaagatgaggcctatgactga

SEQ ID NO: 24881 - DNA, 5915 bp, Homo Sapiens
cgaagatggcggaagggctggagcgtgtgcggatctccgcgtcggagctgcgcgggatcctggctactctggccccgcaggccgggagcagagaaaacatgaaggaattaaaggaggccaggccgcgcaaagataacaggcgtcctgatctggaaatctataagcctggcctttctcggctaaggaacaagcccaaaatcaaggaaccccctgggagtgaggagttcaaagatgaaattgttaatgaccgagattgctctgctgttgaaaatggtacacagcccgttaaagatgtctgcaaggaactgaacaaccaagagcagaatggtcctatagacccggaaaataatcggggacaagaatcctttcctaggactgctggacaagaggatcgtagtctaaaaattatcaaaagaacaaagaaacccgacctgcagatctatcagcctggacgacgtttgcagactgttagcaaagaatccgccagtcgggtggaggaggaagaagtcctcaaccaggtagaacaactgagagtagaggaagatgagtgtaggggaaatgttgcgaaggaggaagttgcgaataaaccagacagggccgagatagaaaagagcccaggtggtgggagagtaggggctgcaaaaggagaaaaaggaaagaggatgggaaaaggggagggggtgagggaaacccacgacgacccggcccgcgggaggccgggctccgcaaagcgctactcccgctcagacaaacgaaggaatcgctaccgcacgcgcagcaccagctcagctggcagcaacaacagcgctgagggagctggcctgacggataatggatgtcgccgccgccgacaggataggaccaaggagaggccacgactgaagaagcaagtgtctgtgtcctcaaccgattccttagacgaggacagaattgatgagcctgatggattaggacccaggagaagttcagaaaggaagagacatttagaaagaaactggtctggccgtggggagggtgagcagaaaaccagtgctaaagaatatcgaggcactcttcgtgtcactttcgatgcagaagccatgaacaaagagtctcccatggtgaggtcagccagggatgatatggatagaggaaagcctgacaaaggcttgagcagtgggggcaaaggctctgagaagcaggagtccaaaaacccgaaacaagaacttcggggtcgtggtcgtggcattctgattttgcctgcccataccaccctatctgtcaattcagcaggttctccagagtccgcgcctttgggacctcggcttttgtttggatctggtagtaaggggtctcggagttggggccgtggaggcaccacacgccgattgtgggacccaaacaatcctgatcagaaacctgctctaaagactcagacgccccagctacatttcttggacactgatgatgaagtcagccctacatcttggggtgactcacgccaggctcaggcatcttactataagtttcaaaactctgacaacccctattattacccccggacaccaggccctgcctcccagtatccctatacgggctataaccctctacagtacccagtgggccctacgaatggtgtgtacccagggccttactacccaggctacccgactccgtcaggacagtatgtgtgtagccctctgcctaccagcaccatgagtcccgaggaggtagagcagcacatgaggaacctgcagcaacaggagctgcacaggcttctccgggtggctgacaaccaggaactgcagctcagcaacctgctctccagggaccgcatcagtccggagggcctggagaagatggcgcaactcagagctgaactgctgcagctatatgagcgctgtattctattagatattgagttctctgataatcagaatgtggatcagatcctgtggaagaatgctttctatcaggtgattgagaagttcaggcaacttgtcaaggatccgaatgttgagaacccagaacagattcggaacagacttttggagctcttggatgagggtagtgacttctttgatagtttgcttcagaagctgcaggttacttacaagttcaaactggaagactacatggatggtcttgccattcgcagcaagccattacgcaagacagtaaaatatgccttgatcagtgcccagcgatgcatgatatgccaaggagatattgctaggtaccgggagcaagccagtgatacagcgaattatgggaaagcacgcagttggtacctgaaggcccagcacattgctcccaagaatgggcgcccctataaccagttggctttgctggcagtgtatacgaggaggaagcttgacgctgtctattactatatgcgcagtttagctgccagcaaccctatcctgactgccaaggagagtctcatgagcttgtttgaagagaccaagcggaaggcagaacagatggaaaagaagcaacatgaggaatttgacctgagccctgaccagtggcggaaaggaaagaagtctactttccggcatgttggagatgacaccactcgcctggagatctggattcatccatcccatccacggtcttcccagggcactgagtctgggaaggattctgagcaagagaatgggctgggcagcctgagtcccagtgatctgaacaaaaggttcatcctcagttttctccatgcccatgggaagctgtttacccggattgggatggagacattccctgcagtggctgagaaggtcctcaaggagttccaggtgttactgcagcacagcccctctcccattggaagtacccgcatgctgcagcttatgaccatcaatatgtttgcagtacacaactcccagctgaaagactgcttctcggaggagtgccgctctgtgatccaggaacaagccgcagctctgggcttggccatgttttctctactggtccgccgctgcacctgcttacttaaggagtccgccaaagctcagctgtcctctcctgaggaccaggatgaccaagacgacatcaaggtgtcttcctttgtcccggacctgaaggagctgctccccagtgtcaaagtctggtcagattggatgctcggctacccggacacctggaatcctcctcccacatccctggatctgccctcgcatgttgctgtggatgtatggtcgacgctggctgatttctgtaacatactgactgcagtgaatcagtctgaggtgccactgtacaaggacccggatgatgacctcacccttcttatcctggaagaggatcggcttctctcgggctttgtccccttgctggctgcccctcaggacccctgctacgtggagaaaacctcggataaggttattgcagctgactgcaaaagggtcacagtgctgaagtattttctggaagccctttgtggacaagaagagcctctgctggcattcaagggtggaaagtatgtgtcagtggcacccgtcccagacaccatgggaaaggaaatgggaagccaagagggaacacgactggaagatgaggaggaggatgtggtgattgaagactttgaggaagattcagaggctgaaggcagcggaggcgaggatgacatcagggagcttcgggccaagaagctggctctggccaggaagatagctgagcagcagcgtcgccaggaaaagatccaggctgtcctggaggaccacagtcagatgaggcagatggagctcgaaatcagacctttgttcctcgtaccagacaccaacggcttcattgaccacctggccagtctggcgcggctgctggagagcaggaagtacatcctggtggtgcccctcatcgtgatcaatgagctggacggcctggccaaggggcaggagacagaccaccgggctgggggctacgcccgtgtggtacaagagaaggcccgcaagtccatcgagttcctcgagcagcgattcgagagtcgggactcttgcctgcgagccctgaccagccgtggcaatgaactcgaatccatcgccttccgcagtgaggacatcactggccagctgggtaacaacgatgatctcatcctgtcctgctgcctccactactgcaaagacaaggctaaggacttcatgcccgccagcaaagaggagccaatccggctactgcgggaggtggtgctgttgacggatgaccggaacctgcgtgtgaaggcgctcacaaggaatgttcctgtacgggacatcccagccttcctcacgtgggcccaggtgggctgagggagccacactggggccccccccccccgtggaaccgttcctgaaaggccaccaggcgcccagtgtagcacggaagatgcccacgtgcctgagccaccaatccacccagacaataaaccatcctcttccaacccacgccacggccatgctgtgggggacctgctcctcacagagcccctcccaaggatcgggcggaagctgctgggaccctcctgggctgccaggatttagcagggaggtggctggctacagcaacagcagctgggcaagccagataggccgcccatgctctcagcctttctccctcccccgtctcattccaaggctgagggagggccttctcgcctggggacgcagccactttctccagtggagacagggcaggggttcagagtttccgtcagatgcagtgaaatcacagttccctttcatcttcagaacctctgtcgtgaatgtgttcaagaggctttggttaagtcaggaagaagtgcccagggtgtgtgtccccagtctccctgaggcctggactcgcccatgaacccaagtcggcttctagacagcatgtccctaacagcagccctgggcccccacctcttctaccatccaccccagacttaccacacacccttcctgctgctcctcttcctgcccttatcaacctgggtccctcacacttcgccagttgcgtccccgtggacagtcatgagtctagaggaaaggggcatctggtctcaggcccgtgctctcgggtggcctccacctgctccctttctcctcactggcctttctttccgtctagcctcctcttcaggaaatgtcctgactctcctcagctcccccttcacccctccttgcccgcctaccctccctccagaatagcccctcacccttcttccccttctagttgatccttttcacctccctgatccccttcatttcttcaccgcggttcctcgtcataggggttctcactctgaactttccctctctactacccatggcaggaacctagtacaggtctcccacccagggccttccaccctcggctcctgtgctgggagaaacttccaggcgtggacagcccagcctgaggcattccagtgctggggcaccgtcgcctaacctggtttctagctttgccctcactccccggaaaaactgacactgacacaggggccctttccttgcccctttagctggtacctcagtggggaggcttccttaccaagaatgagttcctgaaacccagggccagagacaaggacaacttaggggaagacggggttttcggtggagccaggggcaaatcttaatgggaccagtgggggataccccagagcccatggcctgactgcacagcctgcctggaggatgggtgcgcagctctgccctccctgaggcccaggactatgccagaagcgatggggtaccgtgtaggggagccaaggccagtagtttgggggtaggagtcccctagagtctcagaagactgggctctttggagtacagggtccccggcctctcctttaagattctctccccagctggaaggccgatgactgggtggtcgggagggagacccagctctcctttctgtcccgtttgcagcactggttttgtttccttaataaatttttagttatgaaacat

SEQ ID NO: 24882 - DNA, 2089 bp, Homo Sapiens
tgcgaggcagctcgctcgttctgcgatctattgagagtggcttccaagagccccgtgcctatgtctgggagggagggaagatggcagccgtggcggcaggcggcctggtgggaaaggggcgcgacatcagcctagcggccctgcagcgccacgacccctatatcaaccgcatcgtggacgtggccagccaggtggctctgtacaccttcggccatcgggccaacgagtgggagaaaactgatgtggaaggaaccttatttgtttatacaaggtctgcttctccaaagcatggattcaccattatgaataggctgagcatggaaaataggacagaacctattactaaagacttggatttccaactccaggaccctttccttctctacagaaatgccagattgtccatctatggaatttggttttatgataaggaagaatgccaaagaattgcagagcttatgaaaaacctaactcagtatgaacagttgaaagcccatcagggaactggagcaggaatttccccagtgatcctcaattcaggagagggcaaagaagtagacattttacgaatgctcatcaaggccaaagacgaatacacaaagtgtaaaacctgttctgagccaaaaaagataaccagttcctctgccatctatgacaatccaaatctcatcaaaccaattccagtgaaacccagtgaaaaccagcaacagcgtatacctcagcccaaccagaccttagaccctgaaccccaacacttatccttgacagctctgtttgggaagcaggacaaagctacatgtcaggaaactgtggagcctccgcagactctccaccagcagcagcagcagcagcagcagcagcagcaagagaagcttccaattaggcagggggttgtacgctccctgtcctatgaggaacccagaagacactcaccccccattgagaagcagctctgtccagccattcagaaactcatggtcaggagcgcagacctccacccattgtcagagctgcctgaaaaccggccttgtgaaaatggcagtacccattctgcgggagaattttttacaggacctgtccagccagggtctcctcacaacattggaacttctcgtggtgtacaaaatgcttccagaactcagaacctgttcgagaaacttcagagtaccccaggggcagcaaacaagtgtgaccctagtacaccagcacctgccagctcagctgccctgaaccgcagcagagctcccacttctgtcacccctgtggctccaggaaagggtctggctcagccaccacaggcctatttcaatggctcccttccacctcagacagtaggacatcaggctcatggaagagaacagtccacactcccaagacaaacactccccatctctggtagtcagactggcagctctggagtgatctcccctcaagagttactgaagaagcttcagattgtacagcaggagcagcagctgcatgcctctaaccggccagccttggccgctaagtttcctgtgctcgctcagagctctggaacagggaaacccttggaatcctggatcaacaagacacccaacacagaacagcagactcctcttttccaggtcatctcacctcagcgcatccctgctacagcagctccgtctctgcttatgtcccccatggtgttcgcacaacccacctccgtcccgccaaaggaaagggagagcggcctcttgcctgtgggaggccaggagccacctgctgctgccaccagcctcctcctgcccatacagagcccggagccctccgtgatcaccagcagcccactcaccaagctccagctccaggaggcactgctgtacctcattcagaatgatgacaacttcttaaatataatctatgaagcctatctcttcagcatgactcaagcagccatgaaaaagactatgtgacagcaaggccttttaaaactgattttcaaggtccttctagaactccggcacaaggttctttcatgttgagtgttgtttccttcaatgtttctgccttttttaaaagaaaagtatgtgtaatatgaagtaaaatgtttcagacttttttttat

SEQ ID NO: 24883 - DNA, 7458 bp, Homo Sapiens
cctagtgccggtttttccaccgccgccttccgaacaagccccgggccgccttccaatcccgaccggggggcacgtcggcgacaattggccaccggctttgggcttccgcggggaccgcgcccccgcccccgtgagttattctcacgtcccccggggctcgctgccgcccccgccgacgcttagagtccggcccgggcccaactccctcacgggccccccggcggcagcggcggcggcggcggcggcagcggcggagcccaccgcccgggccccgatgagtactcccggaataaccgggtgatggtggaaggggttggcgctcgggtagtgcgcggcccggactggaagtgggggaagcaggacggcggcgagggccatgtgggcaccgtccggagcttcgagagccccgaggaggtggtggtagtgtgggacaacggcacagctgccaactaccgctgctccggggcttacgacctccgcatcctggacagcgcgcccaccggcatcaagcatgatggaaccatgtgtgatacctgccgccagcaaccaatcattggcattcgatggaagtgtgcagagtgtacaaattatgatttgtgcacagtgtgttatcatggagataaacatcatttaagacatcgcttttaccgaattactacaccgggaagtgagagggttctgttagagtctcgtaggaaatctaagaagattacagccagaggaatctttgcaggtgccagagtggtgcgaggagtggactggcagtgggaagatcaagatggaggaaatggacgtaggggaaaggtaacagaaatccaggactggagtgcatcaagcccacatagcgcagcatatgtcctctgggataatggtgctaaaaacctttacagagttggctttgagggcatgtctgatctgaaatgtgtccaggatgccaagggaggttctttctacagagatcactgccctgtgctaggtgagcagaatggcaacaggaatcctggtggattgcagattggtgacctggtaaatatagatctcgacctcgaaattgtacagtctttgcagcatggtcatggaggatggactgatggaatgtttgagactttaactacaactggaactgtttgtggcattgatgaagatcatgacattgtagtacagtatccaagtggcaataggtggaccttcaatcctgctgttctcactaaagcgaacattgtccgaagtggagatgctgctcagggtgcaaaaggaggcacctcgcagtttcaagtgggtgatcttgtacaagtttgttatgacctggaacgaattaaacttctacaaagaggacatggagaatgggctgaagcgatgcttccaactttaggtaaagttggccgagtacaacagatttattcagacagtgatttaaaggtggaagtttgtggaacatcttggacatacaatccagcagcagtttttaaggtggcatctgcaggatcagccattagcaatgcatctggtgaaagactctcacaactcctgaagaaattatttgaaacccaagaatctggtgacctcaatgaagaattagttaaggctgctgccaatggagatgttgctaaagtggaagatttgcttaaaagaccagatgtggatgtaaatgggcaatgtgctggccacacagctatgcaagctgctagtcagaatggacatgttgacattttgaagttacttttgaagcaaaacgtggatgtcgaagcagaggataaagatggtgatagagcagttcaccatgcagcttttggagatgaaggcgctgttatagaagtactacatcgaggtagtgctgatttgaatgctcgaaacaagcgccgacagacaccacttcatattgctgtcaataaaggtcatcttcaagttgtgaagactttattggactttggctgtcatcccagtctccaggattctgaaggtgatacccctcttcatgatgcaataagtaagaaacgtgatgatatcctagcagttcttttggaagctggagcagatgttaccatcacaaacaataatggatttaatgctctgcatcatgctgcactaaggggaaatcccagtgcaatgcgtgttttactatctaaattaccaagaccatggattgtggatgagaagaaagatgatggttatactgccttacatctggctgcccttaataatcacgtagaagtggctgaactgttggtacatcagggtaatgcaaacctggatatccagaatgtgaaccaacaaactgccctacaccttgctgttgaacgacagcatacccagattgttaggcttttggtccgtgcaggtgccaagcttgatattcaggataaggatggggatactcctttgcatgaagctctaaggcatcacactttgtctcagctacgtcagctccaagatatgcaagatgtggggaaggtggatgctgcctgggagccatccaaaaacacgttaataatgggacttggtacccagggggcagagaagaagagtgcagcatctattgcctgtttcttggcagccaatggtgctgacctgagcattcgaaataagaagggtcaatcgccacttgatctctgtcctgatccgaatctctgcaaagcactggcaaagtgtcataaggaaaaagtcagtggtcaagtgggttctcggagtccttctatgattagtaatgattctgaaaccttagaagagtgtatggtgtgctcagatatgaagagagatactctttttggtccatgtggacatattgctacctgttctttatgttctccacgtgtcaagaaatgcctcatctgtaaagaacaggttcaatccaggacaaagattgaagaatgtgtggtatgctctgacaagaaagcagctgttctttttcaaccctgtggccacatgtgtgcttgtgagaactgtgctaacctgatgaaaaagtgtgtgcagtgtcgagcagtagttgaacgaagagtgcctttcattatgtgctgtggagggaaaagttcagaagatgccactgatgatatctcaagtgggaatattccagtattacaaaaggacaaggataataccaatgtcaatgcagatgtgcaaaagttgcagcaacagttacaagacattaaagagcagacaatgtgccctgtgtgtctagatcgtctgaagaatatgattttcctttgtggtcacggaacctgtcaactctgtggagaccgcatgagtgaatgtcctatctgtcgcaaggctattgaacgaaggattcttttgtattaactaagacacatggtgtattttgttagctaatgtatctagtcatgagatcttaataggcttttgatctagttggaagttctgatgagttaatttctaatatcatagtttctttactagagtataattgggctgtaaatgtaccagaacaaaaaaccctacaaaatggtgttggaaattgtgttttttgtttttgttttaaatttgaaacatcaaattcatgtaactcataggataatttacctttggcttctaagaggaaagtcctttaaggatatccttttttaaaaaattgcatttttctcttataatttgtaaatttgttggatctcaaaagacataattctttgtgatcagttatccttcatttcatcgtggttttacacagtgagttgataacaggttctctgagaagtcatgcatcaaataaaagaggcaggtcaaacaattatgtcacatggtaaattataaaatgacagtacaagttccagatagttaagggaataccgaagggatgattctttttttaagataacaggaagttacccacatgtttgtttctgaattcttagagtaaatggaagcatagaatgagggaataatgactttgcatttctcttgttttctagattcaaaaggaacattgtttaacttgaatcagattaccagtttcaaggtgactgatagacaagaaaaggaaaaataagcaataatagtgggcaactgaagagaaaaaaaaaacgagtatctattaactggccactaacagttgcctttcttacattaatttatacactattttgttcagccagtgtttttaaaaaaaatctatgaaaagtgtacttccggttttctgtgattacttatctgggcttgatctgaccagtgaaatgacattgccctatttggacctctgaggttctatttagctttgcagatgtacatagtatcccagtgatctgcaaaattaatgccttttccaagaaaaaatcttttcttctctgtatcagttaattctgacagtgttagtgattctgtcttcattataggccttatttccattatctctttctttatagtattttttgttataaagaaaacagtctttctgtgtatacctacggatgagggtattatttaaactgccaacaatatccaagacatggtcaataacctaattataaatactttagaaagagtgaccaggacatgtatagaaatgtctgcttacctgtagactttaaaaacaaacaaaaaaaacaaacaaaatttttggagcatttaatcattttttttctccttttatctcctttgtaatcttattgtctcctgagtaaatatacacataaatgtttggggattcattgctgctagattatatcaggtgtttacatagtgtctactatatgctgttgataagctttttcctaaaaatagttatcctcttttgtagtttttttccctcctttaaatctggctagcttttcttacttcagtttttatagaacaccaactaaatttgaaagtatgaagtctctagccctcttacactgtttctggctgtttaatccttgctgcctttgcaagtcctggtgaaagcaatggggagctttgctggctggttttgtagtctcaacaattccatgtctgtgtttagctgagtaactgctatcatttagaacagtaaaatttttatagatttcaaatttgaaaattcatgtacactcagttatctaataaggggccaccgacgctgtttttaaaactattttgaagttataaaaaggtagaacatctgactgatgatgttcacataaagagacagacagactatcatgttgcagacatgaaaacagcatgtcaggtttttcctttccttccatgccatgggctacccatctcttcccactagatcacctggtgaggagggagcacctggctgactcatgcagagtttggccaatcagagaattgtgtggtctccagctctactttccttaaacaaatcctttctgttttctgagctgcagtgctaaaacagatccctaaaaggtaatagcatcttccagactagtttaattatttcctttataagaatatgacataaatttttattatagaaataatgtcattataattttagtgctagtacttgtgggttttctgtatttgtatcaccttgaaatttgttccatgaatagaaaatacttctttattcatgttttcaatcacttagaattattttaaatttattttgggtttgtgagagataataagattaagaacttcatcatttcagtgactttcctccaactctctgaatctgctacctcttattatatgtcccttagcagtacttttccagttaggttcgttaccctcctcattagctaaacctctttatcttgtgcctcaaaagagcttttacttttcttagaaacatttataaaaaagaaaaaaactgacacgcattcattcaaaaaagtatttattgggctttagggattagatacacaacagtggaaaaatggcatcttagcacactcagaatttattgtgcagcagttgtgtattttaaggaatctgtagttaaaaggaagagatccaaaggtcctgataacatttcctaacgtttcagaagagttgtcattgagtagtgtttggatttcctctctgtatccctcaccctaccattttctcctttattcttctaagattgttagcgttgttactcaaaacatacacatacaacataccagatggtgctgttctaatggtatttgttcacgtaatttaacgttcttactgcttatactatatacatatttaattttgttgggagcaagaaggttttcaagaaaagataattttgtattagtgtaggaatatattagacaaatgtttagttggtcaaattatgcataagatatttgtaactttaaacattgcaaattgaccagctagctatggaagcataaaattaattgataattaatgttggaaatacatttctaaaatttatatttttatggtgttagcctgtaagagcattttagcatattgaaatgcatgctgcttaagatgtgtctggttcaaatatcaaaacttgctgggtcatttttacatagtagaaacatactgtctatgtgttgcccaattgctgtttgtccactctgaattctggaccctttttggactaagaattagttaaattcatgaactaagagaattagagatggggtagagtaggatcaggacagtggggttacaacagataggaaaggaaagtcagcatttgagtgtagagaaaaaaagaggatcatacagatgtcatcaaattataggctttaatacaggttgctttttttaatccaaaaggaaaagcacttatcctatcagaatgtctaccatgttttatagtaataatttgtgtaaaaaattgaatttttgaatagttttttgtattttttgtgatgaaaaactcataacataaaatttaccatattaactgtttctaaagaatacagttcagccatgtgaagtacatttacactgttgtgaaacagatctccagaactttttcatcttgcaaaactgaaactccatacccattaaacaactcccctttttgttttctcctcagtggaatagaattttgactccatataaatcaagaaacacctaaattctttagttgtttgtgtttgcaagatctaaggtcatggtaaacattaagttcttaaaatttttgggagggacagtgcacctctcctctgaattgttagcaattaaattgagtaggttttaaatgtctattcattggaagggtttgttatttcattttgagccagaggggagaggcacattttaaatatcagaattagattagctttgagtttgtacaattgggaacataatagattttcataaattatgtgtgccttgttggaagtgtcaactgtctttatgtctgcttgtaaaagtttcaaaatatgttttccctcaaaaaggcaacgttacttcatttgcttgaatattatgataggaatgcttactgatattacttgatagtcatatatagcctaggaaatttaacatatatataactatagcagtattaataatgatagttgtacttctttaaaacattaaatttgaggaaacttt

SEQ ID NO: 24884 - DNA, 18843 bp, Homo Sapiens
agcaaagaacacagagtagctggagcaaggcagcaagggggagaataacaggagagggatccaggaggtaacagggataccaggttttgtagggccttgtagaccatccaaagggctttgactttgactctgaatgagacaggagccattggaaaggttgggacgaggatgggctgatcagacttctgtttgattgatatcgcactggctgctgaaggaattacagacaggtgcgggaacaaggatgaaatagaagcaggagagcaggcagggggctattgcgattatctaggcaatagatgagggtagcttggagctggctagtattggtttcagttatatttatattttccaaatattatcataaaaatattcaaacgtagagccaagttgaactttacagtgaatacccaggattctggttatatttggaaagaagagagtccatgggactcactgagcgagcagagcctgtgggatatcttgggagggttgcagcaggcagtcaggtcatttgacttggaactagaactacagccctggtctgcagcatcacaccagacccagatgcctcaaaaggattatatgttaaggacagtctgctggtctgttggcacctaaccttttttgggttatgaatccaataaactatgagcagtttgaacctttctcagaaaatgcaaagaaaattatttgtagttttagaagaatcatgaatacagacaataaaagacataaaatgtagtctatttcactcaattacaaaatattcagtgttgcagaaccattgtgggtaaacattcctaatttttagtgaacatataaagaccccgtgcctcaccaagacgtcctcctgtcttgcccccagaattcctgtttctccatctgcctggtctatgggcaatgcacagaatacgtaatgaagaggggagcagtgagtattgggttacacaattccctggaacctggaacacacccttctgagtactgtgaagatgtggtccccaaggctagagctgaaaagaggcttagggccgggtgagccttccagccagggcctgcctccaagtgatgctcccccagggcagggggcataaggatggcacccagccaggtgggagcctgggccctgcccagcctcaaagctttgagctcaggaaatccggaggcaggggagggggacatcgttgccacattccccagccctttaagacccccaaggcaggaaggctgcccgggcctcaccagcttccctcacaggctccttcctgggaggaaggggctgcctgtgccctcgaaggcgcaagggagggcaggagggaggctcggaaggtgttgcaatccccagcccccgggcctgtcagaggctgagccattaacgacagagctcggggagagaagctggactgcagctggtttcaggaacttctcttgacgagaagagagaccaaggaggccaagcaggggctgggccagaggtgccaacgtgagtaggggatccctagagaggggctgagccttgggcttgatggagagagctggaatcctggggccactccccacagctctgccaagtgttcatgtccggggtcctaggcctggggcccgggattcgtcctttggaaccccagccctggacactgagtctcttttcacaggatgcccctacttttgggggtattgcaccagggaagtcactcacagccaagtatctccttggggacactgagctgggctggggacaggcataatcattctcccctccccatgcctctgtctctcaggacgtgtgtgtctgtgagttccagccgcgcaacccctccccgtctgggtctctatttcactctctgtttccatctttcctcctcagcttctctctggcttgctatctctctgagtttctctgtctcgcatatttcctgctatctcttgaatcttaaactctcggtaacagacgcttcccgggctccaggcctccgagtgcccccccccccgcccactctctgggtcggcgtacattgggccctttttctctgtctctcgatatctctctggcctcaatcgtcctcttggcgagtctctctgtcgtttcagtctgtgtggatttcagtcaccgcctcactctgtcactcttcctgttgctctctctttttctttatctgcagcatatctggaaatgcctctcccctctgtttattcccagccccctcctccctccccacccttcccacagaaagaatctcgaggtgagagtagaaacagcaagggagcgaggggtgtgaagtggggaagagagtgtgaggggagagggctgagcgtgatgagggagaaacagaaagagggaatgtgaaggcagccagcccaggagacatcgagctgtgctgggccacaggagtgagcacctgcagagcccagcagagatggccgcagtgacaggagggccagggggcccaggagttaggaggagaggatccagaaagggggctttggaactgcgcagtgtggcacagacaaaagcaaggtggcagtcctgggaggtgtgaccacacaggctgtgagggaggcaggggtgaggggaaaactgaactgtgctggattctgtgagctgctgacctgctatttatggctcgtgaaaataacctatggttgctgagtgccaactccatgcaaggcacagggctaaatgcctttaccaaaataatctcatttcatcctcacaacaacgctgaggagtgagtgctaatgttatttctttcccacagatggggaaactgaggctcggctcggaaaggtgaagtaacttgtccaagatcacaaagctggtaagtggcggagctggagatcaagtcaggtgacctgaatctgagctgggctccaaacctctctgcatatcggccccccagagagtgagaccatgctccaacaggtcctaggcccacttaaccaggctgggggacgtccagggctgcagtggaggaccagagactgaggccaagcaggccaacacccagcacccaggggaaggatgccggggcctcttggggttaggttgtctactctggacaggagccagtggaggcggatagggtggtactgcacggggcataggctgggcctgaagctgaccctggctagggcaacagggctgggataggatcaaaagcacatggagatgaaaaccagtgtcccaaaatctgggccttggaggctaaatcttccccaaccagtgttgcggggggataatcaaactggtatgctatagtaagaaggttaccaaccaccgatgggtagacagatgctcgggatacttgtacaggtttctcactgcacaaaactgaggagtaactggagccgaaatccaggctgttccctagttgccaggtcctagtgtggtgctgcatccatccagaggaaggggtgctttctttctgatttgcacaaaggagacttacgggctagcagtcactgggtattccgatactgcaatatatacatggatagactgggggtttgggtaagacccctgtgagcagtaacaaccttgggtatctgggcagttcttatccacacctctgtctgggaggaagagaaaaggattctcctacctttctccctgctgagcacgagggatctgctgggacaccacctgcgtgtatgtgtccagatatgtacgtgcaagctgaccagcgattcccactgatctgccaccaagagcaccaactcgtgctggaggatcaggtgttggctccaagaccccaatgggagcagggtgaagatgaggctggacacccacccaagtggtagaaacctctgcatacttcctaagactggagccaaggcaccctccatccaggtgctatggccgtgacctcatgatgcctgaccccagaaggccaccagaggtctgtgcccaaaattgggggcacactggacccttcgggtgccccacttgatattctctcagcccacatggctgaggcagccagcttcctgcaggcataacctgacagccccttgcctcagctgctccatagagttctccctttcttccagggagtgtccctgacaacactggcatggcttccccaggagaacctgcctagtactcatgcatgcccaacctggatgtgccagggaatgaacaccccaagaggcatcccttgaccaatggggggcaggagtcagtgggtaaatctttccatcttccctcccatccaagggataaattgaccctccagtggacagctctgagaagtgttctacatggctctttggaaggttccagcaggatagagccccagttgtccatagaggtgaccaacatgatgatgtaactttgtgctggctttctctccttccctgtttcattctccccagtcccttatctgctgctaggatcttctcaaaataaactaccagcatgcaattcctcatctcaggttctgctctctaggggtagcctagcttagatagctgggaaggcggaagaatgctcttcctcactgctcctttccctgctctttcctggaaggcaagtataataactgtggctgtcactgtcatttcctatgttccaggcactgtgaaaagcccttgacttgcatcattttgtgtcttcctctcaaagtcccatgcagtataggctgctgttacttccattttgcaaagaaacgaaggctcagagaagtcaagcaacctagtcaaagctgcacagtgacagacaaggattaagatcagctctgactccaaagcccatggtcttaaacaacccttctgcctacaggtgaacatcaagttggtgctatggcaaggctgggaaactgcagcctgacttgggctgccctgatcatcctgctgctccccggaagtgagtatggccaaggatgagggtgcagtggggaggggaagctacaaggagagatattgggaatttccttgcactgccacatggctcctgggattcccagagaatcccacaagattcaagtctgagccacagatgtggggtagctggtctcccacccacagacttccacaggcaaaccaccacccaagaggaatggtgagacgacccgggctggtcatcctggaaaaggccagtgaggcgcagatcttgtccgcaaatctctaccaagctgtcagaagcaacccatgggtcctatgcagccttggtgggcagcaaagggatcaggatggaagctacaaggggacaggtttcatcctgaaataaagaagcccaggcagagcttggtttccaaccatggaaactctgtcttgagaggtagagaacttcccatccccaggggtatgcaagctaaagccaggattgataaagatgctgtgcagcaggggttggcaaactttttctgacagtaatgtttaggctttgcaggccacatactgtctctgttccttgtttgtttgtttgtttgtttgtttgttcgtttgtgagacagggtctccctctgttgcccaggctggagtgcagtggcacaatcgcagctcactgcagcctcaacctcctgggctcaagtgatcctcccgcctcagcctccaaggtagtgcagggcatgccaccacacccagctaatttttttttttttttgtatttttttgtagagatgtagttttgccatgttgcccaggctggtctcaaactcctgggttccagcaatccacctgccctgacctcccaaagtatggggattacaagcatgacccgccacgccctgcctattgcatgttttttggtttttgtttttttgttttttgagatggagtctcactctcttgcccaggctgaagtacagtagcgggatctcagctcactgcaacctccgcctgccgggttcaagcgattctcctgcctcagcctcccgaatagctgggattacaggcacctgccaccaggccctgcaaatttttgtatttttactagagatggggtttcaccatgttggccaggctggtctcaaactcctgacctcaggtgatccactcacctcggcctcccaaagtgctgggattacaggcatgaaccaccgcgcccagccctgtggcatgtttttatttggtttttgctttgcttgtttttaactcttttaaaatgtaagaaacatctttagttgttaggctatacaaaaataggccactcaagccctgctgtagagggcagagcatcaggtagagttttgaagcaaacaaccttgtaaagtttcttccagcctgaaatcctgagtctgggccgggcgcggtggctcacgcctgtaatcccagcactttgggaggcctaggcgggtggatcacaaggtcaggagatcgagaccatcctggtgaacacagtgaaaccctgtatctactaaaaatacaaaaaattagccgggcatggtgccgggtgcctgtagtcctagctactcgggaggctgaggcaggacaatggcgtgagcccagcaggcggcgcttgcagtaagccgagatcacgccactgcactccagcctgggcagcagagtgactccgtctcaaaaaaaaaaaagaaatcctgagcctgtgaagcagtagaagccctttgttgagaatcatgaacttgctctgtgaccctgggcaaactgcttctcctcttagggccttcgcatccccatcagtaaaacgggcctaagaacacctgagagaggacagaaagcattgcgggcaaagtgtatgttgatttgtttgtttatttatttatcaaaaaaaattcatcggccgggcgcagtggctcacgcctgtcatcctagcactttgggaggctgaggcgggtggatcacgaggtcaggagatcgagaccagcctgccagcatggtgaaaacccatctctactaaaaatacaaaaaaaaattagccgggcatggtggtgcgtgcctgtagccccagcttttcgggaggctgaggcaggagaatcgcttgaacctgggaggcggaggttgcagtgagccgagattgtgccacagcactccagcctgggtgacagagcgaaactccttctcaaaataataataataataaatattcaccaaggtcctactctgtactaggcactgggaatacagtaataagcaaacagccaaggtctgctggcctcacagaatttatagtctagctggagtgatagataagtaaataatcataagactctataattatgaaggataataagagctttgaggaagtacagggaccttggcctcctccagttcgttagtgcctggtctggtttcttcaagatgcctaagcgttaaccaggtgaaacaggggtgggagagagaaagaagagtccctccaaaaagaacagcatgccgggcacagtggttcacatctgtagtcccagcactttgggaggctgaagcaggaggattgcttgagcccaggagctcaagattagcctaggcaacatagtgaaaccccatctctaccaaaaaaaaaaaaaatcaaaaaattagcaaggtgtgctggcatgaacctgtagtcccagctactcaggaggctgaggtgggaagatcacttgagcctaggaggtcaagggtgcactgagccgtgatcgtgccactgcactccagcctgagtgacagagcaagaacttgaagaaaaaaaagaaaagaaaaagaaaaccaaaacaaaacaacaacaacaacaaaaaaaaaacagcagggacaaagatccagagattagaaagattttggagttttcaaagaatagcaagaatgagccagaatagctggagctgagagaccggtataagctggaactgagagggtcaggcaggggccaggccacaggagctattgaaggatttgagtgtttatcctaatgatggcagcaaatactcacatgccagacactgctctaaatgccttccatatgttatcgcatgtaatccttccagcaacactaaggtagggacgatttttatccccattttacagatgagaaaactgaggcacaggaagtcttagaaatataccaggatcatgtaattaataagcaatagaaccagaatttaaacctaggcagtctagttccaacatccacactcatccatcacaccacactgcctttcagagcaataatgtgccattgaagtgctgcgatggagatggggtagcagaatcagatttgaattgtgaaaagattgctgtggctatgggttcttatcactctaatcactgcttgcaccatccttggggagggcactggggagttaacagtctccatctggtggtgtgctggtgctggcttgcaaaaactaattgtgcacatctcttcccaactccccgatcaatgatgtcacatcaataggctgaaatcagctacagtgagagcacttaacaccgcggaaaggcacacactacaaaccagggtctgcttttctctgccaagctggctgataaacggttaccagcacatcactatctctgtgtcacccccgtagcctctcgaagtctccgtccccatccttccatttccagcccccatatcttgaagggtgagacaggaaggtgaggcctctgagtctaggagtacaaaggcctagattatagcccagctctgctaggcagaggcgtcgttcctggcccattctcttccaccccaggtctggaggagtgcgggcacatcagtgtctcagcccccatcgtccacctgggggatcccatcacagcctcctgcatcatcaagcagaactgcagccatctggacccggagccacagattctgtggagactgggagcagagcttcagcccgggggcaggcagcagcgtctgtctgatgggacccaggaatctatcatcaccctgccccacctcaaccacactcaggcctttctctcctgctgcctgaactggggcaacagcctgcagatcctggaccaggttgagctgcgcgcaggctgtaagtccttccagccatccaactactctgcctccaacaccctcctgccaatactaataagaatattaccagccgggcacgttggctcacgcctgtattcccagcactttgggaggccgaggcaggcggatcacctgaggtcaggagttcatgatcagcctggccagcaaggcgaaaccccgcctctactaaaaatacaaaaaaattagccaggcatagtggcgggtgcctgtaatcccagctactcggggggctgaggcaggagaactgctcgaacccaggaagcggaggttgcaatgagctgagatcacaccactgcactccagcctgggcaacaaaagcgaaacttggtctcaaaaaaaagaagaaaaaaaaaaaagagtactacctattgagctcttatctaataagcactttatgggcatgatatcaggtaacagtagtaccagttggtactactatgtagcctcactttgcagatgatgaaactgaggttcagggagggtaagtgacttgcccttatcacacattaataaggatggaggcagtgtggctctaaagccagtgttgtgaccactactctacatagcccaagtcctcagccatctgagggtgtctccagggagaacatcctctaccagctgggcttgtcccccaccccagtttcaaacttcctttcaaactgagcaggatggagtttgtgccaagctgaggcataaggaaaaaacaaagaccgaggttcttgtttaagaatcagtaatgggccaggtgcagtggctcacacctgtaatcccagcactttgggagcctgaggtaggtggatcatttgaggtcaggagtttgagaacagcctggccaacatggggaaaccccgtctctactaaaaatacaaaaattagccgagtgagccgagatcacgccactgcactccagcctgggccacagagtgagactctgtctcaaaaaaaaaaaaaaaaaaaaaaaaagcaccagtaatggccactgctaacacttacatagcatttcctgtaagttaggcactgttctgagcacttcatgtagagtgagtcatttagcccttgtgataacgctagggggtgggattttaccattatccccattttacagatgaggatgctgaggcatggagcagttaaataacttcaagatcacagggctaatgaatggcaggaccaggatgaaaactcaaacactacactgtcactgacaaagggtctagagttgggggccttggaagtgggccaccactgggctgctgggagtctgtgatgcttgccccggtgcatgcctgcaacttagcttcccccagggctgcccttccagagccactctgcctggagacagggggacagacaaggtgacaacagaggaaccaagccagggcaaggcaacagggccagctggtcccagaggaagctttctgagtggtcccacccaaagccctcacactcttcccacccacatgcagaccctccagccataccccacaacctctcctgcctcatgaacctcacaaccagcagcctcatctgccagtgggagccaggacctgagacccacctacccaccagcttcactctgaagagtttcaagtgaggaggggcccccaccttggtcccctccctttggattctggggtagggcatgggtaggatgctgggcatgcctctgggagggagaagggagcctcgctttcttcctctgcttggcacccaagcctggactattggcaggagccggggcaactgtcagacccaaggggactccatcctggactgcgtgcccaaggacgggcagagccactgctgcatcccacgcaaacacctgctgttgtaccagaatatgggcatctgggtgcaggcagagaatgcgctggggaccagcatgtccccacaactgtgtcttgatcccatggatgttggtgggtgatgcaggggagggaggggatccccaaaatgggcagacactgagaggaatggagagggaaacacagaactagcgacagacaagaagacactggaagacctagagacagaggcacagaagagggacagagacaaagaaaggtgcagctggagacagagaaatggggacacagacccagagacaggaagagacacagaggcaaagagacacattcagtcatgctttcagcgtgtttcctaaagcacccactacatgttaggcactgctctaggtactggggatacaaagcatcaaaaatgccctcagaatgttagattcaagtgggggggaaaataagatagaatttcagatagcaataagcagaaaggagaaattaaaggaggagaagggcatagagagagaggggggaaggggagcactggctattttaatatgctggtcaagaaaggcctcactaagagggtgacaattgagcagatccttgaaggaaatgagggagcaagccgctggatatctggagggaaaacatttcaagcagaagtaacaaccagtgcaaaggccctggggcaagagcggaaacagagacctagagagaaacaaagacacatagagatcgaaccacagaaacgtgtcattggcaacgtggacagatggtgaaccacagacagggagacaagagggagctaaggcagagccctctagggtgggatagggagaccttctgacagccccactccttgcagtgaaactggagccccccatgctgcggaccatggaccccagccctgaagcggcccctccccaggcaggctgcctacagctgtgctgggagccatggcagccaggcctgcacataaatcagaagtgtgagctgcgccacaagccgcagcgtggagaagccagctgggcactggtgaggcagagggcaacctggagagcctgaggtggtgggggcagggggcagggtaagtcgggctcgagctggccctagaatggcccagcgatccaaggctcagagtcctgtccacccctcaccaggtgggccccctccccttggaggcccttcagtatgagctctgcgggctcctcccagccacggcctacaccctgcagatacgctgcatccgctggcccctgcctggccactggagcgactggagccccagcctggagctgagaactaccgaacggggtaaggaggtgatgagaggctgggagcagccaacagtatccagtccaggccccaggcccctccccaactggcaccccctcttcttgttccatccacagcccccactgtcagactggacacatggtggcggcagaggcagctggaccccaggacagtgcagctgttctggaaggtgactccctctgaaggccatccctccacctcgacacctcccgcagtccaaacagatccctacaaaccggggcttaggactccaacaggtctgggaggcgtggacgcatttatatgtgatttgcatgcactttgcatgtgcctagggagctgagttagcttttggacagactgtaacgcacgtcacagtgtggttcagtgaatagttaagagcctgctgtgtccaccaacttgtttcttcctgccctccttcctagaacctagcacaagggaacagagggaaaaggggaggggggtgagaagcctggaccccagcctggggaggctccgtttgtatgatccatccaccccacctagaggctctccttgactcaagatgagctgcacatccccttctctttttcctcctgtgccccacagccagtgcccctggaggaagacagcggacggatccaaggttatgtggtttcttggagaccctcaggccaggctggggccatcctgcccctctgcaacaccacagagctcagctgcaccttccacctgccttcagaagcccaggaggtggcccttgtggcctataactcagccgggacctctcgtcccaccccggtggtcttctcagaaagcagaggtaaagggggctggcagccagaagagcacagaggtcaagcgcatcaattcaaaggctagactgcctgggttaaatctagtcctattggccgggcgcagtggctcacgcctgtaatcccagcactttgggaggccgaggtgggcagatcatccgaggtcaggagttcaagaccagcctggcctacatggtgaaacccctgtctctactaaaaatacaaaaattagccaggcatagtggcgggcacctgtaatcccagctactccggaggctgaggcaggagaattgcttgaacctgggaggcagaggttgcagcaagctgagatcacgccattacactctagcctgggcaacagagggagactccatctcaaaaaaacaaaaaaaaacaaaaaacgagtcctatcacttgctaacagtgtgacctgagtaagttacctcccatccccggcctctgtttacacatccagcagatggggatgataacagcacctactgagcggtgccatggggtgtacatgagttaagacaagtgcctggcacaaagtaactgctctgcatgtgtctgctgttgttattatcattagccagaccaggttaagctctctctctcacacacacacacactcacagcccattctgccaagaaagccaagagagaaagccccaggcttttccacttggaacctggtctatgagttcattgctcattctcaggaaatcagctgccaccacccactgctttccctaaacattggtcctcgcaaggtgggactaataatcacaataacaataatcatagctaatattcccacttactagctgtgtgatcttagacaagtttcttaacctctctgtgtctctcagttttctcattagtaaaatggggaaaagagtagtacttcctgggtatgactattagaggactcagtgaattaaaatgtatcaaggagtccagtatggtggctcacgcctgtaatcccagcactttgggaggctgaggcgggcggatcatctgaggtcaggaggtcaagaccagcctggccaacatagtgaaaccccatctctactacaaatacaaaaattagccgggcatggtggcggttgcctgtaatcccagctagtcgggaggctgcggcaggagaatcacttgagcctgggaggtggaggttgcaatgagccgagatggcgccactgcactccagcctgggcgacagagcaagtctctgcataaaaaataaaataaagtaaggtaaagtaaagtaaaataaaataaaatatatcaaggactacgcctgacacataccaagaacaatagagtgttagctgttatcactaacaagaactactccatgccaggcgctatgccaggcttgtttcgtgcatcaagtcatttaatctgcactaagaccctatgagttaggaacttttatcatcatttctactttacagatgaggaaactgaggctaagatgttgacctaccaaaggtcacccagcctgtaaatagcaaagccaggatttgaacccaggcttctggctcaagggcctgcattcttttcaccttcattccaccatttcccaccctgtctccaggcccagctctgaccagactccatgccatggcccgagaccctcacagcctctgggtaggctgggagccccccaatccatggcctcagggctatgtgattgagtggggcctgggcccccccagcgcgagcaatagcaacaagacctggaggatggaacagaatgggagagccacggggtttctgctgaagggtgaggctggcctggaaagttgggcagggccagggacaaagggaggcagtgcttatctgacaataggcatgggacaacctgaactgcccaagagacatggattctccagcctttcttgatccttcgttgttctcatttcatatcctcataatcaggaagttcttcctacagtctaacctgatcctttttctatagccctgactctgccacccttctagctctctcttccacttttcttccctaattctcatcaaatgatctaaagaagatattgtggaggttaaccctgaatcatgaggccaggttagccctcactagaggtctgaggctagctcctgatcattagcacaggttaggccctaacagaagtgcctaccccattttctctctacagagaacatcaggccctttcagctctatgagatcatcgtgactcccttgtaccaggacaccatgggaccctcccagcatgtctatgcctactctcaagaaatgggtttgtcaactatcaggcccctttccagaatcctctcctctctctcccaaggctctgcctggtccccagcaatcagaagtatagggaacattgccttcctaccatacttccagccctggagaggatctctcccaatcccctggcttacactggatccctacagctggacagaaatcaggtgctgggatagaaattgagtagggagttggcacaattcaaggagcaaacctggcaaaaatcaaaccatttcccagacaaaaataaggtgttatatgtaacagaaattggacagaggggccgggtgcagtggctcacacctgtaatcctaacactctgggaggccagggcaggcagatcccctgagttcaagagtttgagaccagcctaggcaaccttgtctctacagaaaaataaataaataaataaataaacaaacaaacaaaccaaaaattagctgggtgcagtgacacatgcctgtaaccccagctacttgagaggctgaggtgggaggatcggagggcttgagcccaggaggtcgaggctgtagtgagccaagatggcgccactgcactccagcctgggtgacagagcgagaccctgtctcaaaaacaaaaagaaattggacagaggacctggcataaattcggagagtgagtggcagaaatcagagagtaaatcagatgaaatcaggcctggtagaaatcagaaagtgaggctttagagtcaagcagagccaggttcaaatcctggctcagacacttattagcagtagatggaatctggattaaatccctgggaaaaatgaggcttgggcatgagtccccttggactcttttctcacccaccccacagtgtctgggaagccacaagaagtccaaccgggctcttgctctgccccactcccttcagcccccgcacctctctcttcccatagctccctcccatgccccagagctgcatctaaagcacattggcaagacctgggcacagctggagtgggtgcctgagccccctgagctggggaagagcccccttacccactacaccatcttctggaccaacgctcagaaccagtccttctgtgagtctatcctcagttcccccacagccccagaaggcctggaagggggtgctcagctgccacggaggcagctttaccatccaggcctatgctgaccgtacacccctcccagccgccatcctgaatgcctcctcccgtggctttgtcctccatggcctggagcccgccagtctgtatcacatccacctcatggctgccagccaggctggggccaccaacagtacagtcctcaccctgatgaccttgaccccaggtaaggggagacgggggctgggcagagatggctgtttggagggtaccccacccaaaggatgctgattttgagagtagctggggactgactttgaatcccctggtcggagggaggagacccagccttcccaacatgcattctaacttcttccggccctgccctcactgcagaggggtcggagctacacatcatcctgggcctgttcggcctcctgctgttgctcacctgcctctgtggaactgcctggctctgttgcagccccaagtgagtccctttgagagacctgagatcctgcttcccccacccacagggaacctcaggtccagatgggcccatctaagtcccttccagccttcccaaactttggggcccatgtctgagagtcccagcccccagcttcttctctctgcactaagggcagctgcacctcttcaggtggggtgggtgggacaaaaaatggaaagatcggagggtgtgtctgactcagcctccacctgcccccttctccagcaggaagaatcccctctggccaagtgtcccagacccagctcacagcagcctgggctcctgggtgcccacaatcatggaggaggtgagaatccaggagggagagggaaatgagatggggatgtcggcccaggctcagtgaagggacaccttctgaagccaagtactcaggccttcctgtcacttccggcaacatctcgtccctttggactgaagcagacccaactttgaatcccacctctgtccatctcaaagcctcagtcacctccctgtgatatggaaaaactgaccatgctgagtctgaacggtgcatggcatgtgtcaggcatgtgtgaggaacatactagtgctttgcaagtggtaccctttgtgttccaccagtaacaacagttgaatgtccccacagctgcccggacccagacagggacagtggctggggcagacatctgaaatgagccgtgctctcaccccacatccttgtgtgcaggatgccttccagctgcccggccttggcacgccacccatcaccaagctcacagtgctggaggaggatgaaaagaagccggtgccctgggagtcccataacagctcagagacctgtggcctccccactctggtccagacctatgtgctccagggggacccaagagcagtttccacccagccccaatcccagtctggcaccagcgatcaggtcctttatgggcagctgctgggcagccccacaagcccagggccagggcactatctccgctgtgactccactcagcccctcttggcgggcctcacccccagccccaagtcctatgagaacctctggttccaggccagccccttggggaccctggtaaccccagccccaagccaggaggacgactgtgtctttgggccactgctcaacttccccctcctgcaggggatccgggtccatgggatggaggcgctggggagcttctagggcttcctggggttcccttcttgggcctgcctcttaaaggcctgagctagctggagaagaggggagggtccataagcccatgactaaaaactaccccagcccaggctctcaccatctccagtcaccagcatctccctctcctcccaatctccataggctgggcctcccaggcgatctgcatactttaaggaccagatcatgctccatccagccccacccaatggccttttgtgcttgtttcctataacttcagtattgtaaactagtttttggtttgcagtttttgttgttgtttatagacactcttgggtgtacctgagtctctgttatttatttttcagggcccagcagtcagggggaaacttctcagagttggtcctttcttcctccctcccttccttcctccctcccttccttccccccttccttcctcccttccttcctttcccttccttccttccctccttccttcccttgcttccttctgctagctctcagtatctaggccctatgcaaacgactcagctcagttcaccctcagagagctgcattctagtggtggagacttgaaaactgatccttagggcacagtggcatgggttacacggggggagtgacagtgcggtgggacacggtgaagagactttggaaaaactaacccctgttggggaaataaaattaaagacaaaatcccctgccaacgcagaaaacctcttcacaagggtagaaaagaaagaaaacagtgttattattgaataagcattaaaccggaatgtgatacactggtgatccactaaagagactgcaaagagacaaaaatcttactcttttatgtagcaaagtgaatacaacttactgtatccattttctcaagataaacaataactggtcctcaagca

SEQ ID NO: 24885 - DNA, 6090 bp, Homo Sapiens
agtcgaccgtggaccgcgctgcgagcctcggagacgccgtagaaggagacctgcttccgggactggaccaggcgcctgcgactcttctcagacgccgacgtgcacgagtgactactattaattctatttaaaatgggtgtaaagaagaagaaagaaatgcaagttgctgcgctgaccatttgccatcaggaccttgaaactttgaaatcttttgctgatgtggaagggaaaaatctagcttctttgctgttacattgtgtgcaactcacggatggagtgtcacaaatccattatattaaacagattgtgcctctgctggagaaagcagataaaaatggcatgtgtgatcccactattcaaagttgtttggatatcttagcaggcatttatctttctttgagtctaaagaatcccttgaagaaagtattggcaagctcactaaatagcctgcctgatttttttctacctgaggctatgcaccgttttacttctcgtcttcaggaagaattgaatactactgacttatactcttacaggaaagttactgacaatatttcttcctgtatggagaactttaacttgggtagagcaagtgttaataatctgcttaaaaatgtgcttcattttctgcagaagagtttaattgaaatcctggaagaaaatagaaaatgtgctggaaatcatattattcaaacacagttgatgaatgacttactggtaggcattagagtttcaatgatgttagtacagaaagtacaagatttccagggaaatctttggaagacttccgattctcccatatggcaaaatatgtgtggattgctgagtatttttaccaaggttttaagcgatgatgatctgttacagactgtacagagcacatctggattagctattattctttttattaagactatgtttcacccgtctgaaaagattcctcatttgattagcagtgtgctgcttcgttcagtggactgcaccagtgtccccgagtggtttatgagcagctgcaggagcctctgttgtggtgacatctctcagtcagctgtcttattcctctgtcaggggacacttgccatgttggactggcagaacggaagcatgggtcggagtggggaggccctgctcttggatactgcacatgttttgttcaccttgagttcacagattaaagagccaacgctggaaatgtttctgtctagaatcttagcatcctggactaattcagccatacaagtccttgaatcaagttccccgagcctaacggacagcctgaatgggaattcaagtatagttgggagacttttggaatatgtctatacccattgggaacatccattggatgctctgagacaccaaaccaaaatcatgttcaaaaaccttctccaaatgcaccggctcactgtggaaggtgcagatttcgtccctgatcctttctttgtggaattgactgagagtcttttacgattggaatggcatattaaaggaaagtacacgtgccttggttgtttggtagagtgcataggagttgaacatattttggctatagataaaactattccatctcaaatcttagaggtgatgggagaccagtcattggtaccttatgcaagtgacctcttggaaaccatgtttagaaatcataagagtcatttgaaatcccagactgctgagagttcttggattgaccagtggcatgagacttgggtttctcctctcctttttatattgtgtgaaggaaacttggatcaaaaatcttacgtgattgattattacttgccaaaattattaagttacagccctgaaagcttacagtacatggtaaagattcttcagacttctattgatgctaaaactggacaagagcaatctttcccatccttagggtcttgtaatagcaggggggctctgggagctttgatggcatgtctgcgaatagctagagctcatggacatcttcagtctgcaactgatacctgggagaacctcgtgtctgatgcaagaataaagcaaggcttaattcatcagcattgccaagtaaggatagatacattaggcttgctttgtgaaagtaatcggagcacagaaattgtttccatggaagaaatgcagtggattcagttctttattacatacaatcttaacagccagtctccaggagtgcggcaacagatctgttctcttcttaaaaagttgttttgtaggatacaggaaagttctcaggtactttataaattggagcagagtaaatccaaacgtgaaccagagaatgagttaaccaaacagcacccttctgtttctttacagcagtataagaatttcatgtcatccatttgtaacagtctttttgaagcattgtttcctggatcttcctactcgactagattttcagctttaaccattttaggttcaatagctgaagtttttcatgtcccagaaggcagaatttatacagtatatcagctgagtcatgatattgatgttggtcgtttccaaacactaatggaatgttttaccagcacttttgaagacgtgaaaattttagcatttgatcttctgatgaagttatcaaaaacagctgtacattttcaggattcggggaaactgcaaggcttatttcaggcagcattggagctcagcacaagcaccaaaccatacgactgtgtgacagcttcctacctgctgaacttcttaatctggcaggatgctctaccgtcatccttgtctgcctacttaactcagcaagttgcatgtgataatggagataggcctgctgctgtggtggaaaggaacacattaatggttatcaaatgcttgatggaaaatcttgaggaagaagtatctcaggctgaaaattctctgcttcaggcagcagcagcatttccaatgtatgggcgagtccactgtataacaggagctttgcagaagttatctctaaacagcctgcagttggtgagcgagtggagacctgtggtagagaagctccttttgatgtcctacaggctttccactgtggtgtctccagtcattcagagctcatcccctgaaggcctcatcccaatggacactgattcagagtcagcaagccgcttacagatgattctgaatgagattcagcctcgagatactaatgattattttaaccaagccaaaatattgaaagaacatgatagctttgatatgaaggacttgaatgctagtgtggtgaatattgatacttctacagaaatcaaaggtaaagaagtaaaaacatgtgatgtaactgcgcagatggtgctggtatgttgttggagaagtatgaaggaagttgctttacttttaggcatgttgtgccagcttctgcccatgcagcctgtgccagaatcttctgatggattattgacggtggagcaggtaaaagaaataggagattactttaaacaacaccttttgcagtccaggcacagaggagcatttgaattggcttatactggttttgtgaaactcactgaagtactaaacaggtgcccaaatgtgagtctgcaaaagctgccagaacagtggctatggagtgttttagaggaaattaaatgcagtgatccttcatctaaactctgtgctacaaggcgcagtgctggaattcctttctacatacaggcactgttggcatctgaaccaaagaaaggcagaatggatttgttgaaaataacaatgaaagagttaatctctttggctgggcctacagatgacatacagagtacagtcccccaggttcatgctttaaatatccttagagcattgttcagagatacgcgcctgggagaaaatattattccttatgttgctgatggagctaaggctgcaattctgggttttacatcaccggtctgggcagtgcgaaattcatccacacttctctttagtgccttgatcacaagaatttttggagttaaaagggcaaaggatgaacattccaaaacaaatagaatgacagggagagagtttttctctcgtttcccagaactctatccttttcttctcaaacagttggaaactgtagccaatacagtagacagtgatatgggagaaccaaatcgtcatccaagcatgtttctcttacttttggtgttggagagactctacgcttccccgatggatggtacttcttctgctctcagcatgggaccttttgttcccttcattatgaggtgtggtcactcacctgtctaccactcccgtgaaatggcagctcgtgccttggtcccatttgttatgatagatcacattcctaataccattcgaactctgttgtccacactccccagctgcactgaccagtgtttccggcaaaaccacattcatgggacacttctccaggtttttcatttgttgcaagcctactcagactccaaacacggaacgaattcagacttccagcacgagctgactgacatcactgtttgtaccaaagccaaactctggctggccaagaggcaaaatccatgtttggtgaccagagctgtatatattgatattctcttcctattgacttgctgcctcaacagatctgcaaaggacaaccagccagttctggagagtcttggcttctgggaggaagtcagagggattatctcaggatcagagctgataacgggattcccttgggccttcaaggtgccaggcctgccccagtacctccagagcctcaccagactagccattgctgcagtgtgggccgcggcagccaagagtggagagcgggagacgaatgtccccatctctttctctcagctgttagaatctgccttccctgaagtgcgctcactaacactggaagccctcttggaaaagttcttagcagcagcctctggacttggagagaagggcgtgccacccttgctgtgcaacatgggagagaagttcttattgttggccatgaaggaaaatcacccagaatgcttctgcaagatactgaaaattctccactgcatggaccctggtgagtggcttccccagacggagcactgtgtccatctgaccccaaaggagttcttgatctggacgatggatattgcttccaatgaaagatctgaaattcagagtgtagctctgagacttgcttccaaagtcatttcccaccacatgcagacatgtgtggagaacagggaattgatagctgctgagctgaagcagtgggttcagctggtcatcttgtcatgtgaagaccatcttcctacagagtctaggctggccgtcgttgaagtcctcaccagtactacaccacttttcctcaccaacccccatcctattcttgagttgcaggatacacttgctctctggaagtgtgtccttacccttctgcagagtgaggagcaagctgttagagatgcagccacggaaaccgtgacaactgccatgtcacaagaaaatacctgccagtcaacagagtttgccttctgccaggtggatgcctccatcgctctggccctggccctggccgtcctgtgtgatctgctccagcagtgggaccagttggcccctggactgcccatcctgctgggatggctgttgggagagagtgatgacctcgtggcctgtgtggagagcatgcatcaggtggaagaagactacctgtttgaaaaagcagaagtcaacttttgggccgagaccctgatctttgtgaaatacctctgcaagcacctcttctgtctcctctcaaagtccggctggcgtcccccaagccctgagatgctctgtcaccttcaaaggatggtgtcagagcagtgccacctcctgtctcagttcttcagagagcttccaccagctgctgagtttgtgaagacagtggagttcacaagactacgcattcaagaggaaaggactttggcttgcttgaggctgctggcctttttggaaggaaaggaaggggaagacaccctagttctcagtgtttgggactcttatgcagaatcgaggcagttaactcttccaagaacagaagcggcatgttgaagaaaatctgggggattgggatgggggtatgtgtggatttttcctccactaaatctgcaggaaacatgttgaacataaattcaaaaattttatccc

SEQ ID NO: 24886 - DNA, 4558 bp, Homo Sapiens
agtcgaccgtggaccgcgctgcgagcctcggagacgccgtagaaggagacctgcttccgggactggaccaggcgcctgcgactcttctcagacgccgacgtgcacgagtgactactattaattctatttaaaatgggtgtaaagaagaagaaagaaatgcaagttgctgcgctgaccatttgccatcaggaccttgaaactttgaaatcttttgctgatgtggaagggaaaaatctagcttctttgctgttacattgtgtgcaactcacggatggagtgtcacaaatccattatattaaacagattgtgcctctgctggagaaagcagataaaaatggcatgtgtgatcccactattcaaagttgtttggatatcttagcaggcatttatctttctttgagtctaaagaatcccttgaagaaagtattggcaagctcactaaatagcctgcctgatttttttctacctgaggctatgcaccgttttacttctcgtcttcaggaagaattgaatactactgacttatactcttacaggaaagttactgacaatatttcttcctgtatggagaactttaacttgggtagagcaagtgttaataatctgcttaaaaatgtgcttcattttctgcagaagagtttaattgaaatcctggaagaaaatagaaaatgtgctggaaatcatattattcaaacacagttgatgaatgacttactggtaggcattagagtttcaatgatgttagtacagaaagtacaagatttccagggaaatctttggaagacttccgattctcccatatggcaaaatatgtgtggattgctgagtatttttaccaaggttttaagcgatgatgatctgttacagactgtacagagcacatctggattagctattattctttttattaagactatgtttcacccgtctgaaaagattcctcatttgtgtgctgcttcgttcagtggactgcaccagtgtccccgagtggtttatgagcagctgcaggagcctctgttgtggtgacatctctcagtcagctgtcttattcctctgtcaggggacacttgccatgttggactggcagaacggaagcatgggtcggagtggggaggccctgctcttggatactgcacatgttttgttcaccttgagttcacagattaaagagccaacgctggaaatgtttctgtctagaatcttagcatcctggactaattcagccatacaagtccttgaatcaagttccccgagcctaacggacagcctgaatgggaattcaagtatagttgggagacttttggaatatgtctatacccattgggaacatccattggatgctctgagacaccaaaccaaaatcatgttcaaaaaccttctccaaatgcaccggctcactgtggaaggtgcagatttcgtccctgatcctttctttgtggaattgactgagagtcttttacgattggaatggcatattaaaggaaagtacacgtgccttggttgtttggtagagtgcataggagttgaacatattttggctatagataaaactattccatctcaaatcttagaggtgatgggagaccagtcattggtaccttatgcaagtgacctcttggaaaccatgtttagaaatcataagagtcatttgaaatcccagactgctgagagttcttggattgaccagtggcatgagacttgggtttctcctctcctttttatattgtgtgaaggaaacttggatcaaaaatcttacgtgattgattattacttgccaaaattattaagttacagccctgaaagcttacagtacatggtaaagattcttcagacttctattgatgctaaaactggacaagagcaatctttcccatccttagggtcttgtaatagcaggggggctctgggagctttgatggcatgtctgcgaatagctagagctcatggacatcttcagtctgcaactgatacctgggagaacctcgtgtctgatgcaagaataaagcaaggcttaattcatcagcattgccaagtaaggatagatacattaggcttgctttgtgaaagtaatcggagcacagaaattgtttccatggaagaaatgcagtggattcagttctttattacatacaatcttaacagccagtctccaggagtgcggcaacagatctgttctcttcttaaaaagttgttttgtaggatacaggaaagttctcaggtactttataaattggagcagagtaaatccaaacgtgaaccagagaatgagttaaccaaacagcacccttctgtttctttacagcagtataagaatttcatgtcatccatttgtaacagtctttttgaagcattgtttcctggatcttcctactcgactagattttcagctttaaccattttaggttcaatagctgaagtttttcatgtcccagaaggcagaatttatacagtatatcagctgagtcatgatattgatgttggtcgtttccaaacactaatggaatgttttaccagcacttttgaagacgtgaaaattttagcatttgatcttctgatgaagttatcaaaaacagctgtacattttcaggattcggggaaactgcaaggcttatttcaggcagcattggagctcagcacaagcaccaaaccatacgactgtgtgacagcttcctacctgctgaacttcttaatctggcaggatgctctaccgtcatccttgtctgcctacttaactcagcaagttgcatgtgataatggagataggcctgctgctgtggtggaaaggaacacattaatggttatcaaatgcttgatggaaaatcttgaggaagaagtatctcaggctgaaaattctctgcttcaggcagcagcagcatttccaatgtatgggcgagtccactgtataacaggagctttgcagaagttatctctaaacagcctgcagttggtgagcgagtggagacctgtggtagagaagctccttttgatgtcctacaggctttccactgtggtgtctccagtcattcagagctcatcccctgaaggcctcatcccaatggacactgattcagagtcagcaagccgcttacagatgattctgaatgagattcagcctcgagatactaatgattattttaaccaagccaaaatattgaaagaacatgatagctttgatatgaaggacttgaatgctagtgtggtgaatattgatacttctacagaaatcaaaggtaaagaagtaaaaacatgtgatgtaactgcgcagatggtgctggtatgttgttggagaagtatgaaggaagttgctttacttttaggcatgttgtgccagcttctgcccatgcagcctgtgccagaatcttctgatggattattgacggtggagcaggtaaaagaaataggagattactttaaacaacaccttttgcagtccaggcacagaggagcatttgaattggcttatactggttttgtgaaactcactgaagtactaaacaggtgcccaaatgtgagtctgcaaaagctgccagaacagtggctatggagtgttttagaggaaattaaatgcagtgatccttcatctaaactctgtgctacaaggcgcagtgctggaattcctttctacatacaggcactgttggcatctgaaccaaagaaaggcagaatggatttgttgaaaataacaatgaaagagttaatctctttggctgggcctacagatgacatacagagtacagtcccccaggttcatgctttaaatatccttagagcattgttcagagatacgcgcctgggagaaaatattattccttatgttgctgatggagctaaggctgcaattctgggttttacatcaccggtctgggcagtgcgaaattcatccacacttctctttagtgccttgatcacaagaatttttggagttaaaagggcaaaggatgaacattccaaaacaaatagaatgacagggagagagtttttctctcgtttcccagaactctatccttttcttctcaaacagttggaaactgtagccaatacagtagacagtgatatgggagaaccaaatcgtcatccaagcatgtttctcttacttttggtgttggagagactctacgcttccccgatggatggtacttcttctgctctcagcatgggaccttttgttcccttcattatgagagtcttgctctgttgcccagcctggagtgcagtggcacgatctcggttcactacaacctccacctcctgggttcaagagattttcctgcctcagcctcccaagtaacggggattacaggtaaggaaacttaaacgatggccaaagaacagaagaggaaagacagtagtaactcagtgacctggctcccaaagcagtgaatttccctggaacaacatggttaaggttcttccaaagtataactaaaaggtcagcatcagttaaaaaaaaaaaaagtaaaaattgagtattaaatatctctatagtaataggaaattactattgtatgtaattatcacaatacttcatgagtaatatactttatatttccagtgaaag

SEQ ID NO: 24887 - DNA, 4440 bp, Homo Sapiens
agtcgaccgtggaccgcgctgcgagcctcggagacgccgtagaaggagacctgcttccgggactggaccaggcgcctgcgactcttctcagacgccgacgtgcacgagtgactactattaattctatttaaaatgggtgtaaagaagaagaaagaaatgcaagttgctgcgctgaccatttgccatcaggaccttgaaactttgaaatcttttgctgatgtggaagggaaaaatctagcttctttgctgttacattgtgtgcaactcacggatggagtgtcacaaatccattatattaaacagattgtgcctctgctggagaaagcagataaaaatggcatgtgtgatcccactattcaaagttgtttggatatcttagcaggcatttatctttctttgagtctaaagaatcccttgaagaaagtattggcaagctcactaaatagcctgcctgatttttttctacctgaggctatgcaccgttttacttctcgtcttcaggaagaattgaatactactgacttatactcttacaggaaagttactgacaatatttcttcctgtatggagaactttaacttgggtagagcaagtgttaataatctgcttaaaaatgtgcttcattttctgcagaagagtttaattgaaatcctggaagaaaatagaaaatgtgctggaaatcatattattcaaacacagttgatgaatgacttactggtaggcattagagtttcaatgatgttagtacagaaagtacaagatttccagggaaatctttggaagacttccgattctcccatatggcaaaatatgtgtggattgctgagtatttttaccaaggttttaagcgatgatgatctgttacagactgtacagagcacatctggattagctattattctttttattaagactatgtttcacccgtctgaaaagattcctcatttgtgtgctgcttcgttcagtggactgcaccagtgtccccgagtggtttatgagcagctgcaggagcctctgttgtggtgacatctctcagtcagctgtcttattcctctgtcaggggacacttgccatgttggactggcagaacggaagcatgggtcggagtggggaggccctgctcttggatactgcacatgttttgttcaccttgagttcacagattaaagagccaacgctggaaatgtttctgtctagaatcttagcatcctggactaattcagccatacaagtccttgaatcaagttccccgagcctaacggacagcctgaatgggaattcaagtatagttgggagacttttggaatatgtctatacccattgggaacatccattggatgctctgagacaccaaaccaaaatcatgttcaaaaaccttctccaaatgcaccggctcactgtggaaggtgcagatttcgtccctgatcctttctttgtggaattgactgagagtcttttacgattggaatggcatattaaaggaaagtacacgtgccttggttgtttggtagagtgcataggagttgaacatattttggctatagataaaactattccatctcaaatcttagaggtgatgggagaccagtcattggtaccttatgcaagtgacctcttggaaaccatgtttagaaatcataagagtcatttgaaatcccagactgctgagagttcttggattgaccagtggcatgagacttgggtttctcctctcctttttatattgtgtgaaggaaacttggatcaaaaatcttacgtgattgattattacttgccaaaattattaagttacagccctgaaagcttacagtacatggtaaagattcttcagacttctattgatgctaaaactggacaagagcaatctttcccatccttagggtcttgtaatagcaggggggctctgggagctttgatggcatgtctgcgaatagctagagctcatggacatcttcagtctgcaactgatacctgggagaacctcgtgtctgatgcaagaataaagcaaggcttaattcatcagcattgccaagtaaggatagatacattaggcttgctttgtgaaagtaatcggagcacagaaattgtttccatggaagaaatgcagtggattcagttctttattacatacaatcttaacagccagtctccaggagtgcggcaacagatctgttctcttcttaaaaagttgttttgtaggatacaggaaagttctcaggtactttataaattggagcagagtaaatccaaacgtgaaccagagaatgagttaaccaaacagcacccttctgtttctttacagcagtataagaatttcatgtcatccatttgtaacagtctttttgaagcattgtttcctggatcttcctactcgactagattttcagctttaaccattttaggttcaatagctgaagtttttcatgtcccagaaggcagaatttatacagtatatcagctgagtcatgatattgatgttggtcgtttccaaacactaatggaatgttttaccagcacttttgaagacgtgaaaattttagcatttgatcttctgatgaagttatcaaaaacagctgtacattttcaggattcggggaaactgcaaggcttatttcaggcagcattggagctcagcacaagcaccaaaccatacgactgtgtgacagcttcctacctgctgaacttcttaatctggcaggatgctctaccgtcatccttgtctgcctacttaactcagcaagttgcatgtgataatggagataggcctgctgctgtggtggaaaggaacacattaatggttatcaaatgcttgatggaaaatcttgaggaagaagtatctcaggctgaaaattctctgcttcaggcagcagcagcatttccaatgtatgggcgagtccactgtataacaggagctttgcagaagttatctctaaacagcctgcagttggtgagcgagtggagacctgtggtagagaagctccttttgatgtcctacaggctttccactgtggtgtctccagtcattcagagctcatcccctgaaggcctcatcccaatggacactgattcagagtcagcaagccgcttacagatgattctgaatgagattcagcctcgagatactaatgattattttaaccaagccaaaatattgaaagaacatgatagctttgatatgaaggacttgaatgctagtgtggtgaatattgatacttctacagaaatcaaaggtaaagaagtaaaaacatgtgatgtaactgcgcagatggtgctggtatgttgttggagaagtatgaaggaagttgctttacttttaggcatgttgtgccagcttctgcccatgcagcctgtgccagaatcttctgatggattattgacggtggagcaggtaaaagaaataggagattactttaaacaacaccttttgcagtccaggcacagaggagcatttgaattggcttatactggttttgtgaaactcactgaagtactaaacaggtgcccaaatgtgagtctgcaaaagctgccagaacagtggctatggagtgttttagaggaaattaaatgcagtgatccttcatctaaactctgtgctacaaggcgcagtgctggaattcctttctacatacaggcactgttggcatctgaaccaaagaaaggcagaatggatttgttgaaaataacaatgaaagagttaatctctttggctgggcctacagatgacatacagagtacagtcccccaggttcatgctttaaatatccttagagcattgttcagagatacgcgcctgggagaaaatattattccttatgttgctgatggagctaaggctgcaattctgggttttacatcaccggtctgggcagtgcgaaattcatccacacttctctttagtgccttgatcacaagaatttttggagttaaaagggcaaaggatgaacattccaaaacaaatagaatgacagggagagagtttttctctcgtttcccagaactctatccttttcttctcaaacagttggaaactgtagccaatacagtagacagtgatatgggagaaccaaatcgtcatccaagcatgtttctcttacttttggtgttggagagactctacgcttccccgatggatggtacttcttctgctctcagcatgggaccttttgttcccttcattatgaggtaaggaaacttaaacgatggccaaagaacagaagaggaaagacagtagtaactcagtgacctggctcccaaagcagtgaatttccctggaacaacatggttaaggttcttccaaagtataactaaaaggtcagcatcagttaaaaaaaaaaaaagtaaaaattgagtattaaatatctctatagtaataggaaattactattgtatgtaattatcacaatacttcatgagtaatatactttatatttccagtgaaag

SEQ ID NO: 24888 - DNA, 6659 bp, Homo Sapiens
ccgggcggttggcgtcctctgcggctcctgccaggggcgggcttttcaaatcttccctttgaaggagtggcgacggcccggacagttcgcgttggagatggaggggccgagcctgaggggtcctgcgctccgcctggcggggcttcccacccagcaggactgcaacattcaagaaaaaatagacttagaaattcgaatgcgagaaggaatatggaaactcctttctctgagcactcagaaagatcaagttttacatgcagttaagaatctcatggtgtgcaatgctcgactaatggcctatacatcggagctacagaaattagaagaacagattgcaaatcagactggaagatgtgatgtgaaatttgaaagtaaagaacgaacagcatgtaaaggaaagattgccatatcagatattcgaataccactaatgtggaaagactctgatcacttcagcaataaagaacgatcacgacgctatgccattttttgtttattcaaaatgggagctaatgtgtttgatactgatgtggtgaatgtggataaaacaatcacagatatatgttttgaaaatgtaaccatatttaatgaagcagggccagactttcagataaaggtggaagtgtatagttgctgtacagaagaatcttctataaccaacacaccaaaaaagctagctaagaaactcaagacatctataagtaaagctacaggaaagaaaataagttcagtgcttcaagaagaggatgatgaaatgtgcttgctcctcagctctgctgtttttggtgtaaagtataatttgctagctcacactaccctaaccttggaaagtgctgaggatagtttcaagacccataatctgtctattaatggaaatgaggagtcttcattttggcttcccctgtatggcaacatgtgctgccgactagttgcccagccagcttgtatggctgaggatgcatttgcaggatttcttaatcagcagcaaatggtagaaggtctgattagttggagaaggttgtattgtgttttgcgaggaggtaaactctattgtttttacagtccagaggaaattgaagctaaagtggaaccagctttggtagtacccattaacaaggaaaccagaatccgggcaatggataaggatgccaagaaaagaatccataatttctctgtcatcaatcctgttcctggacaagctataactcagatttttgcagttgacaatagagaagatcttcagaagtggatggaagccttctggcagcatttctttgatcttagccaatggaagcactgttgtgaagaacttatgaaaattgagattatgtcaccacggaaaccacctttgttcttgacaaaagaggcaacctcagtctaccatgatatgagcattgattcacctatgaaacttgaaagtttaacggatataatacaaaaaaaaattgaagagacaaatgggcagttccttattggtcagcatgaagaatccttaccacctccttgggccacactctttgatggtaaccatcaaatggtcatccagaaaaaggtactgtatcctgcaagtgagccattacatgatgaaaaagggaaaaagagacaagctccccttcctccttctgataaacttccattcagcttaaaatcacagagtaacacagatcaattggttaaggacaactggggaaaaacaagtgtatctcagacatcgtctttggataccaaactatcaactctaatgcatcacttacagaaaccaatggctgctcctcgaaaacttctgcctgccaggagaaatagattaagtgatggtgagcacacagacactaaaaccaattttgaagccaagccagtgccagctccaaggcagaaatccatcaaagacattctggaccctagatcatggctgcaggcacaagtatagaaaactcttaatgataaaacatttaacaaaatctataactgtgaagcttaattcagaggcattatagaataatgtgtaattatataggtaaatatagtgatttataccaataattaataagctattaggtatagaaaaacattttataatgaagaagtggatttctcttttactcctgatttgcagaatgtaagtgatttctccagcagtgtgcaagaggcagtttctagacaatatcctaattgttggaagggttaatttattcctgaattagtaccaggcagtgaataagccctaggcagaataaagcattaaaatttcttttggggagagactgtctagtaatttaaaatgtgttaaatatgaaccatattctcattgtgagaattttaatactaatggaatgtttcaaaggttttattcaaaccacaaattatagaatccacccaagaaaattttcttagcattctggaattctcatctaatggttcactggctctcatctattgtttaactcactagtttataggcctgaccttttaaattcctgggataaattttagaatattaaattcttcatctttaaagggaatttgtaatgtgctattcaaacttgtttccttgatgagccctgaaatactgttgacattaactttcataaatgaagcataacacttactagtttagagaaatggtagatgaaatgctctttacattcaattttctgtgtgtggtgctaatttccattgtgactttggaatttagggaagtgagtagctgatcaacaccttaaaattcatttaatacttatttaaaaagaagatgagagattcaaaaatatcagaaaagttggccatggtaaataattttcagaattcttttttaaaattttaattagatttccttttcctagtaagagttgatgtctgctagtggtatttttcattaaatgtcatattcttacaacagtgacattggaatcatttccataggaggtaatttccatagcaactaatcatagtgacccaaacaggattataaagtcaagtgaggaataaatagcagaaaaataccttaaaggaacaaaaaatccattttttataataatgctttttgtaaacaagagcagaacagttttaaaaatctaattagaatttccaaataaaacagtttccataaggtgtcagcaacagcactaaaaatctcaaatcacactgaaccctaaatgtcattgcaagaaataaaaatttaagaattaaattgctgccctgtgtataatctcttgagatctttttaaagctagcaagaactctatttggatcagaactacattattacaaaacaaaatgaacacttgaccaaaaaaccacattaatttaaatggagcctttcattattttcagatagcggggtcttttccatttatagagaatgatgtaactgccaggacacttttgtgtttgcccaggactcctagtaagaattgaatcttgagggagtaatgataacaaaaggtttcttgtgactggtaacatcaggacagacagagtttttggtgagaagaaagtactatatgcctgcttgatagcatgtagagatcatcacatgtatggaaaccttaaaaagtaaacttattttttctaactagaaggctctcataagtttctgttatgattgccatttcaataaatgacattaaaaatctaaaggatattattgtttgaatttttgggttattttttaaaacttcattgctgtttttgacagcatttgtgactgtcattgccactaaattattgagctagaagatgctgcagggaaaattgttttgaagctggcatctaagcattcttttttttttcctagttgatgccttcctttattacaaatcagtattaaaacttccagattatattcttgtcatttttcctcatgcagataacagcaggaaggacttaaggtgtataagaaaaagaaagtattcatacagaaattacctagcagttgtgccctcagagtagaactttgaaacaggactgaagccctttttacctagaaccatttaaaagcctgagcaaggaccaccaccccctccccaccaaattattcggtctctttctggggggcccagcttactgtatgttacaagtctttgaaatgggtctggtgtcttcagctcctgaaatgctaatttaccccttacctaaggagtgtagttataatacagagttggtttccttccttccttccttccttccttccttccttccttccttccttccttccttccttccttccttcattccctctgtccgtctctccttccctccttccctccttccttcctttttgtctttgtttctttctctggccccctgtcctctctctctgtctcatccccttttcccactttccttctgtctctccttcctcccttcctttacagtttaaaaaaaaaatctaaaaatagttaagcactgtgtcaaagagtgtttcaaaagaattgtttgttttctcatttcttaaaccagaagtttatgacaaataaatatgccatgtaatatgaaagctgcttcagctttttatgagctttcacattccttgtttgtccttttaatttgtttcttgatatatgaagactataaacttgaaacaaagagttagctgtcagctcttgataatataattggggaaacagaatagatattttatgatatgataattctgatgatctaaagataatgtcttagacaattacctttacatttcaagctctgggatataaattacgtagtcagcattaagatagtattatttttaattgctactaagtggtaacttttgtattttaatatcttgcaagggcaaagaaggcatttttaaaattctaaatgcacacctcctaaggtaaatagtctttcaaaaatatcaggcgtgccaactcttgctgagttttgttaaatcctccttaactgtctgcagtgccccctgacttcttttaaatggatgtgaatatatgtggaaaactaaatccatttattataaatgccttatctttaccctttgggatcttactaaatgcattttacctgctactatttattaaaaatggaagctgtcttgaattagagatacctcacgtaaggtaggttaagcagtcaagtatttctttaggcttatgttcagcacctcagccccctactgagaagttaattaattcagtccaaaatgaaattatagggcagtttggtgcaatttatgttaaatgccatttgaatgtaatcacctgtgttaccacgaatgaggcacaactatactacatggacagagtactgcattgcaccatgagcaagaactgctctgcaagaaaaatatctgtccctgtggtctgaatttatcaaaactcattttcttgttaaagagtgaattattgaatagtaattaaactttaactgatgaccatttatattctagtagccatcttcactgttagtcttaaattataatgtaaagttgacattttccccttacatttcaaaggcatcactatttttaaatgtttacatatgtttacatgtttgtgtgcaactgcttcattgctattaatagttaaatgaaatctgcatattctggatcatagatgttcttagttaactctgggaaagatgttacctttgggtttttaaaagacaagtcatcatttgaaaatatattagggtgtgttgattttctgacatgcttgtgtaattggctttgtttataatttttattttttaatatgggtcagacttttggattaaaaagtattatatcatggacatacattttttaaagtaccaaaggtatttggtaagcgagcccaagtcatgtaattgaaacttctgtacattaaaagaactgattcatgaagacgttttctaactttttctctttaagtgctcctctagactagactgattgaagtagacagtgtggtggaatcagtttaatcagaaaaagacataccaagtagctggtgctaattattataagactaacattctgataagccatggtataattaacattattaaaatgtttacatataatccttcttaaagtatactcttttaaaaatccattgacataaccttacttttagtttagtgatccagaatttccccagagcttaagccactgcagtaaattaggtacgtaggatattcagtcgctactagccacaaggagtctccttattttaatgtacctccctcagtactttattcctgcagagcgcctcagagtgggggagagaaatgagcaatcctggctcagttggattatttcagcattttatttctaaatctgtagtgtgatcagaaatatttaaaattaaaaaaatactttacagagagaggcctactaatcaatgtgcttagagaaacaaactacctttacattcaattaacaacaaaaaaagttacagaaattttaacaaacatttttctttatctgagtatgggagaaaatactaatgctgacacgtttaataattagaaaagatcattccagatcttatggaaaattgtgttttaaattccagcagtttgctcttgagacatggtaatctcttaatgtaactactaaaggagaggtagattgaaaagatcttgtatatacataattatgtcagatggttcaagatatcaaaataaattgttttgttgaaaatgaaaaaaaaaaaaaaaaaaaa

SEQ ID NO: 24889 - DNA, 2347 bp, Homo Sapiens
accgccccgcgctccgctgccaggggcgggagggaggaatggttgcttcacgccccgggggaagagacgggaagctcggctctgggttgcgggccccggcgtctccgcgtggggcgcaccgtccgacccccccctcccggtgtgcagcgccccgcaccgccccgcctcgcctgggagaagccgccgggacgcgccgggctggagtgggcggttataggctttgagctaggccgtttccgggaggcggagctcagaccccatttcctttctccacatccaggtcaggtggcgtttgctgtggcggctaggcccgcgtgcgctggagacctccgcgctggcccccgcgagcctcctgccctggcccggcgctgcggctctgccgcggcggcagcatgggtggcccccggggcgcgggctgggtggcggcgggcctgctgctcggcgcgggcgcctgctactgcatttacaggctgacccggggtcggcggcggggcgaccgcgagctcgggatacgctcttcgaagtccgcagaagacttaactgatggttcatatgatgatgttctaaatgctgaacaacttcagaaactcctttacctgctggagtcaacggaggatcctgtaattattgaaagagctttgattactttgggtaacaatgcagccttttcagttaaccaagctattattcgtgaattgggtggtattccaattgttgcaaacaaaatcaaccattccaaccagagtattaaagagaaagctttaaatgcactaaataacctgagtgtgaatgttgaaaatcaaatcaagataaaggtgcaagttttgaaactgcttttgaatttgtctgaaaatccagccatgacagaaggacttctccgtgcccaagtggattcatcattcctttccctttatgacagccacgtagcaaaggagattcttcttcgagtacttacgctatttcagaatataaagaactgcctcaaaatagaaggccatttagctgtgcagcctactttcactgaaggttcattgtttttcctgttacatggagaagaatgtgcccagaaaataagagctttagttgatcaccatgatgcagaggtgaaggaaaaggttgtaacaataatacccaaaatctgattggtcatatttttccaaagagtaatgcagtctggatataaatgtattttctgtcttccttataaggggattctcccagctgctaaatttaaacagtaaatatcacattttgtcattaacacagctataacttgccgtggttctcagatttattttggactattttgatgccaagtgaatataagagtttgtactgaaaccatttatttctttctattttgctatttgcaaatgcttgttatcttccctacatgaagtggcagtaacctttttcacatttaagctacccttctaccttttgaagtgatttgcagttactcatctgagacagcatcagtatttgactaaatcattgtttcacaactgaatagtcttgttcttttagtagcaatgaaatcctaagctcttgaggccattcacctgccaacctgaccatactgctttcaaaagtcttttctcatcagtagaatctattttggtcacttctagtcaatgaaaaatgtaaacttttaggagagaatgtttcctaggactcacccactccattcaatgttacatataaaatagtgtgatcaatcacaatgtccatctttagacagttggttaaataaattatctggtctttgaaaagaccgtgctgggcgcggtggctcttgcctgtaatcccagcactttgggaggctgaggcgggcagatcacctgagatcgggagtttgagaccaagcctgaccaatatggagaaaccctgtctctactaagaatacaaaattagctgggcatggtggtgcatgcctgtaatcccagctacttgggaggccgaggcaggagaattgcttgaacccgggaggcagaggttgcagtgaggtgagatagcgccattgcactccagcctgggcaacaagagcaaaactctgtctcaaaaaaaaaaaaaaatgatggagctccgaatgtgcttaagtggaaagatatctatgaaatatggtggttttttaaaacacaaaaattatagaatatgggatcccgtgtgtgtgtgtgtgtgtttgaatgaaaaatgcttatgtattgacagaacacttctagaatgatacccaaactcctggagtgggagtggggaatgccttctacgtacacactgttctactgtttgaattttttaatatgagcccaaattgtataatctttttttaataaaggggagaaaaatc

SEQ ID NO: 24890 - DNA, 2123 bp, Homo Sapiens
gcatgccccatcagccttcagcttgagcccggcggcccccgcccccgccccctgccaccctgcactgccccggctcccccgcggcccccacgctgcagtgcggccgggccccctccccgcaggggccgcccccgccgcccacccctagcgcccgtggtggtggtggtggtggtggtggtggtggcccgggccgcagggccatgaaactacaggccgtgatggagacgctgttgcagcggcagcagcgggcgcgccaggagctggaggcccggcagcagctgccccccgatccccctgctgcaccccccggccgggcccgggctgcccccgacgaggacagagagcccgagagtgcccggatgcagcgggctcagatggccgcactggcagccatgcgggctgcagctgcgggcctgggacacccagccagccccggcggctctgaggatgggcccccaggctcggaggaggaggacgcggcccgggaggggacaccgggctcacccgggcgaggcagagaagggccaggagaggagcactttgaggacatggcctccgacgaggacatgaagcccaaatgggaggaggaggagatggaggaagacctcggggaggatgaggaggaggaggaggaggattacgaggatgaggaggaggaggaggacgaggaggggctgggccccccaggccctgccagcttgggcaccacggcactgttcccccgaaaggcccagccaccccaggccttccgcggcgatggcgttcccagggtgctggggggccaggagcggccggggcctggccctgcccaccccggaggggccgcccacgtagccccgcagctgcagccgcctgaccacggcgactggacttacgaggagcagtttaagcagctctacgaactcgacggggaccccaagaggaaggaattcctggatgacttgttcagcttcatgcagaagcgagggacacctgtgaaccgcatccccatcatggccaaacaggtccttgacctgttcatgctgtacgtgctggtgacggagaagggcggcctcgtggaggtcatcaacaagaagctgtggcgtgagatcaccaagggcctcaacctgcccacgtccatcaccagtgcagccttcaccctgcggacccaatacatgaagtacctgtacccctacgagtgtgagaagcggggcctcagtaaccccaatgagctccaggcagccatagacagcaaccgacgggagggccggcgccagagctttggtggctccctctttgcctactcgccaggcggggcacacggcatgctctcctcacccaagctacccgtgtcctccctgggcctggccgcaagcaccaacggcagctccatcacccccgcccctaagatcaagaaagaggaggactcagccatccccatcacagtccctggccgcctgcctgtgtccctggcgggccaccctgtgtcggcagcccaggcagcagctgtgcaagcagcagccgcccaagcagctgtggctgcacaggcagctgccctggaacagctgcgggagaagctggagtctgcagagcctccggagaagaagatggccctggtggccgatgagcagcaacggctgatgcaacgtgcactccagcagaacttcctggccatggcggcccagctgcccatgagcattcggatcaacagccaagcctccgaaagccgccaggactctgctgtgaacctgacgggcaccaacggcagcaacagcatcagcatgtcggtggagatcaacggcatcatgtacacaggagttctgtttgctcagccgccggcccccacgccaacctctgctcccaacaaagggggcggcggcggcggcagcagcagcagcaacgcaggcggccggggaggaaacaccggaaccagcggcggccaggctgggccagcggggctgtccacaccctccacatctacctcaaataactcgttgccttaaccgcatcactccccacccgccacccaccctggagcccgccggcctgggcagggggtccaggtggccacacaggggccaggatggcggaagatacgggtggggagggaagatatccagaaaggagccacacgtgacgccaaa

SEQ ID NO: 24891 - DNA, 2679 bp, Homo Sapiens
atggaccagccagaggccccctgctccagcacggggccgcgcctcgcggtggcccgcgagctgctcctggctgcgctggaggaactgagccaagagcagctgaagcgcttccgccacaagctgcgcgacgtgggcccggacggacgcagcatcccgtgggggcggctggagcgcgcggacgccgtggacctcgcggagcagctggcccagttctacggcccggagcctgccctggaggtggcccgcaagaccctcaagagggcggacgcgcgcgacgtggcggcgcagctccaggagcggcggctgcagcggctcgggctcggctccgggacgctgctctccgtgtccgagtacaagaagaagtaccgggagcacgtgctgcagctgcacgctcgggtgaaggagaggaacgcccgctccgtgaagatcaccaagcgcttcaccaagctgctcatcgcgcccgagagcgccgccccggaggaggcgctggggcccgcggaagagcctgagccggggcgcgcgcggcgctcggacacgcacactttcaaccgcctcttccgccgcgacgaggagggccggcggccgctgaccgtggtgctgcagggcccggcgggcatcggcaagaccatggcggccaaaaagatcctgtacgactgggcggcgggcaagctgtaccagggccaggtggacttcgccttcttcatgccctgcggcgagctgctggagaggccgggcacgcgcagcctggctgacctgatcctggaccagtgccccgaccgcggcgcgccggtgccgcagatgctggcccagccgcagcggctgctcttcatcctggacggcgcggacgagctgccggcgctggggggccccgaggccgcgccctgcacagaccccttcgaggcggcgagcggcgcgcgggtgctaggcgggctgctgagcaaggcgctgctgcccacggccctcctgctggtgaccacgcgcgccgccgcccccgggaggctgcagggccgcctgtgttccccgcagtgcgccgaggtgcgcggcttctccgacaaggacaagaagaagtatttctacaagttcttccgggatgagaggagggccgagcgcgcctaccgcttcgtgaaggagaacgagacgctgttcgcgctgtgcttcgtgcccttcgtgtgctggatcgtgtgcaccgtgctgcgccagcagctggagctcggtcgggacctgtcgcgcacgtccaagaccaccacgtcagtgtacctgcttttcatcaccagcgttctgagctcggctccggtagccgacgggccccggttgcagggcgacctgcgcaatctgtgccgcctggcccgcgagggcgtcctcggacgcagggcgcagtttgccgagaaggaactggagcaactggagcttcgtggctccaaagtgcagacgctgtttctcagcaaaaaggagctgccgggcgtgctggagacagaggtcacctaccagttcatcgaccagagcttccaggagttcctcgcggcactgtcctacctgctggaggacggcggggtgcccaggaccgcggctggcggcgttgggacactcctgcgtggggacgcccagccgcacagccacttggtgctcaccacgcgcttcctcttcggactgctgagcgcggagcggatgcgcgacatcgagcgccacttcggctgcatggtttcagagcgtgtgaagcaggaggccctgcggtgggtgcagggacagggacagggctgccccggagtggcaccagaggtgaccgagggggccaaagggctcgaggacaccgaagagccagaggaggaggaggagggagaggagcccaactacccactggagttgctgtactgcctgtacgagacgcaggaggacgcgtttgtgcgccaagccctgtgccggttcccggagctggcgctgcagcgagtgcgcttctgccgcatggacgtggctgttctgagctactgcgtgaggtgctgccctgctggacaggcactgcggctgatcagctgcagattggttgctgcgcaggagaagaagaagaagagcctggggaagcggctccaggccagcctgggtggcggcagcagttctcaaggcaccacaaaacaactgccagcctcccttcttcatccactctttcaggcaatgactgacccactgtgccatctgagcagcctcacgctgtcccactgcaaactccctgacgcggtctgccgagacctttctgaggccctgagggcagcccccgcactgacggagctgggcctcctccacaacaggctcagtgaggcgggactgcgtatgctgagtgagggcctagcctggccgcagtgcagggtgcagacggtcagggtacagctgcctgacccccagcgagggctccagtacctggtgggtatgcttcggcagagccctgccctgaccaccctggatctcagcggctgccaactgcccgcccccatggtgacctacctgtgtgcagtcctgcagcaccagggatgcggcctgcagaccctcagtctggcctctgtggagctgagcgagcagtcactacaggagcttcaggctgtgaagagagcaaagccggatctggtcatcacacacccagcgctggacggccacccacaacctcccaaggaactcatctcgaccttctga

SEQ ID NO: 24892 - DNA, 1961 bp, Homo Sapiens
acgcgggggcgcctcttcacgaggtggaaacaagatggaggattcggcctcggcctcgctgtcttctgcagccgctactggaacctccacctcgactccagcggccccgacagcacggaagcagctggataaagaacaggttagaaaggcagtggacgctctcttgacgcattgcaagtccgggaaaaacaattatgggttgcttttgaatgagaatgaaagtttatttttaatggtggtattatggaaaattccaagtaaagaactgagggtcagattgaccttgcctcatagtattcgatcagattcagaagatatctgtttatttacgaaggatgaacccaattcaactcctgaaaagacagaacagttttatagaaagcttttaaacaagcatggaattaaaaccgtttctcagattatctccctccaaactctaaagaaggaatataaatcctatgaagccaagctccgccttctgagcagttttgatttcttccttactgatgccagaattaggcggctcttaccctcactcattgggagacatttctatcaaagaaagaaagttccagtatctgtaaaccttctgtccaagaatttatcaagagagatcaatgactgtataggtggaacggtcttaaacatttctaaaagtggttcttgcagtgctatacgtattggtcacgttggaatgcaaattgagcacatcattgaaaacattgttgctgtcaccaaaggactttcagaaaaattgccagagaagtgggagagcgtgaaactcctgtttgtgaaaactgagaaatcggctgcacttcccatcttttcctcgtttgtcagcaattgggatgaagccaccaaaagatctttgcttaataagaagaaaaaagaggcaaggagaaaacgaagagaaggaaattttgaaaaacaaaaggagaggaagaagaagaggcagcaggctaggaagactgcatcagttcttagtaaagatgatgtggcacctgaaagtggtgatactacagtgaagaaacctgaatcaaagaaggaacagacgccagagcatgggaagaaaaaacgtggcagaggaaaagcccaagttaaagcaacaaatgaatccgaagacgaaatcccacagctggtaccaataggaaagaagactccagctaatgaaaaagtagagattcaaaaacatgccacaggaaagaagtctccagcaaagagtcctaatcccagcacacctcgtgggaagaaaagaaaggctttgccagcatctgagaccccaaaagctgcagagtctgagaccccagggaaaagcccagagaagaagccaaaaatcaaagaagaggcagtgaaggaaaaaagtccttcgctggggaaaaaagatgcgagacagactccaaaaaagccagaggccaagtttttcaccactcctagtaaatctgtgagaaaagcttcccacacccccaaaaaatggcccaaaaaacccaaagtaccccagtcgacctaaagtcagtgattcaactggaaggaaacctcaatgctgcctccagagctttttggaaatactcagatcctggccgcctttgtaaccttctctaaacgtcaggcctggacttaaaagattttttaaaacctccataagtagtccaggggcggtggctcacgcctgtaatcccagcactttgggaggccgaggcaggcggatcacaaggtcaacgagatcgagaccatcctggccaacatggtgaaaccctgtctgtaccaaaaatacaaaaattaattgggcatggtggtggacacctgtaatcccagctactagggaggctgaggcaggagaattgcttgaacctgggaggcggaggttgcagtgagccactgcactccagcctgatgacagagcaagactcagtctcaaaaataaataaaaataataaaacctcaaaaaaaaaaaaaaaaaaaaa

SEQ ID NO: 24893 - DNA, 148828 bp, Homo Sapiens
ggtagatttggtgatgatggcacaactctgtcataaactaaaactcattgaactgtacattttatttatttatttttgagatggagtcttgctctggggctgaagtgcagtggcgcaatctcggcttgtaacctctgcctcccagggtcaagcgattctactgcctcagccccccgagtagctgagattacaggcacgtgccaccacgcccagctaatttttgtatttcttagtagagatggagtttcaccatgttggccaggctggtcttgaactcccggcctcaagtgatccacctgcctcggcctcccaaagtgctgggattacaggcgtgagctgccatacccggcctgaattgtacattttacttctatggtatttacattttagattatattaattattcctcaataaagctgtgattttaaaaagcaggctaggcgcagtggctggtgcctataatcccagcactttggaaagctgaggcaggaggatcacttgagcccaggagtttcagactagtctaggcaacatgtcaagacacagtctctactaaacaattaaaattaaaaaaaaaaattagccaggcatggtggtgtgcacctgtagtcccagctacttgggagcctggggtgggaggattccttgagcccgggaagtcgaggctgaagtgagccgtgattgcgccacagcactccagcctgggcgacacagcaacaccctgtctcatggaagaaagaaagaaaagaaaggaagaaagaaaaaaaaaaagcagattggaactctggaattaacaagaagtaggacgcacggagcacttccgcctgagtggagactgtggatccgggtcaacctgactacctaaatcacaggccaataaatggtctttcagtggtcagtccctgtaagatccgtggctctcagcttcttatcttaggggctgtggaggaaggacatgattatgttgatttaagcgctgaatattttcccttgtgatacccatcctcgcaaaactttgcttcaaccacaaacgaggaccttctgtaccagaggggcaataaccacaatgaagctaggaagaaatgcagagcaccccagcatacagtccataagcttcctgaagtggggggcctcaggcatcgctgcctccccaaagaggatcaggcccagaacagtatgctccagaaataagactggaaaaagggaaagaggggcctcaagtccaggagaccagcggctttctgaacgcgcacctgccaacccactttggacaggtcacgatggacagcgtggcaggaaaagaaaaggtcactgtctacccaacacatgagaaactgtttctcgtgcctcacgtccccactccgtccccacccatgttgtctgagtccctcggtgtcagaaacactgctaagaaatttaagaaattctgttaatgagtttaagaaatgtttttaatgattaaaagtcagtgacttgtgaataaccatgtaacttacaaacgcaaggaactctgaaagtgtgcagcaccaccgatcagaagagaaaaccaagggacccgaaatatgctttaattaaattttcttttaaaatgtcactggaaagaacatcttgggaagacggcctggccgatcgccgtgtgaagggcaagccactctggccgagagggagccccacacctcggtctccccagaccggccctggccgggggcatccccctaaacttcggatccctcctcggaaatgggaccctctctgggccgccccccagcggggggggggaggagcaaacgacaccaggtagcctgccgcggggcagagagtggacgcgggaaagccggtggctcccgccgtgggcccttctgtgcgcgggcggcggccgagcccgggccgctcccttcccagtcgcgcgccgccgcccccgcccccgcccccgcccccgcccccgcccccacccccacccccacccccagccggcgcccgcgcccgcccccgcgccgggcccggctcggcccgacccggctccgccgcgggcaggcggggcccagcgcactcggagcccgagcccgagccgcagccgccgcctggggcgcttgggtcggcctcgaggacaccggagaggggcgccacgccgccgtggccgcaggtcagagtacgggtgcccgcggcgctcgggaaccggctgctggctgggcggggagtgctcagggagggggcgcggagggctggggccgagggtctgggggctagggccgaggaaacgggaactgacggggtcccagacggatgagagctggggagaagggggtctcggctgaggggtccggggctgaggcagggtcatggtccggcaggacccggactgacgggtcgcgggcgggcggctcacgggtgaccgggtgaaggggtcttgggctgagggcacccgggctgagggtcgcgtctaccggagcgcgcactaggggcggagggcgcgggcacagagagccgcggccggtgccgactcgagtggacgcgagccggtgcgtcccggcttccaggacagcccccctcgggagagcgccgggtgggcgcggagccggggacacggggacctccgcgtccccggcggaggtgcgcaagcgtcgggagccgctccgggggaactttggagcagggtgtctggacccggggaagcgaagatccgcgtgcgtccgtcctgaggccgcgcggcacccctgctgaggaggaggtcccgttcgctgtccagagcccaggggcgaccgccgcttggggaccgggggaccgttcagcgaggggcgcgcttgtagctggccaggccctgtgccctgacgcgttgtgctggccctacgcccggcggaggggctggggacggggactgggtgcctccgtgcctccgcggatggagcgcgcagccaggacccccagccgcaccccggggggctggaaaggcgaagtcgctgctttgtgggctcctgcaagtgccaggcgctgaccactcctcctgggagcctaactgaggggggtagaggcagcagaggttaacagaaatctcaggtcccttggtggaaggtgggtgtgtagtcgtggtactttacgcctcggtgtttagggaggagcctaaggtaaggagtcagaaacggggagtaaccgagctgcggcttttatataaggtcagtggtaggtaaggaaggggccttaacctctgctggtgaccagaagcctgcatttctgcattctgcttaattccctttccttaggtgagttggctcactctcattgcattttgttggaatgtgttggtgataggtccgaaatttgcaaaattattgtattatccttatatcatttttttttgcagtgctcttgttttataagaagaatccaattcacttgggtcataggctaacggttgtaaaaatagtgtcattgttataaaagaaatcaagtcaaaaatagtcgtctgccatgaagaaactaaaatttttcttcttttccttgcaagattagggacaaaatgtaaagtttatttgtgtaaattatcatttggatataaaaccagacaatgataaactgagttgtataatacctattcctggaaaacctctgattttgaagtacattattttaaccccaactgtttctgtcattcgtgagacaaattgttaactggatttattaagagaacaatgaataacttaactctttaaaaggacctgggcaaatcttcgacaggtttcaggtattttatggcagtctttctgtctattgctaagtgatcgattgctgactgagaacagaaccaactgatggtgctagatgatttagaaaacctttctggtatagggactggcatggacattcactgtggcttttctcttaaagaaatacctttcactcctaggggagtttgacagaagacactcatagatgctaccagttagcatttggagtaatatatcaaaacattctgttcaagttttaaagtaagttttgtgtagtatattttcaatcagattcactttggaatcaaatacactttatttgattccaaataaagtgtatttgaatattcactttaatatacgaaactttaaaggtaatgtctcagccaaaaagtgaagtgtattacaaaactgtccatttttgtcttcttgtgtacttcacataatttttctccctgatttaaattatatgatatttgatagttaacttgctaataattatgtctaagagatctttgaatcaactggtggccatctcagtcttttaaaactcacttgaaggaaaagagaaacactaatgatggttttttttaaaatcaaaaacttttttcatatttacaagtttgtttctagttcttaaacaataactgctgtaaaaccatggcatcagtgaggtataaagttttgtagaatcccaggctgaagactttttggatgtcgttttctcatttctttacattaaaaagaatataatttctttttaaaattaaaactaaaatgtccaccggcctcatattctttattgaacttaagtgctttgaaaatatttttgcgattgatatttttaatgataaaatataatattttctttgaaggactagtttcctaaatgttcatttttttgtatgtttcagaactacttttaaaaaaattctagattatgctttaaattgcaatatttctaaattcctatgacatttaaaatgtgtacaagagaaaaggtgtgacatgaggaatatgaattagaagtggattactaatggtcgtagtgaattgtttttaatcagtgttatataaatataaacaaatacttttttcttctgtaattttctgacaataaggatgttagccactaaccttaattatcaagataattatgtgcatgaaagctgtgtaaaaggcacaaccgtggaacatatacaagtattaataatacatttcatttagttttcaggttataaaatcgttattaataacaagaggctttcatgaagtaggaaaatatgttaaaatgacattttctgaatgtttcacacattctggcccacactttcacttctttcctagcatctatatattcccaatgcataggacagagttggtcattctaattgtgggtgtctttctgctggattcgttgtcacttggacttggaaatacagtatgtcattaggtgtggcaaatgtactggaagaagtttttggtctcataggattccactaaataaatattagctgtagaggatttttaaaaactcactaatagagaaaacttggtgaagtcactagtgtgtaagcgtaaacatatgcaccccccacaactgaatttctaatttgcttatttttcctggtagatctccactttgcttactctctcttaatatcccaaagcaacaaaaagcgcagtgattttaattgcttacaaaggtcctttgaaacggatctaatttgactccacaaaagaatagtaagagttgtgaacaaccatcttgcaagtgtagatatccccagcgtatcaacttcagttagtttcatagcgttctaaatcaaaaatttagatttaagattatttgaaatcttcttggaagttcttacttactgtttgcgttttctcaaaatacagaggtagattgggggagtaatatagtatatgttttaaagctgttatttaactaaaatgtcatgttttaaattttatttaatgcacttaaagtaggttcttgggataaaatctattcagatgcaataggccatgttttggggaaaacttttgtagatgtttagataatatctgtcatcaataatagtatatgtttaaattattttgtaaaaacagatttacatatttttaaaatttctcttcaacaataagtacacatcaatattttaatgccgagaatttcattcagagtatgactgtttacattttcaactgtttcaattattatggcttaggcaagtaccttatcctttctctcaattttgtcatctttgaaacggagaaagtgttgcagttattattgcttgctcttttgctatgattttaaggctttatgagcaaacccatgtactttaaatgatgtgaccatgaccctgaatttaattgagctgatattctgaaaagaaccttcatgaatatctatgtcatagctaactcttttaccaatgttaatagttcactgtagttcaaacctcaataactttgagattgttaagattgaagatgatgcttctcatgtggtgatcaatttataaactgtttctgggaatattttattatcattcaatttaaaattgtattttccattccctgatgactttggacaaaaatcagcatagtaattatttttattccagctttgcgagtcctgtgtagcccctcttatgttaatattatacatccgatgcatctagaaggcacagattgtgcgctttgatttgataaagctctagtctttgcatatctttatggcacaccttgtgaattcttaacgtatattccccaggagcaagttcgttttataatgaggcctaggatccatcagatcagaagacagtttagtgtcacaacttaaaagactaaatagtgacttgtgcttgtcattaaaaatgggtctctttcaacaagcactcaccaaaaaatagtgttttagtggcttgaaaggttcagatatctcctaataacccacctatttgctagtagggagtaagtggaaaaacatataattaactgtgcaccatccaaataataaattttaaattcttcgcgtgaattgttgatacatattgttgtgaagtgtctcctgcttaagaaagtaagggacttggactgaatatgccaaagaggaggcctctgcaagcggtgtcttggtgatgggaagttactggtaacagcacacggggtgatggggtgaagaggcttgtgtgcgtgggccccgggggctgaggattgttggagaggacttctcccaccttctctgggccccaaactgcacactggactggcaagccactctgcccactgcagtgtggagctataaagcccaagtagggacttcactaaaaggatgcagaggcgaaggcaaagaaaggctcatgctggtgcgtgtaggtgggctgagtgtccctgtccgggagtggggagccgtgttatcttccactgccttaatcctacagcgtaggctttctcagagtcattgccataccttcaactgttccagtggccaggctgttctcaacttgaaaatcttttgtgggacagtgccatgaattttttttcctactgcgattttttagatataaaggaattgaatccattaagtggagattttaaaccctccagtcaggatttaaactagattgtgtaagttcagttcagttggattcaatatctgtttaggaagcatttttattccacttcattgattttagaaaataaattcattgcttggttttaactatgtcactattaaaaaaaaaccactttaatttgtggactcatctgggaggattatgtgtggatatgacatattgagtcagattatctgaccttctgagaagagttcagattagcaaaaacgtggggtgagaagtccttcgcagtttgccacaggtaaggagaaggtagatatgagggaggtagagaaatagggaaataccctgagtaggaatgtaccaggtctgtatatgctcaactcccacagtcagcaggttgcatgattactgtgtatagtcttaaaatataaggttgatttctaagaatttaccctgcttcttggtgacattgtaggacatctcagtttgccacttagcactgttattctttctggctctatactaaaggagataatttgggcaagggaatggaaagaggttactttttcatcctgtatgtttaaggaataaattttccttcatatcgagggcagtggagaaatataactgtcaaactgttcgagtgcaatgatgaagttccggaaggaacttcctaaccttgaccacacccctctggctgtcatacacctcttaaaatgtctttgaatttgaatgtctttgaattgaaatttaaaatgtctttgaatttgaaagctttgggtctacttttaaaatgccaaagttcctggcagggttagttcactaaaccactatcagcaaaaatgtgaaaggctagttgcttgtttccttgctacctgaaaacaaggcctttaaggagtagaaaacagatttggagtttgaaagagggggttaggagagggaaaaataaagttaatgcatgtcccagtttcctcataagccagaaactttgaaacaaaataggaaaataaccatttggaatagcagtgataggaaaagatatatttacccatcattttttttctcttagtcaagacaagtcgcagatcttccttgaaccatttttgacctcaaaacagttattctgaaacatcaattaaactaagaaatgtaatcacagttcaagttatgagctagtattatcttaatgtaattaaatatctgaatattatcacttcattatatcttgtatttcctctgtgatgttagacaaattatgtggtctcttcatgagtcaactcttccaggctttaaaagtagcttcctaatagattgaaatgagaggaacttttcaatcacttcagaaaatgatgtgccaaggtagtataaataatgcttaatcctttggcagatccacagatcataaaatatcatacatgcggccagtcgcagtggctcacgcctgtaatcccagcactttgggagacagaggcagaaggatcacctgaggtcaggagtttgagaccaacctaaccaacatggagaaaccccacctctactaaaaatacaaattagctcggcatggtggcacgtgcctttaatcccagctactcaggtggctgaggcaggagaatcggttgaacccgggaggcagaggttgcagtgagccgagatcacgctattgcactccagcctgggcaacaagagtgaaactctgtctcgaaataataataattattattatacatacttaattttatttttgctgaaaatagtatggcaagccagtgcatctctgttagaaatagaaacttagtagccacctcaaaagcaaggtcataattctgtgaatcagctaataggtggtatttagcagttaggtatgggctaccctcgtgcctcatgactaatcacattgcttactcgtcatgcattttttacaaagtcttgctaaagtctgtgaatctaaaacagagaatctcaaagtgttccttactgaatgttatcctttccgtcagttgataattacctgtgtaaacaagcttttgactgcatctagaaaagcacctatataaattcttctgttttatatggtggataaagtttataaaggagaacaaacataagaatgatgtcaatataaatgaagtagaaacttcaaaaatcatttgcatatgtcaagtataatccagaagagtgaagaaaatacccaggcatttggcaatataggattactacatgttttcctaaagaatttggaactgattagaaacatcctgattttatttaaaagcaatataatgtatttttacagtttgttttcaagaaggttcaaaaaaaaattttttttttttttttgagatggagtttcgctcttgttgcccaggttggagtgcaatggcgccatcttggctcactgcaacctccgcctcccaggttcaagtgattctcctgcctcagcctcccgagtagctgggattacaggcgcccaccaccacacctggctaattttttgcatttttattagagacggggtttcaccatgttggccagtctggtctcgaactcctgacctcaggagatccacctgcctcggcctcccaaagtgctgggattataggtgtgagccaccgtgcctggcaaagaaggctcaaatttggtgacttttaggactagagcagtttgatgtctgcaaaaatctagacaccaatttcttgaaggcaggtactgactgaattctattccagcatatagcacaattcttagtaggcacttaaatgttttagaaagaagaaagagctggtcatggtggcacacacctgtaatcccagcactttgggcagctgaggtaggcagatcacttgaggccaggagtttgagaccagcctggccaacgtggcagaaccccgtctctacaataaatacaaaaattaactgggcgtggtggcacacacctgtaatcccagctactcgggtgactgagacaggagaatcacttgaacccggtaggtggaggttgcagtgagccgagaagattgtgccactgcactctagcctgggcaacagagcaacactttgtctcaaaaaaaaaaaaaaaaaaaaaaaaagaataaagaattagtctaaggcagtggttcttaaaatgtggtcctgggatcgtgagcatcctctggcagcttgttagaaatgcagtttcttggacctcatcccagacctgtggtgggcctagcaatctgtgttttagggactctgctttatacgctgtttgggaactcttggtccaagatgattcttgcaccccacctgatagagtggggcccatttgtcagtgtgctttggatgatttctagtaagccttacccttgcttatggttaagttctttgccctatctctctccactcataggatctcttggaaccatcctataaaactacccccattgacctatcatttattacttagaaaagctcagtagtggtgtcaataagcttttgtcaagaggctagccggctcactaattagaccttgcaacactggttctttttagcttagcatggctgcttaggaatccctagtctccgcgtcaaagactacaacttcaaagactggattttataaaatcacagaagatgatcggccctagaggactggttcatgttaaacagatttacaagatatggatttgtaaacctcaattccagtttaataatagtagaaaatattcccttcctagtgattgttgataatagttttttttattttaaaattctataatttcaaggattgaagagatttacactcatatatatctgatgtcactaagatttagttcaggttacttagaaagcattgggcaatgttttgtaacttttgggactttttccaaagggctggagaatataggaaaagccgtatacacgaagagtttcataaaagcattgttataagaacccatatttggaagtaacttaaatatccaacagtagggagatgtttaaataaattatggtataatcaatagttaaaatattgtacagttataatgacaatttagaaactactcacaactctgaagaatatttaaaaagtaggataaaaaatgtgtgtgaactattgattggaaccttacaaaaatgtatgtatatgaaaaagtctggaagagaatatacaaaagtgataatagttatgttacagtagtgagatatggagggctttttgtttgtttttatatttttctctctttcccaaagtttattcagtagtataaaattacttctataatcaaaagcatacatttatagcttttttttctttttggtgtgtctgtgcttctgatagtaaagatcaaggcaatatatgatttttttcctattatacccaaaatttattttatactaaattttatttcacatattggacttccctgtacattttacttgcctagtctctatttggcatggggaaagaaacccatctctgttatggcctcttaatgttctcagccatacgtaaggtttaattttgttgatttgtttgggtccgtgatctacttgatctttagcatatgctggcaaatagagcttttaaaaaatagtttccagagttactttcttttaaagcccttctctctttatttttttctaatttttttctattatgttcctttttttctaaaattgaatgacctcatgatagagttacccagttttcctgctgctgacagaatgttgcacttataaatagcagctgatgcagatgcacagaaaggtaaatttctgttacaaatgttcattatgagcccttcatataatttgtgataataattttaaaaataaaaagaaatgggccgggcgcggtggctcacgcctgtaatcccagcactttgggaggccgaggcgggcggatcacgaggtcaggagatcgagaccatcccggctaaaacggtgaaaccccgtctctactaaaaatacaaaaaattagccgggcgtagtggcgggcgcctgtagtcccagctacttgggaggctgaggcaggagaatggcgtgaacccgggaggcagagcttgcagtgagccgagatcccgccactgcactccagcctgggcgacagagcgagactctgtctcaaaaaaaaaaaaaaaaaaaaaaaaaaaaagaaatgtaaaatagcaagcgagtagaggtttcccaaaatcagtgtgaacattgtgaaagttatatatatgtatagacacacacacacacacacacacagtaatagcctttgaatgaattcttttttcatcttttctgttgcattgtcctagaaatcccaaaggagaaagttaagtggttttgcctttgacagcggttacagattacatttttcttgtcactttctttgggacttcttttgtgaaacttgtggcatgtcctagaataatctttatcttaaagttttaaaaactttttagaaatttcatatcagtgttataaatatttattctgtatgcctccccagtttgggatgatttcatccttaatgataagccaagacaaacttcagctaacaatatttagtttatagatcttagaatgtgtttatgggtaaaagaacctcgatgtgatgataccttagagaatagatctactgagactgatgcgttttattttcatttttgtattttatttatttatttattgagacagggtctcactctgtcacccaggctggagtgcagtggtgccatcatggctcactgcagcctcaacttcttgggtttaagtgatcctcccacctcagcctcccaagtagctgggactacaggtgtgagccactacacccagctaatttttatattttttgtagaaacaggggttcgccgtattgccaggctggtcttgaactcgtaggcccaagcagtcctctggcctctgcctcccaaagtgctgggattataggtgtgagccacgcgcccagcctgaagctttttttaaatgaagatttattcaacaaatgtctattgagccacttatttgtgccacaagctgtttcagataaggaggataaagcaatgaacagacaaattccattcctccttgagtttacaattattgttatctagatttaacgagaacatttttcaatgggaatgacggtgactaagagggggtgaatgggcctgtgtcttgtaactagatggcattgctaggcaccgtggactcagggggctctctctgagattggtatagtgtatgggaaagaaaatctgtatccttgaatattttttcccagctctcttactatcctattatcttaggttatgttgcatgtattctatattgtatattatgcataatatatttataatttctgtctcagtaatgaagtgatttcagaggaggtaagaatgaatcctttgctaataagttattactttccttgaaaatccaaatgacaagaggattattcactttgcaaaaggattatttatttttataatgttttcacagtagatttaagtggttaactattcaagtgaatttaatttataaataaatcaattaatttaaaaaaattatttaaccctaagaaaatgtaaaacaaagttcatggagactgtcccattaacatcaaaaaaactttttttcttgggagataaagttggctactttctctttaaaaggccattacaaacttttacaagcttagaatataatatttgcgtaaaaggagacccagatcctattttaaacgaccaaattattttgatcaaattacttactatagctattttcaatgtctgtattcacaaactgtttactatttcagttctgttttcaagttgacagaaaatatcatattgaccacttagaaataaattctgaaccacatgaattttttgggaaaaaatgataaggaaaatcaattttgatggactttatataaagttaaatagaattaattctttcatatatacagggccgtgaaatgttacagtgtaactcaatacagatgtaaccaaaaccttcaaattttgcaaatttcaccagagttaatttgtttggttctacaaacatttaccaaatgaccactcattaaacctgcccacctatgaacatgaccttataaaatggtgagacatagcagtatctggcactgggcacacagattaccacagctcaataaaagctgagaaaatgactcagtgattgaacacagcgcattgccatggttgtgtctttaagccattcatgtaattcatgctgtgtattcgacttagcctgctgtatgatctttgatcctaaccaagcacaatacagccacagttaatttctttttatcgtgaacattaaatttttaaatgtcaggttgactttctttgtcctataacttgtgtatgaaatatttatcctggtcccagcttttttttttttcattctcaaaggaggtgaaaccagcttttgaattcagaaaatgcagactaatattaatatcagccaaagtaaaacataattagaaggcagatctactctgaaatggaatctgatatattccatgttctgtgttacacatatttgctgattatttgatgtcatgtctgataattttcatgggaaaattccatgtaccaagcaaaattgttagttcctagagggtaagaatgtgtatagtagttctcattctctttaccttgctgtgcactgtataccttccctaattcccagccaaactgggtgcactatatacactttttaatacttttcaacttgattttattttgaggacaagtgtgtgctttttcagtatcacttgtataggattctccacaatcttagggaatttcctaaactactctttaaaatattaattcctattttatgtattgtttttgtgatacataatgatatgaaactaatgccaggagaaatttccattttgttattctaaagcagacaaaatgggatatgaaagggaaaaatgttaattatagacttcaacattctatgttggacctcgtagttgttctggtcagaagaacaggttttttaatggcctaagggccagagcattgttttgcattcttgtttggagactttcaatggcaactgtaacaaactctgcttagtaccacagttggagaaaggtttacaataatgcccagtacaaaatgttattcagacttactactcatgcataaaataaaactggttctcttcttaaacttcgttacatattagataaaacactatcaagttttggcctcatttgttcataatatgtaatttaattcagttgctcagctagttcatatatgaatcacaagtattatcatcacaattatttaacagttaatctccttttatagggtagatatgtgttaataagcaacttcaaaataccaaagaaactgctttacatatacaagcaaagcaaatagatggaccttgtgacatctctggacaaccagtcttcttggtaggccttcatctgtgggtgtagaacgaaggtaggagtctgctcactaaagatcaatgcaaggaacttccatgctctccactgctgggcaacctgccattctcctcctgccaccacacctgttcagctactagggcaaagaagtgccctgctagacacaagcagatgcttctcttaccaagagaagataatataaggaaggataaagaactgaaacaggtttgaggctttctcttattcatcatctagacttcagttttcttgatttattattccttcatgtcttgccagacacaacagttgcacatgtgttcaagttggttctaggcacaaagggagataccagagcttctgtagctacgagattatcatctgcgtgagccaagaaggggtagtgttgaaacaggtaactaacaattcacagcagtatgtgattaagggctaaaataagtaaagggagagaacaaatgctacagaaattcagagaaggctaagatcagtgtggagtggagggtacagccaggtaaagccttgtagagaaagtgggaattgaactaaactttggaagctcagggattgacaggatagcctcacgaaaaatactaaaaacaatacagaagaagaaacaagaagggaattaaaggatgattccatttgtacaaaatatcccgagtaggtacatccatagagataggaagcagatgagttgccaggggctgaagagaaaggaaagggggagtgactgcttaatgggtacaggatttcctttggaggtgatgaacatgttttggaactacacagaagtgatgattgcacagctttaagaattactaaataccattggattgtacacacttcataaatacattttaaattgtgaattttacctcaaattaagaaaaaaaaagttcctggtttgaggtaaccaaaagagaaaataatttccagtataagaaaacaaagcctggaatagcaaataagcatagagttaagggaaggtttgcagagattaaccagtttgaagtggagagtgcgtggatgtgagtagtgagaaacatggttggaagtgtagattttaggccagatgataaaaggtctggaatgcaggagaaggagtgtgggttttatctcaggagcggggagattccatatcgtaagaagaggggtgagatgattgaatcagaagattaatttggcagtagcatgcagggaaagcagtcaggaggctgctgcaaaatccggacataccatgaggagggcctgtaagagtgaagtggaagggcagatgtggacgatgctctgaagcagagaatgatgctcaaagtgtggtccgtggcttgatgctgccccacaagtgttagttacagacctggcacacagtaagggtagatttgagggtaagtctttaaaactttaatattattatgatattcaagcgcatgattttgcatttcatagcaatatccacagtaggtgtaagagacaagaaaacttccttcatgccagagttagaagaccgctgccctaaaggatgaatgagtggagttgatgactgactcctgtagggcagtctttttttttttggagatggagtctcactctgtcacccaggctagagtgcagtggcacgatcttgactcactgaaacctccgcttcctgggttcaagcgattctcctgccttaccctcctgagtagctgggattacaggcatgcaccaccacacccggctagtttttaaaagtatttttagtagagatggggtttcgccatattagctaggctggtttcgaactcctgacctcaagtgatctgcccgcctcagcctcccaaagtgctgggattacaggtgtgagccactgtgcctggccaggcagtcatgttttatggctcctttacagtgttccaccccttgtgctagacactgggaccagagcagtaggcaagatggactggcactttcccttgtggagctcgctgtcacataaatagtccttctttgtcaaaggattgctaggaattaaagggaggtctggttcagctcagcataaggaaagcattctaataactacagctgtcccatagtgggaaaggatgatttgtgagaaagtgagtgcttcgtcattggacatattcatgcagagtctgaatcatctctcaagaagtcttgctttggtgggagaaatggagtgggtgacttatcaggtcttgtgtaactaaggtgccatgattccctattctctaatgtgaacttagtagaacatattttcttcataactggctgtattggaacaccagtacatatactaagtttctgtctgtttctattagcacttggaattacagttacctaaatttacatgtagattcaattttgaacttatctgtacagttagttccacaattctttttaaagcaagtactattctctaatgccttctcagacattcacttatttccaactttaatatttatagtaagttcctctttcacgtgatgtgtgtcacaagtcacgcaaatttctgcagaagtgagttacataaattgcagtcaagctgctgacctgtaaatcattcattcttgcccccgtgatgtcatattggggttgaataagaccaggcgtgactacccacttgaggatgtctttgggatgccattttaattgggtgaaataacttttattattcaacttatgtgaccagttactgcaaacgtcaaactgttacgtttaacagctagaatgatcataggttaattgcactttagaggatgtggaggacgtagactcctataggagtgatagccttactatattttgggggaaattctagaatgtttttaactcaaaggacattattttcatgaggatgattttaatgcttatggtatcaggtgaagaaaaatgttagctgcagaagaaaaaaatttgtttcacttcaagtctagtagaatattttgttaaaatagccaattttcattatgtattattaaaacaggttatacttttcattaagatgtatgtaaaaatttcacatgtgcctggtattacacagtatttacccaataaatatttattgaatattgttgaatgaatgtgaggtgagggcggagaaaatatttcaaatggaaaaatagtatgagcaaaggaaaacgtgaatacagaaagaagcaaagatagtttctttaaagtcgcatttatatgtaataacaatgggaaaactttttggctgagtaattttggtggctccttaatttcttaatatttaacaactaatgacgactctctctgatactgatatccaaagcaaatagctgaccttgaacatggaaaagttactgcctctgactaattggaatgtctgagcctttcttgtcttctatcttctttccttcctttcttcctctctttcctcctcttttcccctcaattgtagcactagctcttgttcttgttccctctacccttctcccctttttcgttcctggtgttccctatgttttcttctttccttcttttctgtctctgtttctctccctctgaatttctgcttcctttcctctctttcccaattgctactgtctctgcctttggttgtctctgagtgtaatatggaagtgaagtatatttttatctactaaacacatgatcaaatagggattttttattctgaatttaacattaacagaaatgttatgttgctctttatgagacgaaataaagttggatgtcacttataaatggattttgattgatttttttaaagtattgactcactaatcttcaaattggtagaaggaggtcagtagactttgactcataaatttttgtaagcgtaatggcttgttgaataactcctaattgtctttaacaaccttggtttctgtcctcttttttccaaatgcagatatagcagatgtcttcagcatctaattttttattacactttcatatgtgcagtcatacaagagctggagtatttgttttgttaattctgtatctttattgtctagaacactgctaacaaatagcagatgctcaacaaataattgttgcttaatatttcaaatctgtagtgtcattctacctcctaatcccaaatagccatcataactttttagactaacattactcattaaggtaacttagtatacaatgaatttataaatgtaaccatacaatttcatgcttagagaacgttttctctccattctctctacctttagaccattctgcagtttaaatcttgaaccaaaatgtcatttaaccatccttctgaacgataactccataattaactcaagcaccaaataagtcatctagctcttgatggtaataattaatatttgttgaatgcttattctatatcaggctctgttttaagcacattatatacattatctcattttattctttcagcagctatgtacaccagcagtcccccacctttttggcaccagggactggtttcatggaagacagtttttcaacagactggtggcaggtggaaatggtttcaggatgaaactgttccaccttagatcatcaggcattagttagattctcataagaagcatgcaacatagatccctcacatgcacagttcacaatagggtttgcactcctttgagaatctaaggctgctactgatctgacaggaggcggagctcaggcaataatgttcgctcgcccaccactcatctcctgccacgtggcccagttcctaacaggccatggactgctactgcttcacggccttggggtgggggactcctaatatacagtattaaagtcagatgaagaaacaggaacagagaggtaaaataacctgccaggtgataaaaactaggatttgaacccagacaatctgaacccagccaccctgtcatgcacaggagcctactttgcaagtatttggccttccagggaatgagatgtccacatcccatcaccaccgccaccactattccacatttaacaattagacctatacaggtgtaaccatattcacatgtaacagtggattaaatttaaacttttagttgtgttaattcactgcaaatcagcttatgtgtcttgtaagtagtaagcaacttgaaagtacctgttgttgcttatgacaagataaattagatcaccaaatctttatatttagtaacttcatcatcacttagaaatcaaccgctgggccgggcgcggtggctcacgcctgtaatcccccagcactttgggaggccgaggctggtggatcacgaggtcaggagatcgagaccatcctggctaacacggtgtaaccccatctctactaaaaatacaaaaaattagccgggcgtggtggtgggcgcctgtagtcccagccattagggaggctgaggcaggagaatggcgtgaacccgggaggcagagattgcagtgagccgagatcgcgccactgcactccagcctgggcgacagtgcaagactccgtctcaaaaaaaaaaaaaaaaaaaatcaaccgctgttaggaaattctttttttttttttgtctctcttaaattcctcttaatctaaataaagacattttattttgtctcaggatacagaggtcaattgaatatagcaaattttgtcagtgttgtaaaaaatctggagaggaatgtaaacggctcatcttgtgtctggcctctaattgaatcagtcagctatggtggggttaggggacagatccgtgtatttacttgcataggacaaaaattagtcatttgtgagtgttcacatacttccacctctcccaacccaccaaagagaattgtaatttgacagtacaataatcccttcccctactcttaaaaaagttgatcttacaaggtcagtcctatgtttttatgaaaaagaattagagaatgagtagaaaggaactagtcaagaaaagcagaagatttgggttgatagacataaagtgctgggaatgagaggaagagagagagatcgtgaaattcctgggctgggaataaagactgtgtgtaggtaggacagcctttggtgaaggagacactttggagagcatggtgtgtgaaaacacttaaaggaaaattaaagggaattaagaggaaattgaagggaaggagtatatgagaagggttgctttgtggttataagctgaattttctttaatgtattttgaaagaccccggtaaagaaaggaatttcttttaattttgcagagaatgaggagttgtccaattaggtgttgaattgttcttccttggaactctcaagagaggagttgtgtttagagatagatttgggagctgtaagcaagtagatgtgttatgagtcacagtgctgagggcaagaatataaagaagagatgaaggccaagaggaaacttagagaacacaaaatagaaaagctcagaaagcaggggtaccaggaaaagggactaaaatagtcatcataaggtaggataataggaggccgtgcacagtgactcacacctgtaatcccagcactttgggaggccaaggcgggttagagatcagcatggacaacataaggagatctcgcctctacaaaaaaatgaaaaattagccaggtgtgatggcgcacacatgtagtcccagctacttgggaggccgaggtgagagcatcacttgagcctgggtggttgaggctacagtgaaccatgatcacaccactgtactctaacctggatgacagagcaagaccctgtctcaaaaaaaaaaaaaaaaaaaaaaaaaaagggagaaactgatttcaaggagccaagaaaagagacagattcaatagtggaggatgggcaaaatatcaaatgctgcagaggcagagaccgtggtgtgctggagccacattgttaaattttcacaattttattgagccaatcgttatgcatgctattattaaaacttaaattgaatacagttaaacaaattatattaaaaataaaagtaataaatacacaaagcataccacttccttattactttacattgctgagatgattcatgcccatggtatctgagtagtggaaatacactgtaatatttgtgctgcttttaaatcagtcatggtgggagtatttacaccacaaaaattggcaaacactaccaatcagggcatttttctctgcaaagagagccagttaaatatttaccagcatgccactgagaaaatagaattgaagtcaagaaaagtctaatggatttagcaagaaggagatgacatatacttaagtttcagtagaaaggtaggtgacaaaaaccacagtaaagtgggttgaggagtgaaataataaaaaattaaaaacatgtgttcaagtaagtttgagaaccattgaattaaaccgagaagcagattgttattgttgatgatggttttgttttttaaattacaaggtttgcagagtacatactatgctaatgtactttattaatctccaaaaatgaagaccatatgcaaatttattttatggtagaaccttttctgttggaaaatcttagggaacaagttatctatagaatacattttgggaaatgctgctcttgtatttcacaattaagatgatactgattgtaaagtttgagattaatattcttgtttttaaagtttcatgctttttaaaagaaattttgtcaagaatggatgttgaattttactgagtactgtttttgtcgtttttgtagtaatcatacggttttttgacctagtgctgtgacacattttaatagattttcaaatattaaatcctctttgcctttctgagataaatgtaacttgattatggtggttcattattttaatagaggatttaatttgttaattaacattttatttattatttaaaatcaatattgataagtgggactgatatttttctctgttgtcaggttttaatatcagtgttatgacactccagaaaagttaattatgtcactatattttttcctactgagaaacagcttatgtagtaagaaaatcatctcttccttgaaagctttaaaaaatcaactataaaactaatagcttttggaggaagtaattctttgataagttttcaattatttccattgttaattatttttctgtatcttaagtcaacttcaccatttatttcatttcagacaagttagtctgagtaaactgcccttggcctgccttattatttacttaggttctggtaaaaatcccatcccagatgtaaaatcattgtgtgagtagagatgaacagcccctgtctaacgtgggctgtgtttaagtgtgaggcaattgtctgctgtcttcacagcccagttctctggcttctagggatgatgggtagggtgtttataatcgaatgaatataaactaatcttgagttaaatgaccagatggcagaggtgaaagaacggcaatccttggtgtctactccccccagaatggatcttgtctctgccctactgtgtttcacatctggggacgattccttctaagatacagtgcagttctgaatgggttcagaaggaagaggactggtagcaggagggggtctgggggaaaggttacctaaatctgcctgactctgacagtagtaagaaccagccaagtgttctgtttgatccgacacttggggctacacactaagaatagataccagtttctagaaatctttactttttgcccatctacttctgaagaaatacctatgtatttcaaaggaaaattggcacaagtatcaaggaaagctggtacaacttaatcttaacctggaatcaactcctttaatttttacatacagatttggttccgttttttagattaaaatttttacctttgttttcacgtatttgagccctttttttttttttttttttttttgagacagagtctcgctctgtcgcccaggctggagtgcagtggcgggatctcggctcactgcaagctccgcctcctgggttcacgccattctcctgcctcagcctcccaagtagctgggactacaggcgcccgccactacgcccggctaattttttgtatttttagtagagacggggtttcaccattttagccgggatggtctcgatctccagacctcgtgatccgcccgcctcggcctcccaaagtgctgggattacaggcgtgagccaccgtgcccggccgagccctttttaatagttgccttaaatgtaaaaaaaaaaaaaaaaaaaaaaaaaaaaaaaaacccaagtggtaatctgtcatagataaagtgtttctcatctctcatgtgttttgcctgttgtgtgtaatgagcggtttcgctgtgggtgctcctttcatttctggctaacacattagagtgtgtttatgtaaattgctgtgatactggtcagcagtcacagccagaaaacataaaacatgtgggcattacacactgacacattagctctttctaaagaagaacatgtcccattctgaaaagaaaattattgctttgtttttgatattgagtctgtattaaaattttttttttatttttgagacagggtctcactctgttgcccaggctggagtgcagtggtgtgatcatagctcactgcagccttgaactctgggactcaagagttcctcctgcctcagcctcttgagtagctgggactacaggcacatgccaccatgcccagctaatttttctgttttttgtagagacaggatttcgctgtggtgctcaggctggtctccaactcctgggctcaagcaatccgcctgcctcagccttccaaagtgaaaaggttttctctcatttttcaaatagaagtactaaacaatgccagagaaataaataacaggcaaatacgttggctatagtttatattatttcctgctacagttaacaaaatgggaaaacattttatcttcatggtctactacatttatgccatgtgttaagtaataaaatagcttttgtaaattataaattaaaaggtacagatttaaaagagaaaatactgtagagtttcatgtaggtaagactgtgtagaatgtcgggtctcgatgttggcgctattcaagccctgatgataaggcttttggcattagatgctgttttgtcttcatggaaaatacagctattctaggatccttgagcctttcataagagataaggttgtgaatcctaagaccctaggaccatttacttagatgatctgctctctggttcgtcctctgaaaagtctgcttcgtgaggggtgtgctgcatttgccttgcctaagtggtgtggcacacaactgtactgtcaccttaggcttaataaccatgtgtcatctagaatgaagttatattttactaaggatcgtttttgccatgtataacttctcaaacattaactttcagggttattaatccttttaaggtctagtttttcttaagtctgtgcagtaatagaggtatcgtcattcatgtgacataaaagatggaaaggggcttcattcatgttagtgatggaaataggaaagtaggtgaagtgattctaatagatgtttcttttatgaaataatttttaaaagattctccagccctgcatgatttatgatgaatcattttgtggtctgttagttacttctagagaatagaaagcattgtaggctcagggaaagcaaacattcagaatgaaatccaatagagaaggtaaatttatttgggcatgtacattttggcagcctaggctgtgtacatgtgtacacattctgaacatgtgtgtatattgaaaatcttgtctcttttttattgttaagatttgaaagaagccaacactaaaccacaaatatacaacaaggccattttctcaaacgagagtcagcctttaacggtaagtaaaatcagaatttatactgcatttgtattgaaaagtatcccttttaaagaatatgtaaattatacattgtattttattgtaaaatttcctagagagtgatttttgactattataatactttctgctatataattttccagtcagttggactatgcagtgtaacatatttgtctaacacaaaacaaaggtaagataggaaaatgacctagaagttgagaaataactcaaatccttaaaaatgaatctctaattaaagtcttttatattcatgttatttttctacttaagtaataattacattattttagattcttatgatacttttaattaaattgagataaaaattaagatttctttcatggttccctattggccatgcagtcataatctgtggtcacaaaggagaaagtagcttcgtataagccaaatgtgctccattctaggaggaagaattgctaagttatacccggcattaaaactacttccttcctggaactgactagatgggggtaggatttcagaggctccaggggctcccaaagtttcgggatatccaccatggataatttatccttccgaggcctaactatagggttccaagacagttcttagtccccaacttttttgggaaggaaaaggagacctgtcactttaaggttttatgtagttttaggactattgattttggtaaatcatgagctatcacagaatagctcattttcctgaaatctgcaaataaatgaaatccacaacattgaataaagaatcatcagatagatagatacagaaattaatatagagatgtgtatatatgtgggttattatacatatatatgtttgctaactctgtctgcttctagaggacctagaagcagtgactccccagtagcaaactagatcgtggtttccaaatacaggctgagcatcccaaatctgaaaatctgaacttcaaaatgctttcagattccaaactttttgggcatataggtgatgctcaaataaaatactcttggagcattttggattttggatttttggatttgggatgctcaacaagtaagtgttaagcaaatattccaaaatccaaaaaaattcaaaatccgagatatttctggtcccaaacattttggataagagatactcaatctataccatttttccttaaaggaaaccagagctctttggagaagtggttaattctaaggctggggcagggaaaatacaggctgagcctggaggatgttgtggtcagcctgaaagagctcccagtggccaaagctggaacaatttcatcaataaaataactacgtataatattgaattataatctgatttataaataaaatgtatacacatgagtccaaattgatatacataaatgactgaataagtaaataaatggggggagaagaactctttcttgtagaagactttaataaatgtaaaaggaatgagggaaatagaaaattgttgtcacaaagccacagcagtaattgctgcatgcaacttccactaatactaaaattagtgaggtgggccaggcatggtggctcacgcctgtaatcccagaactttgggatgctgaggtgggcggatcatttgaggtcaggagttcgagaccagactggccaacatggtgaaaccccatctctactaaaaatataaaaattagctgggtgtgatggcggatgcccataatcccagctacttgggaggctgaggcatgagaatcagttgaacccaagaggtggaggttgcagtgagctgagatcgcaccactgtactacagcctgagcaacagcaagactccctctcaaaaaattaattaattaattaattaattaattgagtgaaagtttaaggtgaaacagaatatttgcataacctcaaagtatctgcccccacttactcagtaattacaaaaggaaaaatagtaactttacagtggagaatcctgatggacaccaccttaaccacatgatcaaggtcaatatcaaggatagtaagacatagtgagctcatatgcccctgatagaatgtcctgaaaaggacagatcatgcctttcgaattcttcccaaacatccttaatctcatttgactatgagaaagctttaacctaaatacaaacacattcttcaaaatatctgaccctcgccgttcaacagtgtcagaggcataaaagacacatctttgctaaggaatcactacagattaggaggagaatattgcatgacaattaaatgcaatgtgggatcctggattggatcctagagctgaaaagggacgttagtaggaaaactggtgaaatccaaatagttatagtattgtgccattctcaatttattaggtctttttttgcttttattattatttttaattaacatataattgtacatatttatgtggtacagtgtgacatttcaatacgtgcatacaatgtgtaatgatcaaatcagggtaagtagcatatccatcacctcagacacttatcatttttttgtattgggagcattcaaaatctgctcttctagctattggaaaatatacgataggttgctgttaattatatttaccccacagtgctatagatcattagaactattccttgtatctaactgtagttttgtgtctggtaaccaatctcttgctatccccagcccttcccagcctctagtagcaactattctactgtccacttttatgagatcaactttttaaacttcgcatatgagtgagaacatgtggtatctgtctgcttatttcacttaacataatcaccaccaagctcatccatgttgtcatgaatgacaggatttcattctgttttatggctgaatggtattccatcgtgtatgtgagccacattttctttatccattcatctgttgctggaactcaggtggatgctgtatgttggcttcagtgtatcaacactgataattgtgctgggactgcactgtggtaactggggggaagctggctgaaaggtatgtaggaactccctccactatctttgcaacctttctgtaagcctcagattatttcaagttaagtagttttttaaggtcacaatggagtcactaaataatcattctcattagattttcgctaatttatagaggaagattctgcatttgcaaatcttagaacagagtaatgcaggggcattcttttcatcaagactatttcttgagctattttctaatccttctcatacacactcccatccctacctctacaagtctggtctctatttagtgtacttaatactttagccagttgcttacagccctctagaaacctgtgagtgggaataactccacaaagctctgcctcctcgggaaccacatcttagcagtgttttttgttggtgacagtgagggtctaatttgaatgttcacaccagaactgtcaaagtatttcatgcaatactttgaaaaaaatctcttgatccaccaatcatcattacccaagacaggatttgaacaagaatttagaactcgtagtcttatatttgtttgaatgggaagaggagagaagcagaccgtattgtttctaggcaaaatgtctgggaattcagtgaatacaagtagtactacgggaactttcattcttaaaggaaatcaatgacagcattaagttgtctagaaaatcagtttaactttagaaaagcataaagccgtttaaaatcaaaagagcaaactcttaaaagacaaagttaggagcaggtacgtactttggcgtctgaaaatgagcggtctaaattcaagcattttgacatgaaaaatgaaatgtgaagtatttggaattcaaccctgaatttttttgccggtaactcttgtgtatgttcaactaatttagcaaactgcactagttcacattttttaggtgaaacaagaaataacagaagttgcacctaaagtagtcaaatttcgtagagacagaaagtggaatggtgcttaccaggggctgcggcactggaaaggaacggggagttagtgtttaatggggacagtttcagttttgcaagatgaaagcatcctggagaatggttacacaacattgtgagtgtacttaatgccattgaatgcacacttaaaatggttaaaatggtaaattttatattgtgtatattttatacagttttaaaaactaaaaaaaaaaagtaacaagtcttcagcagttatattccacttcattgccagggtgtctggctctaaggggaatctctgcttagaggaccattaatccttaggaacctttttttttttaaaaaatctaaagatggttcctggacatcatttaccaactggcagtttaaatggcctgtgtaccataaattgtgaggttaaaaaaaatctggtacacaggaaacagtagagctgggtggctgggagagttgcttttggggttaatttataactaagacaaatgaatctatgaaaagaagaaaagccccgtaagaaatatgctaactgatggtgagggagaaaagggtttagataaaagatatctgaacttgtttggtctcagtgattttatgactgaggaattcaattatagatgtactggatggagcaaatcacaattctgtaaattactaataggacacaacgatctttatcattttctgtatgtgctcacatgcaaagttcagtcctgccctctgtaaataaactctctgcctagctatacccatgctatgaattcagggcttgagtgttgaaacataggcaatgcttactgccccaaccttaaaggcaggtggaactgagattaggaacgaagacaaattacttttgcttttgaattttggccttcgggtttgtttcatttttgttcatttcttttcatttttattactaaaaagctgattttttaaaataaaaagatcacaaccacacaaaaaaactattcttctgtagtttcttccagttttgttcacatgtgtatgctttttatttactgacagttaccgtatatacatcacttggccctcagcctctttcactgttaggtcctataaatttttcatttctacctggctttcagagttttcataatggcaacataatcttagtgatagcacgtaatttactaagccagtttttaggtggcttctggtgtttttattattgtataattatgttttattcttataccattacataccatgaatatctttatgtaaatatttcactcaattaaaaaaatattttcttcagataaattgccaagagaggaatttctttgttaaagtgtttgagcaattaattaccttactcttgcattattaattttatgacatttcaaattgcttggaggatatattaatagcaaatgaacaaaacatacaaagcataaatatattttggaaatacatttaaatgatttctgttaatttaaatgaattatcatttacttaaggctttgggtgtatgatagtggtgggaggctggagagtgaagcgcttcaatagttgtttagagattagaacgatgtgagtggtttatttttatttttattctttagaggcagggccttcctctgttgctcaggctggagtgcagtggtgcaatcatagctcactgcaacttcaaattcctggactcaagtgaccctcttgcctcagccaccggagtagctgggactacaggcacacaccaccgcacctggctaattgctaaattattttcagagatgaggccttgctatgttgctcagactggtctcaaacgtctggcctcaagcaatcctcctgccttggcctcccaaatggtgtttttttaaaaaacccagcttaatagcaaagaagttacagattatttcctgaggctatgtcaaatttaaataaaatgtaaagactgtgctgtgggtcccttaccacctttaagtctaagttgctagttattaggaagaaatgattgcttttgaaaatgcagatttaacaaagtaggactttcatagagataagttcaaatcagtttttaaaaaatattcatttaaaaccaaatatttttaaatttgtggtttgaatatttgagaaacaaatttaagaataaagatacaataagaattttaagatacaaaactatatgtttacaatatattaaaatgaataggaaaaagattatgggtgaaactctctcctttttattctcaactttctgtttgggggttcagtgtctccttccacagttttctttgcctcaaataaataaagccaattatgagctctacagtctgagttatagtattcttggttctttgggtaccgccaataacttatatatcacaaataatacatatacagtgttacatagtaagtgctcaataattggaagctagttccatggggcaaaaggaaagcaactgtgttctctttcatactgttctagttttttttttcctttaagcttgtgacttcttgttcttcagtccagatcctgtgatctgaaataatttaaattattaaaagttagatatttttaaccttttatactcccactagacaggacataggaaatttagtgacgtaagcatctttaataatccttaaaagtcataagacttggtggctgggacaagaaacaattaggtataaatttcagggaaataccataatggcatgacttttgttttcttttgttaacaagccacatggctttcctctcaagcccaaggaatacatagtgtgctctccttttaagatttcagttttgtctgcatcacagagatgtatgtttccctaagtttgctcactataatttgtgattgctatttttcttatctgcgaaggaagtacagcagctcccactggggaaataccatgttaagttgatcctaaaataagaaatctaagggaaaggtcacatcctaataacttgtgcaaatctaaattcccatggagctttgcaatcattttgtaggagtataaaaaatctattattgaacttcttccagatagcgtcgtaaaattgaagtacttttatatacagaagtaaccactaaattataaatacaattgacaagacctaattttttaagcaatctattatgaatacgtagagaaatctggcatgactaataaaccacaaaatctttcttgtcactttcactggaaatataaagtatattactcatgaagtattgtgataattacatacaatagtaatttcctattactatagagatatttaatactcaatttttactttttttttttttaactgatgctgaccttttagttatactttggaagaaccttaaccatgttgttccagggaaattcactgctttgggagccaggtcactgagttactactgtctttcctcttctgttctttggccatcgtttaagtttccttacctgttaagtaagaaaggtttatgttaaggatcaagtaagatcaaatatataaagggtttagaaataatttacggcgtatatttatggtattactgtaataattgccttgacttttttatcttttccaaatgaataaatcaaaatagaaagaggttgagtaacttactcgagctaacagtcaccggtacacgctaatcagtgccccactcactggtcaaatctaagtaattcttcaagggatggaatgtaaatggaaactgctcccttatgctgcatacagaggtattacattttgcagtaaggattgattgtttcctagcacgtagtaactaacctgttttgaggatgcgttgttagaaatgcatcttggacatttatgtatatatacgtgcatatatatatgtatgtatgtatgcatgtatgtatcgctagaggaatgtgcgtccttgctttcttactacaaattaaagctgaacagaatgtggtgtttgtcttttggtattgtctgaataaataccaatatctactagtatttatttccttgctggtaataatgtgttttcattaatttaagatttataggaacatacttgggtgctctgcctgctagaaactgatctgtagcatgagccatttgttgaaagtacttagatatttctgcatttatttatttctgtttcagaccccacaataactatattactataagaaatataggccagacacagtgggtgggtcacacctgtaatcccaggagtttgggaggccaggtgggtgggttacacctgtaatcccagcagtttgggaggcccaggtgggaggatggcttgaggccaagagttggagaccagcgtaagcaacatagtgagaccctgtctctgcaaaaattaaaataaaaaaattagccaagcatggtggcgcccgccagtaatcccaactactcaggtggctgaagcaggaggatcacttgagcagggaggtcaaggctgcagtgagccataattgcaccactgcactccagcctgagggacagagtgagaccctgtcaaagaaaaagaaaagagaagagaagactaaattgttttttacatgcttatctatgtgatgtgagttcaaagaatctctgcaatgattcaatatctttttaatatttttgtttgggaaaagcattaagctccttcattgtgttaattaattcagttttctcttttatgttatacaccagcatgaaaagtgtgagatgttagaggcccacatcagtaccctaccacatatttaccaggaaaagctgactttatgcttaatggcagcagtcacccctttaaaatgtgtggcctctgtgtccgatggcgtggactcacttcctttaagttcatggccttctgaagatcagctgggctgggatgagtggtggctggcatgtggtggagtgtcttgcttccctctgatacatggaagttataaaaagtctcactaatgaatgttcttaatatatatggggtaactaatttatgcatcagactttggaataaaagtaatagcaacagcaaatgagagtctaagaataattcatttttttgatacacttctgcccccaggtgccaaatgctacagggtggaggcggagggagacagaaaatctttctgtataggaacctactgatcgctgctactataaatttttctaaccattttatttccattgattattgttttagttcaggttttccttattcctcatttgggttattgcagattaactctctgaccaagcaatccatcgtttccatcatcctccagtccatagttatatttcatcccctttcagagagcattacagactctgtggtcggcccagcctacctcttcgatgtcatcacctccacctgctcccacaaatcttatgggtcagacacaccaggctgctcagtgtcctctcacagtgctgagtttatgactgggatggattgattttcatactattgttgattcaacattttttatagtatacttcttgagaacagagaccatgttcagggatccctagtgcttaatacaattcctaccaaatattatgcaagtaataaaattgcagtgtcattgaacattttcagatatgcatttatttctactaattaatcttagtagtattagcagccttgactaaatattatttctaaattgatcaacatgcgatgcaaagcatgctacagaattgaattaagaaaagaatttccatgagagatatgcatttacaattttgtagatttaatctttgcatagacttttttgttgcagatactgaaaaggaatccataaaaatacatagatccctttactagccacttttaatttacggatgaggaatattcagttcacagactggctagcgctttttagctttctttagcgtttgaagcagggcttctaagtcacatgaaagactagactagttattggcatttaaattttttggctcctacttgtatgtattatttattaaacaagtagttattgcactacctttatgtatgcagcactgttttagacaaaatagaattgtgacatattccttgctcatggtcttgtttcaaagacaatacctacaactgaaagaattaaataatagagccaggcaatatctgattgaggaaaagcatgcagtaaaagttcagagaagaagatacacgtgcagaactggaatggtcagtagttgcttcatgagatggttgcactgagctgaacccttaagtaaggatgtggatacatgagaaggaagaagctggaaattttaaacatgaggagcttcatggggaaagaatttcaagctatcaaaagatatcaaagattgaggaatttggacttggtctgggaggtattggggatcttgaagatttgggggtagggaagtgatatgacaaaagctgtgtttggaaggcacaagtgaaacagagttgggtttttttgtttgtttgtttgtttgtttttttcagacagggtctcactctgttgctcaggctggagtgcagtggtaccatcttggctcactgcaacctcaacctcccaggctggagtgatcctcccacctcagcctcccaattagctgggactataggcatacaacaccatgcctagctaatttttgtatttttttttaatagaggtggaatctcgctatgttggccagcctggtcttgaactcctgagctcaagccatcctcccacctcagcctcccaaagtgttgagattatgggcgtgagccactgtgcccagctaaaagagagattttgatagcttatatgatttgatgactgaataaaaaataaagaggatgaaaaaagtgaaaaatgaatttttggctgataaatagagaaatggaggtattaaaagaaattgggaagagagactctgtttcaggaggaagagggattagcttgatttttggatttgatgaagatgtgaagttaggtgaccagacctcgattcagattttagaatcagactctttgatttggtgtcattaacattgattgaagaatgttttgaaagctgaggtattaagaaacaacacaaaggtggagtttaaaagaggaagttgagcgtttggagagagtgccatgccaaaggaggggacttttaagaaaaggaagacaacacttagtacttctgtgtacccagccttgtaggaataactttacctgtgtaatcttattttattctcacagtaccatgtaaagtatgaattatcattgtccctatttgacaggtgaattaagtgaagtttattgtggttaaataacttgcctgaatgtcgtgctgctggtgcaaggttaatctggatttaaactgagatctgtctgtctaacccccaagcccacatatttttttaattgaaatgctgcaaaatggtaatgaaaggtcaagaagaataaaaaaaaaaagagtaaggccattagaatgttcaaggagaagatcattgtttaagattataaaagcgtagtggtaggaatatttcagcatttagaaggtaatagtaaattaatggaggaagtgaccctagaccattgctaatttgggcagcgagtaggacagttctcttctgaggcagctgagtcaagtacagcagagaagagtgctcatcagtggagaaggtgggaatagtgttggagaggtctcagaataaacattaagtaatcccagcactttgagaggctaaagcgtgtgaatcacctgaagtcaggagttcaagagcagcctggccaacatggtgaaatcccgtttccactaaaaatacaaaaattagccacgtgtgttggcactcacctgtaatccccgttacttgggaggctgaggcaggaaaatctcttgaacccaggaggtggaggttgtagtgaaccgagatcgtgccactgcactccaggctgggcaacagagcaagactctgtctcaaaagaaaaaaaaaagaatagacattaaaaagacacagacgatgtgagaaaaaagactgttcccaccaagtttagaagaaaggataatgaggttgatgtgcctgctgtgccggggggataagagaaaggtgtcaggcaagaatagatgtataaaagcactagttacaactatactttgaaagtcatattttacctggaagaaatctcaaaaaacaaagactacatggcagttaagtgacccaaatcaagtcactttccctcttcaggcctcagttttcccatatgttagacaggttaaattaggtgagacaaactgatcttttaggaccattctataatactgtgcttaactttctaagcattctggaatggagcagccttgatcttttcacagatacgtcaaccatatagctttatttataaaacgaacatgttgagataactaaaattagagttaatatcttcataggtacaaagaaacttttagaacttaagtccacaagtcagaatttctggatgaattcctttttcctcttattaaaaattgttaagatgtctgattagactagttgtaaattcccttgaaagcaaggatgatatcctgctctctactgtgtcctcagcatcaaggacagtgcctaacacagaacaactaccaatgaatatttatgaaatgaatgaaagtttgaattgcaaaattaaatgccaccaataaagaggctttgtgagcgagcgtggtggctcaagcctgtaattccagcactttgggaggctgaggcgggcggatcacttgagctcaggaggtcaagaccagcctggccaatatggtgagaccccgtctctactaaaaatacaaaacattgtctgggcgcagtggctcacacctgtaatcccaacactgggaggctgaggtgggcagatcgcctgaggtcaggagttcaagaccagcctggccaacatggtaaaaccccgtctctactaaagatacaaaaattagccaggtgtggtggcaggcacctataatcctagctacttgggaggctgaggcaggagaatcacttcaacccaagaggcggaggttgcagtgagccaagatcacgccgttgcactctagcctgggcgacaagagcgagactttgtctctaaataaataaataaataaaagtataaaaaacgagccagtgtcgtggtgtgcacctgtagtcccagatactcgggaggctgaggcaggagaatcgcttgaacccaggaggtggaggttgcagtgagccgagattgcaccactgcactccagcctgggggacagagcaagactctgtctcaaaaaaaaataaataaataaataaaggcttagtatagaactcttcccagtcttttttctccactttgattttttttttttttctcaatctcttccatgacaattcagggacacattaattgtgcaaaaggcagtcacttgtctgtattgtctatttttatatcacttaaattggtttttcatttggttgctatgttgacattttatgaaaagggaactaaacttgtgaattgactgacagtggaaatcataggattttcaaaaataagttttgtagttacttaaaaattagtattccagttttcggtcgttcattagtttaaatgttaccaataatattttctttataaaaagaaattatgttttatattgtagaggaaaaatgatttagaaaaacagaaatctatttctgaacaaatttagtgatgctgatgtaagaaaaagaaaaccacaagaagtcatcccaaatttagtaatgcttcctatcttaaacacatgatttcacttgtcttctggctagctaaaggttacaaaatgtcaccataataccttttacttccttatgagttcttgctactccaccccctacccccaaatatggtagatcgagttgtaaaaaccctgaagtatgacaatatagtttattgcacttatagttagaattattctgccaagatgagctgagaaatggaggaaatggatttaaatttacagcagtccagtgatacacaatatgcgttttccagaccactgaaacagcaagccaacttttaactttaatacttcatacagtggaaaagttacagctgtaataaaatcaacagatacatctctggttaatgttctcaaatgagaaaattgactgcaagaacatttgtccaaatacatgtttttatatattttatgctactttccagaatattaacagttttacatagcgctgttttggaagtcactcattgttttcatctttctgattaagaaatagggccaaagttgtacattgcactagtagtagacttttaaagatgtctttgtctctttttcagtactaagcttcaagttcatagattatccttgatctttcctttccctaggtagagatttagagtatttgtttatgtgagatatataaaaaaaaaaaggagattttaacaaatgactgtttgattcttgggtagaaactaatactgatcaagaccaaccaagtattcagacaagatcgggcgtgttcagggtggtacggccatagacgacaaccaagtattcaaacattgagtgttcagtggaggctgtacagatatcctgggttttgattcaagatagtgagatagccatcctatgagaatgtgaacttgaaataagattttgattacttttttttcctcctttaaaggtttgttcaattttaactattttttttcaaaatctgcattatcacagtatattttaaaagaatgactaatttactgtgatatatttgggagttaccttgaaagagattatcttgtaatttaaaataccagaggtagagtgaagagtcaggtggtaaaagagaaggagactggatgtttgtacccggtttgcttcttcccctttgttctgctgctggttttattttagctgttctgtttgcctcaccgcaggcagcgtcaccactccggttccaatcttctggacgtagagttttcaaaccatctataaattagcagtctaagtggaactttggcaaatgaggttgccaacaagcattttctttatatttagataatttgagctcatggcctctgggcatttggtaagaagtccagtaaagagaagcctaaagaacagaatctttattatgagtagtcgcctttttccactcagcagtttgattccaagcaccctgagaaaaactagagacatagtctagttggcaggttttttgaagagaatgagaagcccaaaccaaaagataatgaagaccacagcagagaactaccgaggcagctggcgcagatgcttttttggcactgttgagaaaggcttcagacccacagtctgaagagatggagaacccctcctccaggagcaaggaataagaatgacaattgttctgtaggacagttgacttagattcaggaaagttcttcagaaaatatattcagatcacaaaaaaggtgttaaaatcccaggatttttcagccaaggatggcacttgcttctttcagcatcactcatcaagttgaaatttatgagtgtcctttgttatcacaaacaaagcaagcaaactgaacaaatgagaatgcttctttagtatctacatagcactttaaaagctctgttttctttacaaaatgtgtgtatggaaaggtaaaatgggaataaatagtattaaattctgttcttagaacctactgtatagtgattgaacagctaaacagaacgaaaaagcatgcacatcttacagatacagagatcatgactttggtagatgagactaacatgtatgaaggtgtaggaagaatgtttatttttcagtccaaggaagcaattcacaatcaactgttagagaagcagcaaatagcgaagaaaaaattaaagaactagaacagaaaaagtcctacctggagcggagcgttaaggaagctgagaacaacatccgggagatgctgatggcacgaagggcccagtagggagcctctctgggaagctcttcctcctgcccctctcattcctggtgggggcagaggagtctctgcagggaaacagcttctcctctgccctgatggatgctttatttggatggcctggcaacgtcacattttctgcatcaccctgagccccatttgcttcccagccctggagtttttaccctggctttgcctgccacctctgcccaggacactcttccctcttggggtgtgtgatgaactcccaggagaggaaagatgggagccagggcaagataggaagctctgcctgagctttccactaggcacaccagccagaccaataaaaagcatctgtcccactctgctaagcctgcttttcttgagcagagggtgagagaggcagtggccatctccacctcagctcctgctccctctgcatcagagcccttcctttcttgggggatgggctcttgccctcttctcttttcccttcctgtatctttgactaacgcctcagctttcaggcctacatgtagcagacagaagaggaagaaagaacagacgttcacagctgaatctcagtgaacagaatagcagtccctggatggcagtctgcctaaagattcctttccctgccttctcccatacattccaaaaggaagttcaacagtcagcagcacctccaagactgtctccttttggccaatatcataagatggacgccgtaatcctgaggcctcctagaggctgagggggcaatggtgtgctccagctggctcatcccagcccaggtgggccaattattcaattttcaagaattttgttgcaagccagttgttaaacacagccattataattatgtaaatttgcaaattatgttaaaaacaaggacaataaatactcaaaatgcaaaaaaaaaaaaaaaaacctactgcatagtgtaatagtgctctcacttttctctccttgattctgatgtcaatcactcattgtcacctccactagagggggataaaaaggataataggaaatcagaatattttgatttgtagttcaactgttgatcaattatctttgagacttttaacattcatgactaaggaggattaataattaacatgagctgtagaattaaggtttgtatggcatgataagtataaaccagttttgggaccgctataattctaaaaaagcaggtagactagatgattagttgtacacttattactgctaattcttgattgtagaacaaattttcctatgaaaaccatgttgtgtattttatatctctattagttcgttaaaagtttagcagttttagatgtcgaaccagtaaaaaacaagttgcccattctatcatttttttttattgtggtaaaatatatttaagataaaatttacgattttaaccatcttaagtgtacattggtacagtggcattggttacgttcacaatgttgtacaactgtcatccctatctatttccaaagctttttcatcacccaaacagctctatacccactaaacaacaactccacatcacccactccccagccctggttatctctgttctactttctgtctctatgaattcggatattccagttgtttcatataagtggactcatataatatttgtcctttttgtatggcttatttcatttagcacagtgtcttcaaggtgcatccatgttgtagcatgtatcagaatgccattcctttttatggctgagtaatattcccttgcatggatatataccacattgtgtttctccattcatctactgatggatacttgggttgtttttgccttttgctattgcagataatgcttcagtaaacattggtgttcaagtatctgttttagtccccacttttagttcttttgggtatatacccaggagtgaaatgctgggtcacatggtaattctgttttgctttttaagcaactgccaaactgcttttcacagctgctataccattctgcattcccactgcaatatatatgggttctaatatctctacattgctacaacacctttttttaaaaaaaaaaaaaaaaaaaaagctgtcctattaggtgtcaagtgttatctcattgtggttttgatttgcattttcctaatggctgctgatgttaagcatcttttcatgtgcttattggtcatttgtatgggttctttggagaaatgtgtattcaagacttttgtccatttttaaattgggttgtttgccttttgcctttctattcttctctcacttttaaattgattttctcccatatttctccacaaagtcaaaaagatgatttcatttgaacacagataaatgctgtcagccttccattgccatatacattgaattaaggtcaaatgctttttgtgctgttgctaaaatcacttgagaatctgtctctcttcaactgaaagaattgttctggatgcgttgatgctgtggaattccttgtactctctcccaaatctcatttaacaagctcacatttagggtgtgattcactgtgaagtattccagaaaataaaatccattttctcagaatgatgagaaattttacaccttgaagagaccatctcttttccaaactgagatccacagattcttggagatccacaaatatattcttgggctctgagagttttagaattttaaaataatctgtttttatatcaataatctaaaaggtcattagaaagcccacatttcacaatacaaggacattttcctggaatgagactgttttcttacattagtaagatggaagtgacttgcctaagataacacagcaagttaaaaccaacactaaaactcatctttggaagcttttctcagtgttctttgttactagtgtggagatcttgcaatgattctgtcttcattaagtctacaggtagtggggaaagcagaaaaagaacaagtattaactaaaatgatgagtgctgtaagggagagaaatggcagtatgagttgtgtagaatgagagcagttgcataggatgagttaagttactgtgagagtttgaggaggtggtttttatgccgatagttgaagagtgaattggagttaccttaagggggttgtgagaagaaccatgttacagatggaggaaatgagatgtgaaggctgtgatgtgggaaacagcttagtttactccctgatttaaatggagaaaaggaatccagtgaggcttcagagagaagcaagaactaggttattcagggtttaagacaatcaaaagtcaaaatagagtttaaacaggggagtgacataacctgatttgcatcatgctggctgtagtatgcagaattgattggagaggcaaggatggcagacaggacgccaggtgggaagctatggaaaggtgcatatggaagaagagagtgtctttggattccagttggtaagtggaagagactgaagcatgtggctgaatgtaaatgtttaataagtagaattaaaaggacatggcgattggtttgatggggatgtctgggccttcaattatgactccctgtttttggcaatgatcagctgggagattggtggcagcatttactaagacagggctcattgaaggaggaccagttttagggaatagaggatgaatggagtttttaacctgttgagtttcagttgcctgtgagatatttcaatggagttaccaaatagatatttctatgtagtgtcaaggttcagactagaggactgaggcagagatataaatttggtcttaatatatccatagtgcttgaaactatatgtgtggagatagttatatactaatggttgtcaaattaagcattttttccaattcctttcccagaatctagtcatgtgaaatgatgaggaactggaatgtacagtgtatacattgttcttggcaaaactaaatttaaatttctgcttaacctaatcaaccaaaaagccctttttatttctgcctgtgtaaaatctttcttcaacatattaagccatttttctgtcttggtaaatatgatagggtgaaataaaatttaaattgaatttagatagccctgaattgatgattcaagaacttttagaatcttagttttatttttgagtagcaaataacattatactgtagatataaaaaatgttgaagattatcccaggaagtgctctggaagctgcttttaaaaataaataacttttaaactgccttttctcccttagcatttgcccatttgttctaaaggtagaagaacaactttcagtgtgttaagggtttttaatagttaatcacagttatatggcatttgtttttgtttaatatgtggatttttatgtaatgccacccagaggcctaggtatatcagtacattcctcagcattattaatgtcatccaaatagattgtctttgattactgatcactgactccatatatagggcagtgatttcaaaattattctactaccattgcaagtagacatgtatacagtaaagaaccatccaaaggccaggagcagtgactcaggcctatagtcccagcactttgggagaccaaggtgggaggatcgtttgagcccaggagttcaagactagcctgggaaacatagtgagaccccatctctacaaaaaattttaaaaattggctgggcatggtgggatgcatacttgtagtcccagctacttgggaggctgagggaggatcgcttgagcccgggaggtccaggctccagtgagccatgttcacaccactgcactccaacctaggcaacagagtgagatcctgtctctaaaaataaaaattctgaaaagttacatctaaattaggtttgagtaaatgaagtcatgagccaactgcataggtgatctttctagtggtagcaataccaaagtgggccttgtaaaaacaaacaaacaaacaaacaaaaacacccttttaaatgtagttcagggagaaggaagctagtatttcaacttactgtatgccaagcacttctaagtgctttacattattctctttaatattatttcttatattcatcaccacaatcctcatttacaactgaggaaacagaaggaggttaaatagctttgcccaaagttacaccactggcatgtggtaatgtagggcttccagcttgagtatatctaattttatagccatcattctttctctttccatctctgtatctctctgggagtcaggagacctatattcctgtgtttttgttgttgtcgttttgagacagagtctcactctgttgctcaggctggagtgcagtggtgccatcgtggctcactgcaacctcaacctaccgggctcgagtgatcctcagctgtgccatctcgctatggaaccttggctaagccacgttctgagctatggtaaagcacagtaataggttcacattcactctcccccatcatgcttatgccccctacctcgtctagaaggctccacacttcctttctgtgtgctcgttcattcagtcgtcagtcatttcgtcagttagtcagacaacagactttgttcatacgacattagtgactgaggttctgttgagtgacgcagataggaaataacctagctgcatggttgctgtctttcaaaaggccgtactcttaggatccacatacaggcccccatcttctgtgaagccattgtccccagccatcccattttgacgagtttttttgagtccctgtgaaactttggcttttttacatttatctggcagttaactaggtgctgctttgtgacagttcttctattattggatgcaattcttaattcaaatcatgtatcattacttaacttttcacctctttgcagcttctttctcccagaagattacaagttccttaagagcaggcttatacttctttgtataatatttcccacagtgtctcttaaatagcaaagttttttgacctgatttactaaaaaaaagtttgttgacttggcttaaattttattttcttttctttttttctttttttttttctttgagacagagtcttgctctgtgaccctggctggagtgcagtggtacgattttggctcactgcaacctctgcctcccgggttcaaacaattctcgtgcctcagtctcccaagtagccaggattacaggtgcccaccaccatgcccaaccaatttttatatttttagtagagatgggttttcgccatgttgtccaggctggtctcgaactcctgacctcaagtggtccaccctcctcggcctcccaaagtgttgggattacaggtgtggaagccaccgtgcctggctgacttgggttaaatttttaagtttagagtttactccctggttgaatgatttgggccaagttacatagcttctgtgaacctcctcagttttcaacaaaatgggaataattcctacttctcaagatgaaatatataatatatgcaaaagtgctctgtgaactctaaaagactatacaaatattactgattattttatactttttagtcaaagcccccctgtcctgcattgttccagtagacactttatgtaccaacatgtacttcagctgttcacattatatacttttatctctgttatcctaccatctaggtcaatacattttaacatctttatttgctgtaagtttatttctaattttttattctttattttgtttattcccatacttaacttttacttacgactacggatttaagtagcatgaactgtcttcagactggcctcctgtgatgagtcacaaggcccatcataatggatccagattgcaaaattgggagtaatagaaattactgttaattttcttgtaaggtagtttaatgcatttacttgcagtttcagatgggtagaaatggtacgttgttaggaattcactattgagatgatttttagtctgtattagagctctgaatactctgcaaataatatgtgagcactggtaccatcaaagcatgtgttgccttaggtggtgtttacagaccttgtcagagttggtagtaattccagaatataatcatttcaatagctaaggcttatggttaagacttccaaagtgttcagaatttactaaattgaattatttgaggttttgttactgtgttacttgtagtcatcaaatcaagctttattttactgccttcattgaaataagcagttttgaccatttaaaaatatttttaataggatacttattttctctagcatttttagagtgtggttcctgtgtggtgaatgtctgtcacctcttggaagccttgaaatacacaaattgactattgttgtttatgttgaaagatattaaaatgagatttgtaattgaaacgggcattacttatttcacatctggttgcttgaaaagtggccagatgcaacaattcttaatgcaagagagcctacggcaaaaactttgcaattctcaccctctacaaaacagctgccctgtgtgaaccttcagtggaaaaagaagaagaaaagcaaagcaaagaaaattcaccccaccacgttctaattacagatttccaataaaagtattaatatgattcctacatcaatgagctaatcattagaagtagaaggcaatgtggggaaaaaaaaaaaaaacaagaatggcagcactgacctagtttctagttgccaggaccaaagacgtcgtgacaccactgtcctttctaaatctccttaccttgcttaatcttaaagtgatggtatgtcctggtttgcctgacagtcctggtttatgcctgttgtcctagtgtgattttttgatagtgccctctttcactcttaaaagtgtcccagtttgggtaaggaggtatatgcccatcttaatttaatctctttatctcagagacattaattaggaagggtaagaagtgggagttatgagaatgtatcaaagggaaaatgatactccagttgagacagtgctggaaccaaaatgctgctgatctgaattctccgtaataagatgagaattggtttgcgaacacattctaaacatcacaagatacatcagattaatgctggttgctcttggggagttgtggggaggaggataaccaggtcaggagtttgtggtatcttttatgcaacactaacgttaagcttcctgtctgaggttttccatgttgtgagttttcacctcttgatactctttgaggactagtgatgctgacatctactagaaacacttcagagaaaaaaaaagatggaagataatagttctttagaaaaatggaaacatttacattattcttgataactttgttcttctttgaaaaagattagctgaacatccctgctgattaccttaataatctactctgaaattaattttatctactctagaaggtttgctgtggatagattctcctttagagtcctccagatttgatagctattattttttaataatagttaagtgcctttattttgtttaaagtactgaaaactgaatcaggtctcaggaactagttatgagcaactgattatttagctgggaaaagaaggtaaggaagaagaatatttgaacaaaggcctttaggtttttataaagacattatgcaaagagtgataaccatctttcttacaacctcttctcaaagtaaagcaagggggctgagcttcttgtggacatttaagtttgaatagggtactctcctgaaggcctttaaaaatacagtagcttgtctgtttggagtttagcaatcaatcaatcaagtcttgaacacctaatgctgcgctaagaattataaatgaactagaaggcatactcttttcatgtcttcaaatgacttaataatatacttggggaaataaaacaaatatacgtgaaacagatcaggtctaaattatgtggtattgactctatgagttactaggatgaattggcattcaaagagcatttaatttgtgccaaccaatagaaatatctcattgtgttacagcataagaaagatcaggaagccagaaacaagtcttagtggatggcagaaaataagaatatatacattcatttctacactaatgcatctattcagtatttcttgaggacttactgtatactataggcacataggagtgagtaggtacattgttctgagtagaacttatgtgttaggaaatagggaacaaaaaagtgggaggacaggtgggtgtgtgggcagagtatagcaataatattgttaacctatgcaaaggttaggctgattctgaatagagcaagagtttataatggaagattccttttaacacttaaaattcatgaaacgaagagctcaaagaaaatcttagaagccatctaatctactctcctttccctatctccacttgaaaaatggggacttaagagcagagctgttgcgacttgcctgaattcataaaccgagttagtggcggagctgaaagtcgagcctggctcttctgtttttaccatttgcagttgctcccacccctgcccccattcatgggttccacatccatggattcaaccaactatggatcaaaagtattttttaaaaataaataaaaatagcaatacaataattaaaaatagaaaatgtaaaatacggtataaacaactatttacatagcattacattgtattagttattatacataatctagagatgatttaaagtatatgggagaatgtgcataggttatgttcaaatactatgctattttagattagggacttgagcatcttggatttttgtatccacaacgtcctggaaccaatccttcatgaataaggaaggacaaataaatatatccttctgcctcttcagtcttaaagttagctaaaacatttcacttccccatgccaactctgtgaataccagatcttagatcctaaactaaaggtttggaaggcaatcattattcaggcataggtaggaaagtatgacttagaaaatgaatctgtttcgtgtctcaattttaataaaagtcttgtttataaaatgatgaaaggctcaatgagattaacaacatacaacttgtaataaatgttttgtaaccatgacactgatgagctgtgttttagacctagctgtcactaattggctgtgtgatttttgcacaaattatgtctcctcttttgtctttatttatattatgacagaatttaaattgtttcagttattttattactatatagatatctctctcttaaaattgcttgagtacagcacagacttcaaggaaaaaatttcttatgattctcagtgttcacataatttgtattaaatgtaacttaaatatgtgtaaaacaagttgtaaactatgtttatagctcttatatatttacacaaccaaaataaattttaaaataagttgtaaagcccttaacattaaaggtacaaatatggaaattactgctatagcatatacttttggggattcaacaccttttgctgcttaatgccatatctgattaaatttttccaagacttttttctttttcaactcttctgtgaaacattcctttctacagtattactggatctagtttgaacttcagttaactcagatgaatcatttacatattaaaagtttacctttgttcttctttcactaaccttagacaactaaagttgtgatattgggcaccagtgaaatcacaggtagaaactgtggcactgaaactgcttgtctgtattcagttataaaatcatacatataatctaaaatatgaattcttatacattttatgtcattaaaattaaggtaaaattgaaaacagagttaaaaacttttcctcagaaatcggaaacaatctaaatgtccatcagctgaatggatagacaaaatgtgctgtatcaatacacagcctaatctaggcagttcagcagtaaacaggcatgaactgctgacacatgccacaacctgaacctccagactcaacctcggaacctccaaaacattatgctaagtgaaaaaaaaccaaacacatgagaccatatatcatatgattccatttatctgaaatgtctaataaaagaagcaaatctatagaggcagaaaagtataatagattaacagttgtctgggattgggggtagtaattggcgtttgattgtaaatcagcatgacagatcttactaggtgatgaaaatgttctaaaactgatttatggtgatggttgcaaagcttggtaaatttactaaaattcgttgaattgcacattcaaaatggtgaactttatgctatgtaaaatatgcatcaataacgctgttttaaaagctttttatgaagacttctagatctcctaagaatatttaggtatcagatattttcgcccttgacccttccaaggtcagaagacacagctgaaaaaatacttttagtggaaccaaagaatggatccagtaactacagtatcgtggattctagctttgactttgtcactgactgtacttgggcaaggcctgggcaagtcacttaacctctttttgctttggtttccccatctgtaaagagggtgttagtttaaatgttctccaggatttcttgcacacatgagagtcgcatcctcacatttctgttatctgtgaatctctacctcctaatgattccccctccctcaaatactctaacaaagcccctttattcagcatggcatatgtggcatattgcttgtctgactaattcttgctcacgcaagcttcctgaccttactgcataggtctttcaggtacacagttctcaaagtgttgatctgaaagttccgtacaagactggctccccatcactcattaatctcccagaggctaccttctcatcctatgtaactctcttatggaagctctcccatagataacaatatacttccccttcaggcagtacatggaagaaacaatgggctatacaatggaaccatcctatgagattacacagaatgagaacctggcccattgttttctcctgctgcctaaggaaggagttgtgctctttggatccctgtacagattttggcttgtccacctccctgaattcccaagtaacaattaagcaatctgcctccttccgtcttctcatttcaatgtgtaggatatttgtcaacttgcccagagttgctgtaggcattttgagctattcatctgactgtgtgcaatagataacaaaaatataattaggaggaggactgaattaagtctgaattttatttttatttttattgcgggggagaggtgcttactttagagtggtaaaagttacttcttgtccaagttttcatcatcccctccttccctctgtgtttcaataaaatgtttccaaagtttcaaataaaaagtttattaaaatagaggccgtgtttttaaaaataaaaatgtaacatcttacttcctagaggtatctgaagaaaagcactccaggagtataaagaataaactagatggttggaatgtggtttattagtccacaaacctgtcaggaatcttggactcttttcctaaagctatgcagacatacaacataactttggaagaaccagttaagtttgtattctaactatgccctgtaatttaggaataactacctgctaaacactgaaaatctgttggtggaaatcatcgggtaaaaccaaagcataagttatattattaggggttggtaagtggttttgtatatgcaataaaaaggattagatggctgggcgtggtggctcacacctataatcccagcactttgggaggccaaggcgggcggatcacaaggtcaggagttcaagaccagtctggccaatatggtgaaacctagtgtctactaaaaatgcaaaaattagccaggcatggtggcacatgcctgtagtcccagctacttgggaggctgaggcagaagaatcgcttgaacctgggaggtggaggttgcagtgagctgagatcacgccactgcactccagcctgggcaacagagcgagactccgtctcaaaaaaaaaaaaaagattagatatttgaagaaccatgggatgggtgtcccgttaactgtccatagggccaaggaaaatggagaaagatgaatttgaaataaaattctctaaaaatagctgaaaaagaaaaacttagatatgtaagtgttttatgatgtgaacattcaatgaacagaggaaagagatgtgcctaggaatgtttggtgttgaagatatttacctttttaataaaagagaacaaattaaacaagcagtcttcctttcttgtaggaactgtatttcagggtaattacatggctttagttgctgaaggaaagatcttccttatagaaaaatgcctgctgtctgggtacagtggctcatgcctgtaatcccagaactttgggaggccaaggtggacagatcacttgatcccagaaattcaacaccagccttggcaacatggtgaaaccccatctctacaaaaacatacaaaagttagttgggcattgtggcacgcgcctgtggtctcagctactcaggaggctgaggtaggaggatcgcttgagcctgggagtcagaggttgcggtgagctatgatcgcgctgctgcactccagcctgggtaacagagcaagaccctgtctcaaaaaaagaaaaaaaatttcctactaataaatgtggaaagagtggtggaattagaaaaacatttcataaactccaagtattgattcaggaaaagatgataaagtttgttacacctttaggtgaatgattaatgaaactgaacatccttgtaataccaaagtaacattgcactgatgactgtctaattgaaggagaaaaagtaactgtacaatggagagatgagacatatcaccattctaacttagtggtagattttaccatggctgatggtcagtcatatattttgccttctgatgtgatggaataggaagtacacatcccctatggtatattcaagcctaaaatgtttaacttgaatccagaaatccttggatatagtgtccagtttataagaaacacaggggatggagaatcaagctaaatgatacaacaagaaaacaaccagacaaattcagaggttgagacattctatctgataactggcctgacctcttcaattagtcagtggccttaaaattaaggggaaggagtagtcatgctagatttaaaacagcttaggaacatacagccaaatgcatttcatcatactggattagattagggttggagcaaaccaactataaagaacatttggggtcagctggggaaatgtgactatgggctgggtattgtttgaaatgaaaatgtaattaaatgaaaagatggagattattgacttgaaaaagcagaggactaccaggaagtaccatatctcattttgattaaaaaatacacatgctgtatgtatgtgtatatgtgtatgtgcttatgtatctgtatatacatatgatcatacatatgcccagaaaaagacccagatgcataaactttaagagttcaacattggttatatctggtagtggaagtataatcattttgtttttaccagtctgtattttctaatttttaacaatgaacgcggattggttctataataatgaaaggtggttttttttttttaaacaaaaaaacccctaccttttcagatagaaaagcagcagtgtattctttccttcaaggaaaatgaaaatgtttccttggaggaaagaagatataaagactagaaaacactctagtatctttaaaaaccaccaagctttcaaatacaaagatttaacatatgtaaactgtattgtacttcatttgaaattcagtatctttactaaagagatttcttttatcctatcctacacacgtacagtattatttaatgatgtgcacacagaactctgccagcctgaaacagtaggtctaagacacgtttgttgtttttggctcccctgtgttgatctaaatcactgcctagtagcccttggaaatttctatcccaaaacgtcccacaggtgcccaataccatggattctcattccccaagttcattctcactcttctctcttggttgagtcttgcctttcttcactctgttccctttccttgttcctgccatccaaagcttctctgtctttcaggctcatctcagatttcctctctttcctgaaggctttttggattccttccatctccatgcacagtcagaagggctctgttcatctctgaatatctttcgcactccattgcatctggtttaaatcccttctctgcctcttattagctatgtgatctcaaaactcaatttctttatctgtaaaatggtgataataaatgacttcgcagggttgagggcctcaagtcagtggcgagtactgcagtagaggcagaatacatagctcaacagaaattactctagtaatggtcatgattgtttgcacttctctcaaaccacctactcgtatattagagtgcattgtgcttgtcttatcctctttactaaaagtaggaaaatggcttgagaattgatgctcagtcttatttatattattctatccctagttatgtgatacttaactgtattgctcggtatttagcagcccattatctaatcataacatcaccctcattctttctgagcttgtttcctttttgtgaaatggggctaccattcaatctcaccgaatttttttttttttttttgagacagaatcttgctctatcacccaggctggagtgcagtggggcaaactcggctcactacaacctctgcctcccaagttcaagtacttatcgtgcctcagcctcctgagtacctgggaatacaagcatgtgccatcacacccagctcatttttgtatttttggtagagacagggtttcgccatgttggccaggctggtctcaaactcctgacctcaggtgatccacccacctcggcttcccaaagtcctgggattacaggtgtgagccaccacgcccagccaatctcacagaatttttataaagtctagacaaatttttattttaaaagacttagcacagcccctgacagcgtaggcactcaataaatgtggaatctgaatcttacttaaagctagtttatattttcaagtcttcttacttttactaatgctgctttaagatatattctataagttcaaatgtaaagttctagattgggaaagaatttataatgtgtctaataaagattgttagagacaaacttttagactgaaccatctactattaatggactgatgaatcttaccggaaaataaacataaaatatactctgtgttgcctgtggtttaattgccatcaaaattaagtttattatgtactgatttcacagttacattttattttcagtcaaatatctatttgttggtgtgaagaaaatatgtctacttccgctaagtgaactttaaaaatttgtacttgcttttgaagattccatactctatataccgtctcttcctgaagcgtatttatgtagctcctgttaacataagagcgataagagtgttgcttgatgactgctcttattgctttattaaagtgtcatgtaagatttaaatatttgattataagaattcataatataattttgaaagcctactctgttccagacgctgatttatttaaatcatctctaattctcacaactccgaaaagataagaaaacagagatgtgacaaggcttgaatgcaaacccaggtctgtttgactctttgttcattttgaataaagacaaattactcaaagctttactgccaaaaactattatctggttccacattgaaaccctattcaatagttgttattattttcttcttttgctttgaataacctcccagcattgttgtgagtttcaaacgaaataaaaacactatacagatccaaggtgtttttttttagagtattgttacctcaaagtagaaattttcaaatagtaatgttatcattttcttaagagcaaggaactttgtcaatagaaacaaaaacatcataccagaagaaccccagaatgctgggatgactcatgaagaatctgtgaatgaggcaagagaacattcgtcagcaaaatgactccgtgaactgatgttcaaatattatcaaattttaattaccgagtcataattgagtacttactttgtagagagcaccatatctaaaccctgtggtgaatgatgacattttcataggtaattcctccacattaagtgattcatcatagaaaaatgctttcatgctgatgacttccaccatgactgttggcattaaggatcattgacctgaagaactgatttgaacgtcttactgcatcattttaatgagatagagcatcgtttggagctttggactgggaatcaagaaacctggtttctagctcaaactctgctgctaatttatctaggtcatgctttgggcaaatcatttcattcctctggaacccattttccttatatcaaaaattaagagttggaatatgctaatctccctcctattaagtttcgtgagcccgtgatttcaacagtacgtaaatttcctttagtacagtcacagaactggtaagtgacaccagctgaaactgagtgcagctccgcggctctacgcttgctgtagaacctttgtgaattcccactgtgcttcaccagtgacaggatgtgctacccaataaatctccatataactgatcttgaaaaattcattgataaaatctgaaaactgaaaaagatacatgttttagaggtttaggtttcccacaacatgaaaatgtgtcagttgataatatagttcatggtattttactatgctagaaaacagcttactagagaatttcagatattacatgcaacgacaagttaacatagtttaggtgggacgtctttggttcaaagttacagtaatttcaaaagtgtttagttgatccctagaaagtggttaaacaggttagtctctttttcaggtattagagggaagttaacttttgaagctgggcagaaaaggaagttttcagttggttttttccttttgagacttttaatttatcatcagacactattttttcagatgaaagtgccttttatactgtcacctaggtatgagtcaagtatgaaaaggaaatagtaactcaggatcagaacatgaataagtatgcaatatggagaatttccattaaattttaaataaatgaattacagtcatattattcagtatctcaacattaaaactcaaaaagaccttaaggattattctgttttgtggaaagggctttttctgattctagagatgagaaatgtggacccaaagagttgacacagtaggtttgtggctgagccaagacaaaaacgtaaaacctaggctttctggctccaatgtcagtgttcttttctactgcttctgagttaagaagacctttttttttttgataccaaagatacatttactggagttattggcttctttttttttaagacagggtctcactctgtcacccaggctagagtgcagtgatgcgattacagctcactgcagcctcggtctcctgggctcaagcatccctcctgcctcagcctctcaagtagctgacactacaggtacatgccaccatgcctggccaattattttatttttttatagaggcagggtctcactctgttgcccaggctggtctccaactcctgggctcaagggatcctcttgccttagccacccaaagtgctgggattgcaggtgtgagccattgcacctagcagcattattttcctttaaatcaaaataatataattgtttaatataattatgtccataaaatatattacttttgaaaatctgaacaaaattacagtttttggttaaagaagaatggatttgcctttcaaaaaaatgatacacgagagactgaggcaggagaatttcttgaatctgggaggtggaggtaggttgcaatgagcctagattgtgccactgcactccagcctgagggacagagtgagaccctgtctcaaaaaaaaaaagacacagctgagtgtggtggcgagcaactgaaatcctagctgctctggaggctgaggcaggggggtcacttgagcccaggagttggagactagcctgggcaacatagcaagaccccggtcaaaaatttttttaatttaaaaaattttccaaaaggggcacagatacattgaacattgaccttcctttgtctgcttttatgggactatccggcttgttgtgatggttgtggtgaaatttacatccaggatacaggattatttgttcttctcaaaggagtgtcccattggcccagcatttctctcatgttgtctctcccctgggactatgaagaaaccctgaactgatgcaaccaccacttgaaaataaagttccaagccaatctgaattgcactaggaaaaggcagccattcttttgggtagggggagaagtgagcttggctggtcattctggttgttagcaattatctggcttccgtgggagcatcatccagaaatttacatcttattgaaacaagaagaaaatggatgctattatcagttcgttaggtctctaaactccttcttgaatgatacatgtgatatggatgtgctgttctttcattactctcatcatcaacaaaaacaatatgtgtgttttaatgccaaccagggactctgctaggttctagggatgcaatgagatctaaatgcttaaccttttagaagctagcataaatgttagtagcacttacagcattaaatgaagcagatttttaaatgaggttatagcaaaagaaaaaaatactgtacatacaattttataccaatactaacatagcttatttcacacaaaagaaaaagctatttaagcaattttaaaaattcatattcattctagagaataaattccaaatttatagcaaaaaaagagtgaagttttcattagctttcaagaataatgcaggctccaaagtatttaatattctatattatgggaatattttatgtaagtcatcccaacaccaagtaatgctaaaaataactttatataggttcaataccatgattttattaactatagatttttagaccttttcttactttttgttattgaatcattcacagcttttattggttgaattgccttctcctaaaagtaccaaagtgtgaagagtttttatggctgagtaatattcagattcttgtagccaaagacaggttctgtgaagtaatattgaagactaaatgttgaagagtagctttctctaataccaagcggtcaattttttcaaatatcatgaactggggtagagttaagttttcatcctcctcattatagaatcattcctcattatccccattctttctcctgctgaggatgtggtggtgtactcaaagtcacatccatacccttctgtctccaaagtcctaggagagatggccctcttctcaacctctacattgcacagaaccttacatccctcaacagaaggagtacatagtgcataaggaaagtggtcttttaccactcctcctcactctgtaacattaccaaggactatcctgcaaggggaccatccataggatgaatagcaatagactgctgcattgacgtgcaaagtgctgacaacccattggtgtacaaagcaccctaagcaagatctaaagttctaagatcttatcatgtaaatcaccagcatgctgttttatgtatcttattgtaatatccttccaatcagtattataaagggcaggacactgggggaatcttaaggctttgaagatagggatagtcacgtgcatgtcttataaattctctgatgatcatatactgtttactggtagtaatgactgtacttaaacaaatatattgtttctcatatcattgcatgccaattgaccttcaagtttaagccaatgaaaagatcactcttttaagtatatttggataattttgatatagttacatgtgaactcattaagtatagaaaccttggcttattatttaccacctaagcctaggtcagtacctggtgcttagtaggtatttgatgaatgatgggatgaataaatgtggaaataagtcttttcagtatctaaagacaaaacagatacataataagatacaaatgagattggctcatctatctttattttcattcatttgaatgtccatgtaagcaagttatttcttaagtgacccagcactgcagtgcaactatcattaacataaaatatgattaaataatccacattgtataactgttttgttagtaatgtagggatgctttgcgtgttgcttggtttgtgtatgctgccaaaagtgtaagcaacatttactgagctgctatgtggcaggccctgtgtttattaaaattgtagtttttgctaattgactgttttttgacacatccgtcttgttcatcattgtctacctagcacctagctttaggcttgccacatattatattggcaatgaatatttgttgaacaaacaaatgcatgaaatgtaatgagtaagacaggttttcgctttcaagtaaaacatagtctgggggaagacggaatgtcagaatgtggtgggtgctataggagtaggtgttatcagattctgatgctatggaataataaattgttaaaatatgtaatcttatgtttcagaagctaaagcacagtatgggaactattagaggcttagaaggcctcactacccactagactcagaagttgaatagtgtctgagaaaaaagagaatagaagtaacagtagatgaagagtccagaagtgagaccctttgaggacatgaggacaggtggaaggactgcatctgtgtgttgccaaagagtaacagagactggtataggacttgagttcaattcagtcatatccttaagtattgtgccatcgtgtctggattactttgtagtataagtaaatttccaagcatggggaggaaaggagaagctcctttattgagaattcaactgaatatagagaaaactaattttacacaactgtaatcactgtagtcatttggacaaattagcaaacccaagttttgctttaacttggattgccttaataaagatgttttggggcttaatggcacagttgctcaactcccccactttattccgtgatgttcagacccagccagcatttccccatcaggctcttgcaccatgattgacagggacacttttactagtccccttgaagaatgaatagttactcaatggagattaaccagatatatatttattttactcagaatatcacgataagtataattcagagaattattgccttctaatatactgccctgtgtgggggcgtctttgaaagtccgcaaagtcactgcaattctaataggccactcatgtgacaagacctgctcccacatcggtaatttggcacagctagtatttctccttgccaaaaagggcaaaggccttgagcaagaagccagctttttcctgattacaaaactgaccacaattcctcgccaacctaacagcgtaagtctatttttttctggtggtgtgttattcttctcatagagaactccattttttcattatgacatagcacttatcgtttaaacatcaattgatgttcaaacatcagctggtgtaacattgctgcagttgctattgatggataagctgaagtttttaagaaagcaaacccgatgtataaaattgaaaccatatcaaacccttcttcattctctcagctatttaattttacagaatttagatagcagtcagtatcattttgggcttcacaaatcagtagagtaagtaccttaggaatataacatttcagtagcatgctgataccaacgtttaaactatggatacatatttgaattccaaatttttcttcaaataatgtgattagagattcaaccaggaatagacaccgaaagaaaactttgcccaaataagctttctggtatttcataagcaagagatttaagttttccatttaagaagcaattgtgaattttacaacaataaaaaatgcaagtggatattgaacagtctctgctctgataattctaaatacagtacagttcacgcccctcacaagacactgaacatgtgggtcaccggcgagacagtgtggcaatattttccctgtaatgtaccaagtcttgccaaagcagtgaacattatgacacaactttttgtcacagctggctcctaataggacagtgccagccaattcaagcccagtcctttctgtgtttattcccatctctcccaaatatttggaaactgatgtcttgactcatgggtgtattcacaaattctgttacttcaagtctttttcttttaacggattgatcttttgctagatagagacaaaatatcagtgtgaattacagcaaacccctattccatgctgttatgggtgaaactctgggagattctcctattgacccagaaagcgattccttcactgatacactgtctgcaaacatatcacaaggtaaagttccttccagatacggctattggggacgtgggggcatttatgtaagggtaaaattgctcttgtagtttgtcttccaggttgtgtttgttttaatactatcatgtgtacactccagtattttaatgcttagctcgttgctatcgcgttcatttaaaaacatgttcagaaccttaaaaaaggaaacctaacctaatctattttatctctgtgcatggctcccatttcctgaattttaagcattaaaggtatagttatatccaaaaacaatcctgttcatttttatttcctgagtttgcatagatttcccaagaatacataagggctttttagacttgaagggtcactttttcctcttttcatctcatatgttagagatctctcataactgtttttatccctcttgcagcacttttattcctcttgaagtactctcagctcttttctgttctattttgaaatctaggtattgtgtgtgcacttcagctctcccaaagaattgtaaattcccagagtgtaggaccaagtggtgctctttattagatttcttaggatacttcctagcatagtgcctaatgcattgcagaatagattgtcggaaccttgaaaaatatctgttccaagcatcacattttatgcataaagaaaatgaggtccctaaaacagtaaatgcctattgcaagtgactacctattaacttctcttcagatgtgtcagaatcagatacctccttttcaatatttctttcttggccattgcaaaatataagttctccatttctatagctccttctactggagtttcttagcacagccttttctgttttgtattgtctcgtattgatgtctatatttctattcattttatttttctcttctcagattctgtgtaaaaatagattgttagctagtgtgattcatgttttataatataagtgctaaagcattaaaattaagtcacttaattgctgaaatggatggctttacattttaaccttttaattttcctggaagcctgaagtttgaacatattagtcaccgtttttaaaatataaagctttttaaaaatgagtaagaaaatgtttcctgaagtactgttttattttattacagtaatttgattcaacatgtatttctatcatctaagcctcttaactaggagttttgttttattccataaattgttgttattctgtttttctgcaagccataaaaattgttgctatctttcttcagttattaatttagcctgcctcagggcagaatgtcctggctatactgtgaaatagttcttgagtcaaaatttgatagttttgtctattttgaaagaacatgtctagaatgcagtgcaacaaatatcaacaaataggttaactgagaggcaagtactgtttgtggtaagggatggttatgtgattcaagttagttttcattctgtgctaatctctaattttatgctttgaatttactctgagtttaatttttttgagtctcaatttcctctaaaagaatgatccagtacttttcttcctaattaacatagtgcagaatgaaattattagcaattaaaacattatattttgtaccaataatttaacccttgtcttatagggtctctggctactacttcttcataagcactgtttctctgttaaaaatgtgagctcctaaaggcccaagacctatgattgttactcctattgcattttgtaaatgacctttaaataattactccacctcttccaaaacagacagacttaaaaataaattagctatatgatcatcattagccgaggccagcagagttgaacactgtggagttgaggtatttggcatgggtacagtagtcctcttaggtgctccttcttcctcatcataggcaaagtgaaattgggggtgttgcaaatggttgggtactgctatttaagaaaaagtggcacatttagtgtgaatgactcagatatccaggtagattggtcatattcatgagattaaaaatctcgactacacttagccactatgcccaaagaggacttccatactttttccaaggctccatcattgctgtgacccctttatattattcccctttctctttttatcaagagctcctcaagcaaccccaagtaacctcatgctggctctgaaaccatttccactagtaaaaattggcaagattgaagggaagcttccacaagctcaagctgaatatgcctcctgcttttagtgccagacttagtcctgtgtgaattctacaattttaagtcgttgcaccagagccttgaaagatgatgacacacttgtcctttggagctgattgagcaatggaaatatgccttagagacatgataaatgctgcaatagacaatccttcaaaacgagtctctcctgagataggagtgagtgattgattgcatgccatttttattgagggatacttaatctgtggttacatatctccaggcaactgtatattcagaaacatttagataactgaccaaagttttcacctttccagaagtttaaagggacccatgtagtaccagggaatataaggaccagtcctttgttggccacatatttgctgtgtgaatttaagcacgccatttttcttctctggccttctgtttccacatatattaacagaatacacaggattaatgggaggattaaatgacacaatacttgtgcaagtagatctaaagccctatatggaatttattgctttagccttgtagcgttaatcacttgtggctagaatagaaggctccgtttaaaaaaagaaaaggctgggtacagtggctcacatctgtaatcccacaactttgggaggccgaggcgggcagatcacgaggtcaggaggtcaagaggtcaagaccatcctggctaacacgatgaaaccctgtctctactaaaaatacaaaaaattagccaggcgtggtggtgggcgcctgtagtcccagctactcaggaggctgaggtaggagaatggcgtgaacccaggaggcagaggttgcagtgaggctgagattgcgccactgcactccagcctgggcgacagagcgagactccatctcaaaaaaaaaaaaaaaaagaaaagaaacctacattttaaacactttatggatatggaaaaacaaaaaccgcagaactctttattgcacaagagtaagtggcagttatatgaatgaagcggggcatccgcatgatctcctgtgagtgttttgagaagatgatcaaacttagagaaagcatctttgtgtctaatttttttaaatgatgaaattatttcccactttcattaatattttcctgtgaagaaattgaagttattctttgggcctaaataaaagtgacaattacatgttttcttctcagaggcattgagaaacttggattataatgtttttcatacactgaagtagaagtccagaaaagatttgagttattgacacagatcttcttttttttttgagacagagcctcactctgtcacccaggctagagtgcagaggcctgatatcatatttcaccacagcctcaacctccctgggcttcggtgatcctcccacctcagcctcactagtagctgggactacaggcgtaccttaccacacccagcaaatttttgtaatttttatagagacaggatttcaccatgttgtccaagctggtcttgaactcctgggctcaaggaattctcccgcctcgacctcccaaagtgctgggattacaggcgtgagccatcgcagcctgcccctgaattccataatttcacgtgtaattagaattcaagacctttttcttgaatattactcttgtccatattaatttttttctgagtatggctctagctttatcatttttttctgacttaactctgattaacctcttttttcatcaccagtacttggcagattttgtagatttctaaactctgaaaatcactgtttttctgaaaactgtcatttgtctcatactttcctccaaaattatgaattataggaaacaccccaaagaagtatcatttacattagctgtttacaagaaaatacagggtttcatttttaattttattttcccctactatctctaaggaatacaacttgtcttgaaagctccctgacagcagctatccatttaatctgccaattgcagtataaaaattggttattaaatgaaaaacaattgtatacctctcacagaggttgtcatatattactatttttgtcagcattctcacttataactctgttaggataatcctgggaaaatttctaaaatcttcatagctctttcgttaggtacatattccttgagacagaggaaatctgagcaaagtaaatttcttcattatcttagatcaacaaaagtgatacagagcttctgtcctgttagctccctttggacgcttaaaataggcactagaggttgtccagtaaatgcttcatatccatctactagtgctgaatatttgtgaaaatataggtgataatgaattagactcgtttgaatggaattaagtttctgtaaagttttaccagattgtcttttttttgttttttgttttttgttttggtaaaagcagttttgcacctgtaactaatttaaagacgaagaaattgcacatgtaactgatagcaactgccatccaactcttataacctcagaatcaagatcacgtggctatttgagtacacagtgttttaaaccgtgtaatttttatttgagcaagggattgccaacacaagatcgaggttcccacaagtggtgaatggcacttgtggttaacactgtaaagcagatttaaaacagtcaactgtcaattgcctacaagggaattattcctcatcacctcatgccaggtttttatatggccttttagctgaccttctaaatgagaaactttgccatccagtgcaaactgccaatagtcctaaaatgcctatctttattatcagtctaataatatttattgagtgccgattttcaaggcaccatagtgaatgctgtgaaatctagacactttttccctggctttcaaagctctttataatccaggcatattttatatattttaccttatttctcaccacattccaggcattggcctgtcttgctctgttcacactaatctctttgtcccaagagtaaggccgacccacccttgctccaagcctagtatgtcttgaaatgcctttcctaattcttccatcttttcaaatcgtccctgtccttcaaggtcagcttcaagtaacctctactccgtgaagcattctctgaattcattgctgttcattgctccctctctcctctaaactgaaaatgtgttcagaatatctctcttctgccgcttccactgccttcagcccagtccaggacaccgtctgtgcctggctgctagtctcttgatggggttttcagcttccatcctaacctcacaacagcctagtctcaaccggtcacccacagagatgatgctcaaatgtgagtcagatccgtcactccacccatagccctgcagtggttccccatttcacttgtaacaaaagtccaagtctggcccctacctcctgccctaccccagctgacccctctggtcttctctctctcttccacccactctgctccaagcacgccggcctccttgctgttccttccacattccagatgctctcctgccttcgtgcacctgccccagctcttgttcctgtccaggaccctcttcctctggcattctctgggccacctctgtcaattccctataatcttggctcaaatcttaccttagagtgagggtgaccttggccttccctatcctaggacaggggaattacatatcctccccattgcccttcctcctctactctacaatttcctatttaaaaagcatttatcgtcttctaacatgccatgtaatttattggtggattctatgtattgcttactgtctgcttcacctccctggaatgttaaccgcatgaaggcagagatctttgtctagtttgttcacccactgatgtattccaaatacctgaatagtattgctcattaatacttgctaaatgaaagaatagaatcctctaacacttacggcttctatcacacaatttagccctgagttcaaactgtctggtattatttcctgttttatgtattccctaagccaaatcatatagtcactgaagaaaagatccatgttttattctatattccacaaatgccaaacacataataagtataatcaggtcttgttgacttattaataccaagctgatctcctaaggtcagagactggaatatatttagcaaataaatacaaaattttagtgtatgttaaatattattctaaaaccaatgctaatataaacaaaccaagtactggatatgctacaaaccaggcacaaatatgttttgaattatctgttagttaatttgcaccgtgtccctccattagtttgagtagcattcattgaatatcatttgaatattaatttaaacatcatttgtttgtgagttacccaaatccctggcttcttctgcaaatctacccaccttttgatacttccattatttatttgaacatccaaaacacttatttgctagcaatgtttaaaaaagagtagcttatttaattagctaatatctaatatatgaagcacttaaagtattaattgcctgatatgtaataggtgccaaacacgtcagttctgtcttcttctcatctttaaaatggaagttaatacagacataatgtctccccttgggtcttttaagtcagatctttaggaaaaagtaaaatattctcattattcttattattttgcttgcattagcaataaagtatgcctgatttaagttcactggacattatcttactattatctatactttacctaaagccctgcctttagttttgtaaataaaattatagacctattagatagattgagcaagtttgcttagtggattaaaatatgatgctaataagagccaaagtgagtttgataatgggttggccagatttacacagaagtctttgccatttacaaagagttctgtttgccattgatacagtcacatttctagccacaattacccaagatatgtaaacagttaactcaggagaaaccaactcaattttcaggtatatgccatatacaaaatctcatcacctttgctattatatacacttagtattatttcttaagcaatatcatgtaatataaggggcacgttgatgacagggacatgtacctttttcttgggatttcaatatgaatgaccatccaaatcttgatcatcccaatggctccacataatttggacaccatgtctaccagaaagctatccctgattatttcaggacatgttagtatctttcttttccacatttctaaagtacttactatctctatcacgagtctggtctctgtacttccttctgctactaaacatctctcaccttggtaagcttctcaagaaccacaatactatgtgtttcttgtaaggcctgaaaaacaccttgcacgtagtattaggtgattagctatcttgatttaaggttttagattactgattgaacatttactgagctgaagatatagagaaagaaaaatgccaaagaaaataaaatgaggaagtttggaaaagagaaacacactagtaaaatatgatggtaacttctaagaagcaaggtttataaaatagattgttgatacaaagaaaacattataaaaaaatgggtagcttgaatggatttaacccccaactttatttaatttaaatggaatgcctcaaaagactactcagctgatccaaacatagtaacttcccaaacacaagactcttgacgtaggcctcagaatttggggaaaaaaattcctgcattgtttaaaaatacagtgtccttgtaaagcagaataggccttatatacaagccaaatatatcagttctaaagcaaaaacaaaacttttcctacttactcttttatttcttttttttttttttttttgagacagagtctcactctgtcacccaggctgaagtgcagtggcgccgtctcagctcactgcaacctctgccccctgggttcacacaatcctcctgcctcagcctcccgagtaactgggattagaggcacccaccaccacgcctggctaattttgtatttttagtagagacggggtttcaccatgttggcagggtggtctcaaactcctgatctcaagtgatccgactgcctgcacttttcaaagtgctggattgcagatgtgagccactatgcccagcctgcttcactcttttagataaaatgtacaccctttgaatttttacttccgccatttacactgatttgaagtccttggttgaatatgtatttagccttcactgtgcaaggaagctggttacaaaaacagatagtttattaaaatacttgtgttggtttttaaaaaagaataattttaatacagtttttctcttctttctttttgctctttttgttattttttaatagagacacggtctggctatgttgttcagactggtttcgaactctggcctcaagtggtcctcccatcttggcttcccaaagtgctgggattacagatgtgagccaccatggctggccttaatactgttttatgagttctgaattgaataatttttaagtgaatgtcctaaaattctatgacaatccttttaacacaactggaagagtttttgttggcttacttggtttgtctgcatgtttccttctgtcatcccccactcctaggacccatatggaacattctctcttaattaactcttttattgaagtataatatacttagaggaaaaatgtccaaatcattttcacaagtgaacatacttgcgaaattagcacccagacaaaaaaaaaaaaaaaacagaacaataccagcactccagaagccctctgactattctaatttctaactcattgttaagttttgcccagttttgaattttatataaataaaattacacattgtttactcttttgtgtctggattcttttgcttagcatttattcgtgagattaatcacactattgaatgtaattgtacttcattctcattactgtatagtgtttcattgtataaatatatcacaacatatttatcctactgttgatgggcattcagatggttttcagtattgcaaatagtactgctatgaacattgtcctgtaggtctcttagtgaaggagcgtatgcatttctggtagctatatgcttcagccaataatagagtatgttgagcttcaggagatgttgccaacagttctgaacaggactctagaaatctatacttctactagaagtgcatgagtgttctagctcttctacaccatcactggtacttggcattctctgtctttttcacgttagccattctggtgggtgtgttggtatcatattctaattttaatctccccttttctgatgtctaaaaagttaaacactttaaaaagcgtttgttgtccatttggctatcctttcttgtaaagtacctgttcaagtctttcacccatttttatattgagtactttaggtaaacgttctaaagcataccttgtcagatacatgtattgtaaatatctcctcttactctgtgtgctttttcgtttacttaataaacagatatttctaatcaatatagtctgatatactagatttttcttttacagtaagtgctttttatatcctttggaagaaagctttgcctactccaaggttgataaagtgtgtttttattttaaaagttttctggttttatatttcacatttagatccataatccacacagaattgacttttgtgtatgttgtaaggcaagggtttatctctttcatggggatatccagttgacctgcttcgtttattgaaaagatcatcctttgcccactccccagcattgacatttctgtcataaaccaggtgaccatataggtctgggatttattctggacttactcttctattgcattgtatttttgcaccaattaagattgccttaagtactgtaactttataaatagtttgatatctggtagtataaatcctccagcgttgctcttccccttcaagatttccttgccacttggcctcttgaatttccttataaattttagactcagcatatcaattaccacacaaaagtgccgagattttgattggaattgttctgaatctatagataaattgggagataattgaaagctttacaatattgagtccttcaatccatgaacatgaactatcctttcacttatttattctttaatttttttaaatagtatatttgagttttcattatggagatcttacacatattttgttagattttttcccctgggtatttgattgttttaatgctgttgcaaaaataatttttaaatttcattttctacttgttgctggcttatagaaatataattggtttttgaatattgaccttgtacccagcaactttgctaaattattttattaactataatgagtttttttgtggatttttaaaaacacagtctgcctaacatggtggctcatgcctgtaatcccagaactttgggaggctgaggtgggtggatcactttgagctcaggagttcgagaccagcctggccaacatagtgaaaccctgtctctactaaaaatacgaaaaattagccaggcatggtggcatgcccctgtaatcccagctacttgggaggctgaggcaggagaattgccctaatgccagaggtggacgttggagtgagctaagataatgccactgtactccagcctgggcaacagagtgagacttcgtctcaaaaataaataaataaataaataaataaataaataaaacgaacaacaacaacaaaatacagtcatgtcatctgtaagtaatgttagttttagttttatttcttcttttccaattattctttgtctttttcctttgttgcattggatggatttccagtacagtggtgagtagaagtaatgatagtatcattaccttgttgctgatctcaagaggaaggctttaaatatttcaccatcaggtatgatggctactctaggatttttgtttgtttatttgtttgttttttatagattttctttagcagactaatgaagttccctttccttcctaagaggttttttatttaaaaaaaaaattatgagtgaatgttgaattatatcaaatgctttcatagtttgttgtggtggtggttgtttttgagacagggtctcactttgtctccaagctggatcatggcgcattgcagcctcaacctcctgggctcaagtgatcctcccacctcagcctcttccagtagctgggaccacagcacatcaccacacccagctaatttttaaaaaattgttatagagacagggtctcactgtgttgtctaggctggtcttgaactcttaggctcaagtaatcctcccaccttggcctcccaaagtgctgggattacaggtgtgagccactgtatctagcctagaatattttttatagtgctcaggagaaagattaaaagtatgaaaagtgtctactatgtatactttaatatcatattgtaatacatttgaagatactatatggtataactaatgaaaatcttcaaatcagctcataaccactagagatctggctgtatctgttttgacacttttgttctcagtatctgtttagcttaagacccttgtcttctcattaagagtgcttgacacagtaagttgaaaacataatttcaaaagagcatagagtgtcacatggttttgccagactaaacaactctgagtaagaaagtggctttccccctatggtaatgccaagctactagaggaccttcagtggtaaagtatgatttaaaaccctgaccccatctgtcttttcccatttgcagtaagtcctttatagtgtttgaaggtgggcacagcagggaaacagtactctggcagatctgcggtggctccctcctttctgagtcattacacactcttctggatcattcctttcatttttccttttcctctcctctcccctattttcattcccctatcactgcaaagccaaaaccaaaacgtggaaggggacctagccgaggaaaacattccagcttcttttttctgatctaaacaccgttcttcttcttttttattttttaattaataactttatttttagggcagttttagtttcagagcagaattgagtaggaagtacaaagagttcccatatacttcctgtcccccaccacgcacaatctcccccactatcaacatcctgcacccaagtggtacacttgttaacagtcaataaacccccactgacacatcattatcactcaaagtccatagtctacattaagattcactcttcgtgttatattctctgggtttgtacaaatgtataaggacacatatccaccattgtagtgtcatacagaatattttcactgacctaaaaatcctctgggatccacctgttcattccgttctcccccaaacttctgactaccactgatctttttcctgttttgatagttttgcgcttcccagaatatcatatagttggaaccatacagtatgtggccttttcagtttgacttctttcacttaccaatatgcacttaaggttcttccatgtctttccatggcttgatagctcatttctttgcagaactgagtaatatttcattgtttggatgagccatagtttatccactcagctactgaagggtgtcttggtgcttccaagttttggcaattatgaatagagatgctataaacacctgtgtgtgggttttttgtggacttaagttttcaattgatttgtgtacctaccaaggagtgtgattactggattgtatggtaagaatatgtttagttttataagaaatggccacactgtcttccaaagtggctgtaccattcatcagcaacgaatgagagtttctgttgctccacatcctcatcagcatttggtggtgttagtgttttagattttagccattctatttgtagtggtatcttcttgttttagtttgcagtgctctcgtgacatatgatgttgaagatcttttcacatgttcacatgccatctatatatcttcttggatgaagtgtctattcagatattttgctcatttttaaaacagggttattcactttcttattattgagttttaagcgttctttgtatattttggataacagtcctttatcacagtagtccctgacctttttggcaccagggaccagtttcatggaagacagtttttccatggactggggtgggcaggaatggtttcaggtgaaactggtccacctcagatcatcaggtattagattctcatacggagtgtgcaacctagatcccttgcgtgcacagttcacaatagggtttgtggtcctatgagaatctaatgcagccactgatctgacaggaggtggagctcaggctataatgcttgcccatcagcagttcacctgctgtgcagcctgattcctcccaggccatggactggtactggtctggacctggaggttgggaacccctgctttatcagatgtgttttgtacagatacattctccccatctgtggcttgtttactcattctcttgacactgttttgcacagagcagactttttttattttaatgaagtccagataatcagttatttcatggttcatgtctctggtggtgtatctaaaaagtcctatccgtgctcaaggtcatctaggttttctcctatattgtcttcagggagttttatagttttgtactttacatttagatctatgttccattttgagttaatttttatgaagagaataagctctgtgtctaaattattattattattattgttattattatatttttttgcatgtggatgtccagttgctccagtcccagttgttgaaaagactgtctttgctccagtgtattaccctggtttcttcatcaaagatcagctgactacatttatgtggtcctatttctgggctctgtattctgttcctttgatctatttgtctattcttttgccagtaccgtactatcttaattactttaactttctagtaaggcttgaagtcaggtaatgtcagtccttcgactttattcttcttctttaatattgagttggctattacgggtcttttgcttctccatataaactgcagaaccagtttgccaatatccacaaaataacttgctgggattgttattgtgattgcattgaatctatagatcaagttgggatgaatgacatcttgacaatactgagtcttcctatccatgagcatgcagtgtctctccatttatttcattctttgatatctttcatcagagttttgtagttttcctatataggtttcatatatattttattaaatttatacttaagtattttacttttcggggtgctaatgtaaaacaaaacagacattatgaggaaaatgtaatgtctgtttgggggtaatgtgtttttaatattaaatttcgcttgttcattgctggtatataggaaagcattatgacttttgtatattaaccttgtatcctgcaaccttgctataatcacttactaggtccaggagattttttttttttctgttcttttggatttttttatgtagaagtcatgtcatttgcaaacaaagacagttttatttttaccttcccaatctgtatcccttttatttccttttcttgtcttgttacgttagctaagacttctagtatgatgttgaaaagcagtagtgagagaagatatccttgccttattcctaatcttagtgggaaagcttgagtttctcaccattacttatgatgttaactatatgttttgtttgtagatgttcctaagtttaggaagttttcttattttgtcaaattctttttctgcatttattgatatgatcatgtgatttttcttctttaggctatgggtgtgatggattacattaatttgttttctaatgttgaaccaaccccacataccttagctaaatctcacttggccatggtgtataattcttttcatacgttatcggattcaatttgctgatattttgttaaagatttctgcatgtctgtccatgagagattggtctatagggtttattttccttgtaatgtctgttttgttttagtattagggtaattctagcctcattgaatgagttaggaagtattccctctgcttttatattctgaaagagatttcagagaattggtataatttcttccttaaatgtttggtagaattcaccagtgaacccagtccggtgccttctgtttcagaaggttattagttattgattcaatttcattaataaatgtaggcctattccatttctctatttcatcttgtatgagttttggaaaattatgtctttcaaggaatgagttcatttcacctagattatcaaatttgtgagcatagagcctattatcctttaatgtcaatgagatctgtaatgatacccctctttcatttctgaataactttcattcattcttcacgtactagacaaagtagaatttcaactaaaccaaagcaactgttcaacagatttagccttagtcctaatcagattattagtaatatctccctttagaaatatatgaaggtacttttagcagaggaaccaagcttgagctagtttgaccataatgaatttttgctgaggaagcagaagaaatgtttatattggtgagggcataatcctgtaatcttttctgtgtcctgatacctcaggaccagcgtaagcaaactccctagacaagatgtggctcatgcaagaggaaatatgcttttgaaaatgaacatgggccaagcatagtgactcatgcctgtaatcccaacactttgggaggctgaggcgggaggattgcttgagtccgggagtttgagaatagcctgggcaacataatgataccttgcctctacaaaaaaaaaaataaaaataaaaaaataaaaataaaaaaattagatgaatgtggtggtgaatgcctgtggtcccagctacttggaaggctgaagtggaaggatcacttcagcacagggaggtcgaggcttcagtgaaccataattgtgccactgcactccagcctgcatgacagagtgagaccctgcctcaaaaaataatagtaaaattaaataaaatataataaaaaacatggtctttctaataccctttgttgatctgaatttgaaaatttcctgtgagaccttctggcttattataaagaaatttgcatctaaagatacatattggaatgtttcaatctcaaagctatcaatgggaaatcaaacttcagaaacattgaatttggttttgaatatagtctaagtagacaataaaatgaaaatacatttgtttatattgaagaagcaaatgacacaccaaatagttaatttctaatagttttcatttttttctttttctttttttttttttttttgagacagtgtcttgttctgttgcccaggctggagtgcactggcatgaactcggctcactgcaacctccatctcccgagttcaagtgattctcctgcctcagtctcccaagtagctgggactacaggcctgcgccaccacgcccggctaatttttgtatttttggtagagacagggtttcaccatgtaggccaggctggtctcgaactcctgacctcaggtgatcctcccaccttgtcttcccaaagtgctgggattacaaacgtgagccaccacgcccagcctctaatcattttcttaattcatggtgcccaaaataaaagattctatattcagagaaaccatgacagaatttaaactctagccccaatacctatttaacattgggcaagtcacttaacctttttatgtctaatatttttaatctgttaggtggtaataatacttgtgtataacaacataggactgtttacaacaagcacttaataattgttagctattgttactaaattgtatttctgctgatgggttccagagtcttttcctccttcactaaacaaaactcaggatactatgtgaaggaaaagaagtgagttggtagaatttattttttaaatgcttgagtcaaaaggagagccatttgtggctgaagcatcaaaaccattttctgattttctttcattctacttgaaactacattaaaattttctccaattttccagatgattgcatgataattccttttaagaggactttaacacatgtaagaaatagagttactccctctgttaggagaaatcatggaaagatattataattaaaagatagtgaattttagcttaatttttacctttatctaaataacactcgtacacagctacagctttcagtgaagaagagatactcattcccacagctaaatcccgctcctcataggcagtgattttacctctttcacatatttcttctggcatttaccttcctatctctagaataacatacttacattaatggccaggcatagtgactcacgcctgtaatcccaacactttggtaggtcaagatgggcacatcgcttgagcccaggagtttgagatcagcctgggcaacatggtgaaacctcatcagtacagaaaatacaaaaattagccagcagtggtggtgcatgcctgtggtcccagctacttgggaggctgaagttggaggatttctcgagcccgggagtttgaggctacagtgagctgtgattgcgttacagcacgacagcctgggccacagagagagaccttgtctcaaaaataattataataataataacttatactattatttttaaaattgtattcttatccattgacttcttactgtgggagataataatttagtccttttactaccatattcccttttccaaaacacatacttctccctcccctccatcttcacaatgtagttacttgtaatttggggttaaatcagttgtctgtgcttacattgtagtaactgaaagtgctgcttaaggttgagccaagcagtgtgctatgattctgtttcctctcctgcttagctatttacttttctggagttaatttttgtcacttagtcattgctcattttgttgtcatttcttgctatgtactcatcactaattcatcctcaaactctctgacagagtaataaaaactcctctgaaagtggtcagacatatcgggcattctggtttctcaggtgatcccacctggccttcttcctcctgcattttctctaggctgctctgtatctgtagcctgggactaccttccacctctctcctgtctttcagatcctttgtttcctggtcccatcttttctcttcttggttctggtggagaactctgggaaagagtacgtgggaggtaacttttctggatgccttatcattctgaaaatgtctttactctcatacttgatggacgatttggatgagtctaaaattctaggttggaaatttttttttctcttgaattttggcaacattgttctattgattttctagcttccagtgttactgttgagaagttcagtgtcattctgattcctgatcctttctatggtactttttttttttcctgtcaggaagtacttatgatcatctctatagaaggggtattaatcttgacagtgttcctttctgtgtggtttaagaaatcctttctctcttgggttttgttactgttttataaatccttgatcttagtcattctaaggttaaagaaaaactgaggaacaactcaggaatacgtttcaagtacatgtgataaaaggcaaatatgcagaggatgataactatatgtttaaaaaatgggaaaaaagagatagtcgcaaacttcaacataggttagatcatcatttctcaaaccatattccatcacatattaaactcctcaaatattgcacactgtgcttttttctctcttttgtgtattctcgtgaacattagcctgttagtttaagaagtctcacagtaaacctatttaaccttgcttaacctagcattgcctaaatttacttgatcaccagattttttttgttttgtttttaattatttttaaaggaacattattaacatatgtataacacagttggggaaatgccagataagacatagactttcctggctgctaaagagcaattaagcattggaatgagtaaccaagaggagctgtggactctccttttccagaggcctttaaaacaggacatctgttttaggcgtagtcctgtttaaacaatagggctttgctggcggttcttcctcttcctgtcccctagtggtagtgttggaggcttttagcccaccttttatatgactgtagtactctggtgactaatgtgtacacaaattactgttatactattaatattaattatatttattgagaacttattaagtatccagccctatggtaagtgctctacatacattatctaatttaatcctcacaacaactctaggagggagacaatattaatattctacagatggagattagatatgaagagatacgaacttccagcaatagggttggattggaacctcgggcatctgacatggagctgtgcccatccttcttcaccgttaatgttcaaaacagcaaacggcacaaagcaagcaaacaacatttgtatatctgtacttactatgtaaaaacaaaccaagataatgcttactttattagactattcaagactattccctacgccttttgattaattcagagttcatgacttttgttagaaacaaattctgttacagatttagttcttcgcattttattctgtgataatttgccatccaggaaatggttccttacatgagactttttccctcataaatttgatgacattcatatacattcactaaagacccccaaaaaataaatctggatctgtgaaaagtggcaaaggttaaaagtcccattttcagcatatttacatgtagtaacaacttgataacacagcgctgagaatgccaggctcagaggagccaagctgggctcccgtccagtcagcctctagctcaccaggaaaccctgagcaggtcactttgcctcattttctttatctgtcaaatgagaactcagatgatctcaaaacagccttttctgctgtagtgtttcaggatgattcttgtctctggatgtcgctgtcatgatgggagaggaattagtaaattcccaggtcagtttacactgcagagtgatcttgatctgcatgaatcagtaaggatgggctggataaacaagttggaaccacagttatgagtaccatgacattaactgaaacaaatgagaagggattgaaaaatcggcggttaagtgtcttttaaggtcatttccaacaaaactacaaaggacctatgaaaggcttttcaggcacgtactcttgttgcctagctgaacacatttctccaataaagctttcatttgagagttactcttcatagtacatcccctgcccccctgcctgcctggcacattataggtattcatgaagatttgttggaactgttaaataattgtttaatatagaactggaagatcaggaagaaataatgtttttctaaccagtatccagtgtaaagtcacaagtgtgggctatggagcttcagaccatctggattcaatgccagttctactgcttagttactgcgtacttttaggcaagttacttacttccaggtccatgcctcagttttcccatctttaaagtaaattataaatgcacctacttcctcgggctggttgtgaggattaaatgacacaatccgggcacaatatttggcgtagtactttgcacagatttagtgtcctgttagtattagctaatgtaaatatgaagaagatgtaacattttaccagctattctaatcatagcttttcttttcttttcgtaagggacaacataaaaccccaaaggtaaagcatatatttctggtgttcaattttacaatttagcatcttttccaacccacttccatactcccaaataataatgcctatcagattaaagaagttactttatttttgcatgaaattggttgtatttttgttgcactacttcatcctttgagtattgtgaaaagtctgcgcattgactataatagcatttaaagccaagtttgaaggtctaagataatggcacacatccatgtcctttgctcacaagttctgcctaaagactttagcctgcttgaaacactctaaaggttgtgaaattaatggatataccactgatgcaacacaactcagtgtcaccagctagggagttaagacatgttcttgttactgagaagggctgttgttcatgcaaatattttgttcatttgttctttcatgggtaattgcacggagtaacaaaaaacacctcctcaacttacagcttggcagaaacagtagcttatgttttctagagacaaaattagaagcaggctttctggacccatctctaagtcaaaataaaataaaatgtctagggaaccactgtgcctcccagtaactatggtccatggaataatattgtttaggtcaaggtgtcccagagtaaaagggaagggagaagggcaggggggaaggggaaaagtgtgtttgggcaatgttttcatagagatgaagaggcaagctgtttttctttcttactttgtcctttcaacttagaaaaataagaaaaccatctaggaccacaaccttcctcttgtaatcagcaaaagagaaaaaactgaatatacatcgttaaggggaatggttatggcttaagttgtattttattgataatgttgaagattaacattttttggagagaacttaagtcttaacaaaactaaactattgagaaagtattgttatttttccatctttagtagcaaaatgaaaatttactctactcttctgcataaaatatgatcatcaattggcaagaatttggttaaaaaaaaaaactgtgcatagaatatgcacatgggaagatagaataataagatgctgtccttttactccagactggaagtctaatggtggagatagttatccagataattatatctgagttaaaggaggaggtacaaagtgctgtgggaacacagagaatggagtgtttttaagttggaggattcatagatggttttacagagaaagtagcatttggactgggttttgaaagacaaacaggcttgtggcatgaagaggtgaggagtaggaagaagatacagcagcctcagtaacctgtatgactaaaagaggcagggcatgtttaacctgggcagatagtatgatatgcccagccaccagatatgccaagaatgggagcgaggtctgggataaccagtggaaataagactgaaaaagtaagttagggctgagacatagagggccttgaatgccaagctaaaaggccagtgtttctcctgcttttccaccagtatgcccttactagtagaggacagcaaaaccataccattcttgggtggaggaagggaggaatgaataggtggagtatggggtatgtttggggcagtgaaactattctgtgtgatcctctaatgaatgcatgatattatgtctttgtcaaaacccatagaacttggctgggcatggtggctcacacctgtaatcccagcactttgggaggcagaggcaggtagatccattgaggtcaggagttcaagaccagcctggccaacatagtgaaaccccttctctactaaaaatacaaaaattagcagggcatggtggcacacgcctgtaatcccagctactcaggaggctggggcaggagaatcatatgaacctgggaggtggaggttgcagtgagccaagatcgtgccactgcattccagcctgggtgacagagcgagactccaccaaaaacaaaaacaaaacaaaacaaaaatgtagaactatgcaacagaaagagcaaaccttgatgtaaatcatggactttaggtggtaataatgtgtcaatattggttcatcagttatagcaggtatactacactgtgcaaggtgttagtaataggggaaaaccatgctttgtagagaggggacaggaggctggggaagggctattttaagagctctgtactttctgctcaatttttatgtaaccctaaaactgctctcacaaaagtaaaggctactatgaaaagcaaaacaaaacgaaaacagaaaacagcatccttttagccatgagatgtactacaagtacagagttttctaggaatttcatataatatttttaaaaattacatgaacttttccttctttccttaacacatagatggctattttcacattaaaaattttcccaaaatttccacaatgtaatacacgacccctagggatatgacttttgtaataagaagcatgactttggctgggcacagtggctcacgcctatattcccggaagtttgggaggctgagccaggaggaccacttgaacgcaggagtttgagaccagcctgggcaacacagtgagatgctgtctctttaaaagtgaggttggggaggtgggagagagagagagagagagagagaggaaagaaagcagcatggctgtgattgataggaagtcactgaaattgtatgttaaaaatgaaacaaagcaaaattaaaccagtaaaatcatgagcaaccaatttctctcccaccccagatatttgtgcatccttattttcatttcccagtattcatacaaaagcatatccactacctttaactcactttgtcagcctttattctgtatgcagaaaactttgcaatagcatagtgagaaataggtgataaacccacctttgtggatattacagtgtagacaagggaaatatactttaatatgaaaataagttatactaagaaaagtagatacagaaatgaaaattaagcctgccaaggagacagacaaagtaaatggaatgacctgggttagacaggtttggacgaattttgaaacaaaggacacagttggatgggtgccctgtccttaggagcacagacttttttctggatgtcattgagacctagaatgacctttaactatcaccagtacacattcccctttttggtgtgcagtgttgacactgaaacacagataacttaaggttgtttgggtacttatttatgtagatagacatgtgaacccatacggtacctaattagtcctcttgaaaccacaaacgcgcattcacaggaccagtcttgtttatattttcaaggctttttttttttttcttttgagttggagtttcactcttgttgcccaggctggagtgcagtggcgtgatctcagctcaccgcaacctctctctcctgggttcaagtgattctcctgcctcagcttcccgagtagctgggatcacaggcatgcaccaccatgaccagctaattttgtatttttagcagagatggggtttctccatgttgatcaggctggtctcgaactcctgacctcaggtgatccaccctctttggcctcccaaagtgctggaattacaggtgtgagccaccgcacccggcctcagggcattttttcttatgaagatgacagccgaaatcttcaatcttcaactcatgcaaaagtttgcctttggagtgaatttcttggcaatctgcttggtaagaaaaagcaagtggtgttaaagtgagagcattaaaataaaattgctccaaaaaaatgataaataaataaaagaaaagaaaaaggaaaagcaagaggcccatgcacagatacacagaggagagtggcccctcctccataagcctgtttcatcaatgagagaatcaagagagtatgtatatacagaagagagtttcagggtcagtcttgagtttgcatcttctacttcctagctagaggaccttgaacaattcactttacttctttggtcctagcttgcttatctataaagtgggaataatatttcagattatgcagaagaaaaggtaggatgtaccgggcacatgggaagtgcttgatcaataccaatttgcttccctccttccctgccccttctgctgaaacttcacagctatctcattaagtcatcaatgtatttagtatttaataaataaatatttaacgagcacctactatgagacaagccctttgttagccagtggggatatgactgcaaacaagaaagatacgcctatgatttgatgaatcctggagtttatgagcagctcatctctgtctcccgtgtgagcagtcctaaatttacacagctctccactggtgtttttgaccacagagttaacatttaaaatacctatgactgcttttttggcaccactttgaataatgaactggtgtcaggtaaacagagtccaggtacctattgcagaaagttttccagtctgcaccctcggtggctcacaagttcacatgaagtgaaccaaaagagttttgttgcacttactgtgacaataaatcatgtttagaaaaatgcatgtggcatacatgatattgggcaaatgattcatgaaacttgctattctgtggccttagaatccatgtaagcatttttcctttgtcttttatgtgttttcttgtttctatctctgttttgttttgtttttgttttggggatggtttaaaattaatgctgggctagagtctgattttgacactctcgggtgtgatcaaatgtttccacatatctctctaacctttctattctcaatgtggggaaaactttctccgctttaagaaaaggtgtatccacagaaaagattattgagtaatttttcatagtacagaagtaataattgagtgatttttccctttaaaatttttttatttttgtattattttaagaacaaaattattttaggatgcaattaaagaagaagttcatttacctaaatttaatttgccaacttttctattacacaaaagcattataaatacaagtagaatagcaaaaatttcatcctaaagagaaaaatattttgggcttctaatttcaagagagtaaaattgtcctggaaccctgtgcacactttaaaaacaatcattaacagattgcatcaaactagaaacttcttcaccacaaaggaaataatcaataaagtgaaaagccagcctacagaataggggaatctgtacatctgatatgaagttatggattgcaaatcgtacatctgatatggaattaatattccaaaatatgtaagaaactcaacaaactcaattgcaagaaaacaaataacccagttaaaaaatgataaaggaatatccatttccagaaagaagacatacaagtggccaacagatatatgaaaaggtactcaccatcactaatcatcagggaaatgcaaatcaaaaccacggtgagatatcatctcacacccattagaatggctgttatcaaaaacacagaagataagaagtgttggcaaggatgtggataagagggaacccttgtacactgttggcaggaatgtaaattggtatagtcattatggaaaacagaatggactgcctcaaaaaattaaaaatagaactagcatatgatctagcaatcctacttctgggtatatatccaagggaaatggaatcagtatgttgaagagctatctgctctcccatgttcactgcagcattattcgcaatagccaagatatgaaatcaacctaagtgtcaatggatgaatggatttttgaaaacacagtatatatctgtatatatatacacacatacatatatacacatacagatgtatatgtacacacccaatagaatattattcagccttaaaaagagaaggaaatcctgtcatttgcgacaacagagatgaacctagaggacgttatgctaagagaattaaactgggtggtatttgacacagaaagacaaataccacatgatccacgtggaatctaaaaaagtcgaactcataaaagcagtgagtaaaatggtggttgccaggagctggagggtgagagcaatggggagatatcagccagagtttcagttatgcaggataagctctggtcaccttctaaggtgatcatctgctaagtataggtcaccttcagcatggtgactatagttagtgatactgtatggtatatttgaaatttgctaagacagtagatgttaagtgttctcactacacatattcatactcaaaaaggtaactgtgaagtgatgaatatgttcattaccttgattatgataatcatttcatagtaaatacgtatattaaaacatcacattgaataccttaagtgttttgtttgttttttggttttttgggtttttttgttttgttttggtttaggttttttttgaggtggagtcttgctctgtcacccaggctggagtgcagtggtgtgatctcgccttactgctacctctgcctcccaggttcaagtgattctcctgtctcagtctcccaagtagctgggattacaggcgtgctaccacacccggccaatttttgtatttttagtagagatgaggtttcaccatgttggccaggctggtctcgaactcctgacctcaggtgatcctcctgcctccgcctcccaaagtgctgggattacaggtgtgagccactgtgcctggcctgtataccttaagtttaaaaatttttgtctattatactcaataaagctggacaaaattttaaataaataacagcagtcattaacagactcaattgatgacctaatgtagaagttaatgagagcaggcctgttggcaaaaaggcatttatatggatacactgtatgtatctgcactgtttcaggatcctctattatgatacctgggtaaagggtgacttcctttctatcataaaacagcctagacagcactaagaaggtggtatgttcttttctgttgttgtgagcgcccagatgagattactttgccaaagactcttttcatttctctttctgaaactctgtgagattgctgtgttctctaggacttaacttcacagctagtctatttttcctttcagaaatgaccatggttgacacagagatgccattctggcccaccaactttgggatcagctccgtggatctctccgtaatggaagaccactcccactcctttgatatcaagcccttcactactgttgacttctccagcatttctactccacattacgaagacattccattcacaagaacagatccagtggttgcagattacaagtatgacctgaaacttcaagagtaccaaagtatgatgtttattttcacttttcagactactaggactagaattggactcatctctcagtaaccctgtaataaataatgctccagagactagaaatctaatagagaaggcattcaccattcatttattcacccatttatccatgaaatattaggtatctatgaaatgccaggaagggagctggcacgaggtcaatcttgccttccccgccccctccttccttcctctcttctttcctttcttgcttacttccttcttagggacattttctaccttgattacactgtcagttgtatctcaggctaagagtccatcatccaaactttgaattattttggccccttataagttaataagtaacaattccaagtcactttgtattatataacttatcttcactatattactgctactacagtacattttttctagtatgtcctttcaggagtttatactgaaacctacttttaagcacaaatttgttttaacattgtagcctattgataaattttcatgccattaactaaatcaacatcaaaacatcagactcaagaaaaactagaactgcactttttgagataaaatgtatttctgtgatgctatttccttgatttttatcatgtgtgggctgacatgctggttttccaaagccaccactatgtaattggcaatcattacttgacaagtaagaacttcctgtatttctagtggcttttaaagataaataatatgcttagttatatttatctatgcggttttcagttagagcctaatatggaaatttagtagccctgagcccaactagtaaaaggtagggcttacttccataagttccgccacgctctgtcaaagattatttcacaaaccacctcctttgactgaacactaatggtaacctgggctcatatttttcatgcacctcaagctaggcataccatgaccttttcacagtggtgttccttctgtggttcttttgcaagttgtttcaaagtacttataaaatggaatatttaaataaaatgtataatttaatattgtgatgaataccaaagacagaacatttcctagcaaaataagcttccttgtctcaaatcctctatgttgtctgttacagctgtagtattgcaggctactgggggtcatagaaccacagacttaattctcattcccattttatatttacaggtgaggcttagagatgttataacttgcctgtgattacaaacctttctttttcttgccttaactccagtgttttttcatgttccactgtgcttttacactgaaacaatacaaatacagcatgaaggtgtactatggtggcttgccctgttgcctttttaggactgttttcatgggataattatcctctcacatgtctccatacacaggtgcaatcaaagtggagcctgcatctccaccttattattctgagaagactcagctctacaataagcctcatgaagagccttccaactccctcatggcaattgaatgtcgtgtctgtggagataaagcttctggatttcactatggagttcatgcttgtgaaggatgcaaggtaattaaaaaaaaagtcttcaaagaaattgttgaaactttattatttcatttcagcagaaccccttttttaggtgatacaatatatgaattttttttcttcatggaagagtatcttgctctgtcacccagaccagagtgcagtggtgctatcctagcacactgcagccttgagcttctgggctcaagtgatcctcccacctcagcctcccaaaggatgatataagatttgaaagcctaagaaagtggataaaagttgggctgctttgccccacatttgtttctccaaattgattctttgagacactgatctaatttaatccttgcatcttgcagatttttacaaaaaggtgacttctccaaggtgtcatggcaagacagtgatgacctggaaccaggatgcagatttcctgcattctctagttgtttatttatttatttatttatttattttgctataccgtgtaatattgtatagacagaagattttacagattatttatatatgcatatctttggatccctagagcaatcctataagattggacttctttatggccacattgcagatgtagaaattacaggttagtaaaacttgccaaggtcatcccttagtaagtggcagaccgcagtctagaccctgactccttaggtggtgttggctctcaaagcagtgcctcatgtttccttattccagcatcaatgtgagccacatacacggacaggtaaggaggtataacagtgtgggaaaggagatactatttatcctcatctctttcctttgtgaaaagggtattttggaaaattcagacgtttagtaatttattgcttaattattaagaaaatatgtgaatccactcatattttgatatgcagtcttttaagataattttaatatacacaatgcaaaaatagtactaatttattatatacgcattgcacagaataaactgttcataaatattcactttataaaataaatacctgcttattgggctttttattcaacgtaaagatacagaacaacagttaggaaagttttaggacatcttggttcctaaatggatggtgggccaaaaaaggaaactgatttttattgaattcttactacatgccaaatactgtatgaggtaacgttttcatacatcagtatttaaccacatcctacccaggttttctcatctataaaatgattgtggctgagtgtggtggctcacgcctctaatcccaacactttgggaggccaaggcaggaggatcacttgagcccaggggttcaagaccagtctgggcagcatagtgagaccccatccctacaaaatttttaaaaaattaaccaggcatggtggcacatgcctgtagtcctagcttcttgggaggtttaggtaagaggatcccttgatcccagaagttcaaggctgcagtgagctatgatcataccactgcactccagcctgggtcacaaaagcaagaccctaactccaaaaataaataaataaataagtaaataaataaaatgacactgaattacatgatctctaaagtcccttcaattgaaacagtttttactctaaaggcaacctaatacagtgaaaagggacaaaccagaggtcagctctgccactttccaaagtcattagccagtcacatacacattgtatccttcatcaggccccccatatgtaaaatgacttggttagattggctacacaaggtcttattcatctctaagttctgtaatttcaaaatgacactttgaaacactctggcaagagatgctttcatttaaaacactaaaacccgtccgttctgtaatttaaaccaagttaaaatatttatgaccttatatgaaatcattgtattaagtcagttatctaagatcttgatgagtagtaagaacatgtcattttattgacttagattttttattgaatgttttgtggttttattgagttttattttagatttaatgagttagagtttatttttactgagttggataccatttttgagtgagtaaactgttgctaaattctgagccatatttatctgaagaaaccattctgttttggtcatgttgataatttacaactataaataaataaaaacagcatggttggtttaaggttccacaataagttattgttttttatgggctagtaaagcacttagaaaactaaaacttttaagcaaatagttccaccataatcctattagtcacaaatttgtggaaagctaacattactgaaaacagctgaaaatggaaagacaagaacattgtcagtagttggttatagtgataaatctgagttctgagggcactaaaacttaaaagcaagcagggaagaagagtagcaaaaagagaagagagaggaggaaatccaagtgccttcaacttaggattagaaagggtagaaagcagggagggagaaaaaatacttaataaaacctgaagactctaggggagtccttaacctatcatagattaaaaagcaaacatagaagaaaactaagcgtattgtatactaacctgcagtaatttgcaaaccatccaaaatgtggattccagaattcctagactaaaatgtaaggaaggttttactcccttggaaagggaaaatagacatctacacgttttaaaggtaagaataagaaaaatattattcttggaaaatttaaacatttagtaatatactacttaatataaagaaaatatgtgaatccacttatattttgatatgcagtctttcaaaataattttaatatactcaatgaataaaatagcatttattgtatactgattgcacagaataaatttttcataaatatttaccttataaaataaaccctgcttcggctggggtttttattcggcgtaaagatatagaacagcagttaggaaagaattaggacatcttgattcctaaatggatgatgggtcgaaaaaggaaactttttttgaattcttattctgatttttattgaattcttagtatgtaccagatactatgtgaggtacatttgcatatatcattatttaaccacatcctactcaggttttctcatctagaaaatgattcagatgatattggtaggatgtggttacataatgaaacattatcatttggcttcttcaagtatacatcagcagttcccaaagtgtggtctggggcttggaccctttcaaggcatccatgaagttgaaactatattcataataatgatttttattacttttttcactttcattctctcaggagtgtatgtggagtgttctggaagctacatgatgtaggatgatgacatagctctggtagctaatggaatgtttgcttatgtgttcttgtatataataatttctcagttgtaatttctagtgtgataaatgtcagtaaagatagcccacataaacaaaatctctttggggtcttctataattttaaaaagagtaaagggatcttgcaaccataaagccttcagtctcattctgaagaaatgcagttactcattctttgctactttgaaactagacaaaattgctgccacattctgaatactgctgcattagaccagtggctgtcagtaaagacatctccttagcttataaccaatacgcaataaaaagccaggaaaatggaattagcaaatgtgtttaactcatctgcatgtattttctgagaggtgttttggaagcttcacatttgctgttgtagtaaaatgtgggttatattcataattaaaatacagttgaccacaaagctgcaggcttatctatggattgaaaagaataaacacagcataaaacaacttttggtagatcttcctaaacaattttacaatgtaaatggaacaggtttatattagtgattcttgccaaaaattcagtcagacagatgagaatgagtagattgggtttgaattaaggtgaaatagttacagattcttgggtatgttaatattgcaaacttatgtaaaataaaacctttagcaactgaaagatatatataatttagagcttggaaagctatcatttatttgttgtttacatgttggagatatatttttttctttggtaagttccatcctattttttatctttagtgaaagatcattttggaaccatagccgtacctaaagatataagtaaatacagtctaccatacaatacaatgtaatctaagtttgtatttctgtatacaaaagaatgccgtatgcttgttagccacttgtatgtctattcatccctacttcagaaagagttttaattcttctcacctgccagtcgtagcttattaatccaacttccaggggccagactgcttcatgggaaagccaactgcaagcccagcacagggctgttaatttcattgtaaaatcaacaacaccattctgaggtctcattgtccctgatgttttgttaaaattaaagcaattaaggagagatcaaagaaaatttttcaaatgatatgaaaaatttgtctgttactttctagcagacaaatgtgcagacattagaataaatatatacacaaaacaattttctcagatggtgactgatgcatctctaacacaccacatcacagacttcctgatcatcagaagagtaagttgttgaaaatacattgttctatggactctaaaataataaaaaagtgttattagagtgtttcttcatcagtaatatgaagaaaatttggagaagccagccttgttctgtaaatcgataaataattttacagaaaagcactcgataatatccttacatcttcctctctagattccttgagtcacataacaagaaaacacttggttatcggtgtaaaaaaagtaaaagcaagttccaagatgcatgctaggatctgtgtattcagttcaagattttatttacatatacagtgtataatgttcagaatgattattcattgaaagaccttggatcatcacaaaaaatgtgatacacttttgaaagtcatcagctgagtcatgtcagaaatttccattataagagttaaacttaattctctttttttttttttgaacatgtgtcaaagatttatttaaaacccattaacgagggaaaagcaggatggtaaatctagttcaaagaagaacttgaaggaccaagaatatatagtcactgaaagaaagaatcctgagataagattcagaatggttaatgttctacagggcaataaaaccataaccttgaggttatcttttcttttttttattattcttatactttaagttctagggtacatgtgcacaacgtgcaggtttgttacatagttacacatgtgtcatgttgatttgctgaacccatcaacttgtcatttacattaggtatttctcctaatgctatccctcccccaaccctccaccccctgataggccccactgtgtgatgttccccgccctgtgtccatgcattctcattgttccactcccacctgtgagtgagaacgtgcagtgtttggttttctgtccttgtgatagtttgcttaggatgatggtttccagctccatccatgcccctgcaaaggatatggactcatccttttttatggctgcatagtattctatgatgtatatgtgccacattttcttaatccagtcaatcattgatggacatttgggtcagttccaagtctctgctgttgtgaatagtgccataataaacatatgtgtgcatgtgtctttatagtagcatgacttataatcctttggatatatacccagtaatgggattgctgggtcaaatggtatttctagttctagatccttgaggaattgccacactgtcttccacaatggttgaactaatttacacttccaccaacagtgtaaaagcattcctatttctccacatcctctccagcgtctgtttttttcctgactttttaatgatcatcattctaagtggcgtgagatggtatctcattatggttttgatttgcatttctctgatggccagtgatgatgagcattttttcatatgtctgttggctgcataaatgtcttcttttgagaagtgtctgttcatatcccttacccactttttgatggggttgtttttttcttgtaaatttgtttaagttctttgtagattctggatattagccctttgtcagatgggtagattgcaaaaattttctcccattctgtaggctgcctgttcactctgatgatagtttcttttgctgtgcagaaactctttagtttaattagatcccatttgtcaattttggcttttgttgctattgcttttggtgttttagacatgaagtctttgcccatgcctatatcctgaatggtattgcctaggttttcttctagggtttttgtggtgttaggtcttacatttaagtctttaatccatcttgagttaatttttgtatatggtgtaaggaagggatcaataattctcttatcaaaaaaaccttcctctcctagccatgccaaataactgagcactctgtgagccatccagctgtcagctagccaagtagcattttcacccactaatattagtctttaaaaagcaagaatcaaaagagaagtcaaggaatatcataaaatatctatgatcacaatggcaaacatcaggattttcaccaacatttatcaatgagaacagttctatacattagcattctgttcatctgtgaaaaaaaaactttttgatatctgaaggtcctcagaaccctttgagaattaaagagacttcaactgccagcaaattctacatcgggcatattctttaagacattgctgatctcacaagaggtagtgaaaactctccaaaacaacatcaatgaaacaaaatgaaacaaacataccctcagttccaagctgtgagctgcaggcacacttagcaggtcagggttttccccatgatagatgcccagagaggtacagtggtgagcattgccccaaaggcagatggctgtagcagttttctgagcaataagtgagaaggagctaagtgtagggcttctgaattaagccaggattctcaatagtgtctgaaatagtcataagtcagtaacacccctggctactgaattcctaattcagaccttgtaggagtcccccagtttaaggtcaagaaactagttccaaataatatcagcaagcatgtgagaagctaaccatcttgaatgacattcatcatcaacaagaaaactgatacagactccctgctcttcccctacctggggaaagcagaaattgggattgcctgatacagaatataaaaaagctattatgaattatttaaaggaagagggcataggcttgcaacaataaactattaggaataaccaggatgatttgaaaaccaagtgaaaaaaaggtgaagcttctaaaagttaaaagtataattattgaaataaaaattcagtggaagggttagatagcttactggacacagcagaagaaaaacctgaaactgaaagagatatgcaaagaaattaccagaatgaaagcaacagtgtcttaaagaatatgccctatccaggatctgctggaatttgaaggcttttagttcttgaaggattcataggatctttgaatattaaagaggtatgtcttcttcactgatcaatggaagagtaaagtgcagaactgttctcactaatgaactttagtgagaaatgtttgtttttacttttgccagtgtaattatatattttcatgttattttgcttctgttctgatttttactttggcaatcaatattagtgagtaagtagtgagaagaagatggaaaataaaaaagaggcattcagaaatgtgaaggctagaataagaaagtctagtacttatctaactggagtccagtactgatgaacatgtgaagccgtaatgcataaacaacatatccaagaaggtaaatgaaaagaaattcatgcccaaacacactgcggttaaactgccgaatactaaagacaaatagagagtataaaagcaaccaaagagaaaaggtagatcaccttagaagtaaattgacaagagacttctcaacagcaaaatggaagcagaaggataatggaattcaaagtgttaagagaaaatgactgagtacttggtaatctctcaagaatgagagtgagccaggcgtagtggcacatgtgtgtaatctcaggcctttgggaggccaaggtgggtggatcacttgaggctgggagttcaagaccagcctggccaacttggtgaaaacccatctctaccaaaaatacaacaaaaaaaaagagccaggtatggtggtgcatgcctataatcccagctacccagaaggctgaggcccaagaatcgcttgaacctgagaggtgaaggttgcagtgagccgagatagcaccactgcactccagcctgagcaagagagcgagactctgtctcaaaacaaaaaacaaacaaaacaaaaagagtgaaatgaaatatctattggttgaataaacaaaaatactgaaaaagtacatttcaaggatagtaagccagagaagatatttgaacatctgtaacagacaacagattaatatctagcatattttttaaaaaagtctaaaattcaattttaaggaaaagacagttagaaactgggaagtgaaaagccagggacatacaaatcaagatttaaattcaattttatacatttcagattgtcaaaattaagaagtctgacagcaccaaatgtggaagagactacaattttcataaagcgcttgtggggagtgtacattggtagccactttggaaaacaatttggcattatcttgtaaaattttaatactcacacattgtacaacccagaaatgccacttaaacatatttacaggaatatttagagaaactcttctcataatagcaaaaaattgatatttcaaacgtccatctgcatacaaataggttaataaattatagtatagtcatacaatggaatactatataattatgaaaatgagtaaatcatagtctttcactaacaagaacttaaatgttagaaacctcataccaaattttaatagtgtcccagaaaactacatatagtataataccatttaataaagcctcaaaacaagcaaaattaaatagtatattattttgttttacatagtatgtgataaagctgtattttcttccttttttttttttttttttttttttgagacaatgtctcactctgtcacccagactggagtgcagtggtgcaatcataacttggcttactgcagttagacctcctgggctcatgtgatccttccatctcagccgccagagtagtagctgtgactacaggcgcatgccaccacacctgcctaaattttttgtatttttttatagagacaaggtttcaccttgttgcccaggctagtctcgaactcctggactcaagcgatcaatccgcctcagtctgtcaaagtgttgggattacaggtgtgagccaccacacccagcctatattttcttaaagatcaaggaaatgacaaacccaaaattgagaataatgattactttgtcaaacctatcgcctttgtaacatctcagtcacaattgggaatcacaaactaccagagatggaagtgctttctcattttatagttgaaaaaggtgaggcccagaaaggaagttacgtgacatctgtattaattccacaaattttaatttagcactatcataggcatttggattccatccaggggtataagagactattcctgccgctgaggaacttataattttaattgagcagtgagggaggggcagaaaataaacactaaaacaataataagtaaattctgtggtgtgttagaaagtcataagtgctattggaaaggagaaaaactggagcagagtaaagaagatcaagagttccagaagagaggtggggcagggacaggccacagtattaaataggttggcttagccccattgagaaggtgagatgcaaaacttgaaggcgatgaaggaaataggcaagtgtgtatttagagaaagctttcttcttgaggaaagaaagaagtcaagagtgatttcaaggattttggcttgagaaactggaaggatggcgttgcgtctgctgagatggagaaagccgcaagtgaagtgagtttgtaggggagggtcaggacttcaatttggacaggctggcttagagatggctattaattatttaaatgaagctgtcaagtaatcagaacatactcatccagagttctaaatggacgtttggagaaagtcaaaatgcatgtcaatgaccaaagcaatactaatgcagtgctttttgcaccaaacagggccagatacatttgaaagaattagcaattaagttttatgaagatgaacacaatagaaatgaataggaatatgatgaacccaaaaaatggagtcagaaaacacgtccagttcgatttttttcagctctttccaaagatgtaaatatagcagaatattcagttggcctcaaattgacatatttgccattttgagatagcagtcgattttgtgaggatttatctgattacttctcatgttattcccatagtctctttctgtctgtaagccacaacaatgatggggcacactttaaacaacataaataagtgaaacaaattctgcaggaaattatgcaacatagagaattccaaaaaaattatccacatgtggatttttattggccctgatcatgttttagaatgaaatgattataactttgccaggctgcttagcacaattacaaaggctggggcatgctgttggaatgatttgcagagagacttaactgattacacggtgttttatttgcattacattaaatccagagcacttcttagagcatgccgaaaaccaaatgtagagccaagatccaatgaaagccgcagctggatgtggtcagtgtctaagagctaaaaaagggacctggagatcctctggttctttattttatagcagagaacatttagttccagagaggttaagtgacttgtctaaagtcaccagtgacagaatcgtgtcaagaacctgccttttctgattcccaggccagtatacctttcgctgtaggttgctgcttccatgtgtcataaagacttaaaatttgcttcttttttatccctttgcagggtttcttccggagaacaatcagattgaagcttatctatgacagatgtgatcttaactgtcggatccacaaaaaaagtagaaataaatgtcagtactgtcggtttcagaaatgccttgcagtggggatgtctcataatggtaagtaaacagtcatcaccatatactttattattctcattatagctgccagaccagtggacactaaagccattgccaaaaatgtgtacagtttttccaccaaatgccagaatttagaatattgcatggcgataaaacatttctcttttaggtcagtgtttttaaagttttattatagaacctttctctctgtggttgggcatctgccatgaggagaaaagagacttgaaaaatctgggggattatgggaaaaactttagtgttagaacaaatataatgatcatcatgattaatttttatattgcctcatgcattaaaaacagaattaaaatttacttttgtgtatcagtagtgtcgttctgctttaaatgtaagaaaatcctgaagatgtctgggtctgaaactttaaatggcatatgagaatttagattcatttaattttttttttttttttttttttgctgtttattatgcaaagacgagtattcgtttccttcacttcaaggaacgtccatgagttgtggaaagggtaaaacaaattatttttatagttctgcaaaacttcaaagccatagaaacataagagaataaaactttctacttttgaaacctgtgtctaaagtcaagcttatgactttgggtgtcaacttaagggaaatgatgtagaagacctgagaaaagacccatgttttcatgatctgtggaactaactcagtaaggtcctggaagacaaacgtgtttgaaaaaataattcttggtcactatttggttctgattggttgcctggctgacaaaataaattttaggtgtaacttgatagtattatatgtgtctagtattaatcagttattttcaatgcactcaaggaataaaaaatgccaacatgatcaaattaaatttgaagtttcatttcatcagctatcctattttttctttcttttgttttcatctctctcaaaactgatctagtaagaaggcagtcttcatctatatgtactctaaagcatctgagaaaattaaatttttgctctatcatgcagatacttggttttcacagtggaaaccatcaagatatttgagagtcactcattgattaataacctaccctttaaaaatagttcacaaaattctatctgtatgattactaatgggtcagttcctctaaaggcaagaatgtattttgaatagagctatcagcagtactgaacaggatggaaatttggtccaactttcctcaacaattgactacatctgctgtatacaactgtagtcatggattgcaaaataatttgctggttcagttccatcagtttcctttttatttcagacctcataaaacataagggcaagcttccaagtcaagggttgtattttaggtgatgcaatcaagttgcaataaacttatttcatcttcatgaagaaatcattgactttgaggtcattatcactgagacagcctaggaaagcatgccagttccgcttttaacactaatttttgcctattaaaaaattatcacttcacacattcatgtaaaatataattcctgttacttacaggcagtgcatacattgatgtaaaatatatttcctgttgcttacaggcattgcatacgtttacttaaaatcaatctgcaattgcttattgtttataggcaaatattatttaaaccccaacctatgtagtatggatggtataattttctcctcccataaatgtcaaagaaagctatcataaacttgataggtcatattttgacttcatatgacaatttattttatttctagagagggtcaatcttgatagggagtgtttgttcagttctagcaaaagcaagaaaatatatgaattaagtgtcatgacatcagagacttaggcagttcaacacttaaaaaattgcaaacataactaagaaaacctcagaggtttttatgggagtttgtttgctgcacagaaaataaacatcagactaacaacaaggttttgattagttttgcctgttagctgtatgaagaaaacatttctaaatacaaagttttctaggaagttgagtcactatttaaaatccattgctttgaccaatgtgaagccaacagggttttcattcatatagaatgcctttttatcaaaagaggctctgagtgttataccaaaatcagcacccagctgttttcagtatgcgcaagaaaacatgaacgtcccccaaagcaaatgtactccattccgtgttaaccttatttctgctccctggtctctgattagtctggttgatgaatgtagcttcccctttggccatgcactcacagctttgaaggaggcttctgaaggaactggtagggaaccctaggggctcttgctaatgttgttggatagtcactgaaatcagtgatcaccatgtcctttcactttgaaaattctatgattctgtataatcaaacaacctaactcactggatttttcacttttcaaccagctattccgtgtcttacagtgctctggtcttcacagataggtaggcacctggcatgtcagttgcctgaatttgaaagttttcacctgtatgttttggtacgataaaaataaaaatgtaatttatatatctgaatcaggtctgtatgttatgatcaattgctcagcaatttcgggcagttggtttgatggttatgtagtaatgtagcctgagagcagaaatacagagcctctgggctagagaaagtataaatggcatcctaggctatgtagggttacagctcttcagaaggaactttcattttcattgtgacacatcgtctacatgttgtagaagaacatagtttcagaattcttccagttagaaacatagtttctcaaatattcactttcagcattgggtagaaaaagtacccaggtgatggactgattgatatgcttcagaaatatgttttttcctgcaagtaatgaaaataaacacacgttcttaattattttggtcatttaacaacccatcatttctggaccatgggttaattccaccgattgctcagaagccttcctgagtcatctcaagcacaatcaattcactactgtgtctagacactgcccttagaggaaagctcaaaatgaaaatgaagcagaaatacagacccacttcctaggccactcagcggtgtatgtaacttaccaagtgatcattgcatcaactactctttgttagtgaagctggtgtctgcagaatcttgataaaaagactcatggataatgttgcttctttagtcaaatgggctcttgcatgcatttttatagattttcaaagtagtcatttttgttttaaaatcctgctgccaagtcctttatagtaattgcattttaaaaatatgtcttctttattttttattattatttttttttgagatggagtctcgctctgtcacccagtctggagtacaatggtacaatcttggctcactgcaacctccgcctcccaggttcaagcaattctcctgccttagcctcctgagtagctgggattacaggtgcccgaaaccatacccagctgatttttgtatttttagtaaagatggggcttcaccatgttggccaagatggtctcgaactcctgacctcaggtgatccacccacctcagcctcccaaagtgctaggattacaggcgtgagctaccacactggccttgtcctctttatttttaataaaattatttagtcattaagaattttggcttgtgggccgggcatggtggctcatgcctataatcccagcactttgggaggccgaggtcagaggaccacttgagctgaggagttcgagaccagcctgggaaacatgacaagactccatatctactaaaactacaaaaaattagtcgggcgtgatggcttgtgcctgtggtttcagctactcgggagtctggagtgggaagatcgctttagcccagggggtggaagttgcagtgagccatgattgcaccactgcactccagtctgggtaacagagcaagacccagtctcaaaaaaaaaaaaaaaaaaagaattgtgactagtgaataattcatattcagagctctttttaatgtatgaactaaataataaaatagtaagtttaggctaagtgccctttttatttttaaaattttctgtatttattattactatttttagagatggagtctccctgtgttgcttaggctgggctcacctcagcatctggagttgctgaaactataggcatgtgccactgcacctgacctatttaagaaaataatctagagaagaattgacatgttatttatgaatcattcagttaggttttctctataacattgagatttggttaaaaatatgtttttcataaatttaaaaactattgaaatcttagctttgctgactaggatgtcttattatataaatgagagagagtttgtaattttttaaaaaaaactgacaactttcaaaatagtttctcagtggcttcataaaaatccagaaaaaaagatttcacaaatttttgtgacactcaacatttttaaggtagttctctcagtgccttgcaaacagcagctctagtgtatattgagaaaaggaaaaattctgaatggcaaatactagatttcaactttaacctattcctttttattattattattattattattattattattattattattattattgagacaaagtctcgctctgttgcccaggctggagtgcagtggcgcgatctaggctcactgcaagctccacctcccggattcacaccattctcctgcctcaccctcctgagtagctgggactacaggcgcctgccaccatgcccggctaattttttgtatttttagtagagacggggtttcaccgtgttagccaggatggtcgcgatctcctgacctcatgatctgcccacctcagcctctcaaagtgctgggattacaggcgtgagccaccgcgtctggctaacctattccttttttttctttagtcttcttggttgtgtaaagaaaaattacccaaatcttaactttcagaaaaggtaacaaactcctaatgcatgtggcagtacatgtttgctccagctgccctgtccctctaccctgcgtggactccagaaccgcccatgttggagcccacctcctttccccacccctgcccactttccactcacacctcaggcaaaccctgcattttgctgttcctggaaaatggcttatgcttggatacctctgggcctctgttgatgcgtctgtctgttccttgtggaaattcttcctgacattcaaggctgcattcaaatgccttccttcccatgagacttttctgattccctgctcttccttttctatgtgtttcataccttcctgtgatatcacattctgccttaaaaagcaagagagtgatcagatacatattaccaaaaaaaaaaaaataccgatagcagtaaaaatgatagagaaaagactggaattgggaaatccatctgaagaccaatgcaatattaggaaataaagacattgagaagggtgagaagaaaggaaattgagagaaatatcagagcagtgaccaatgaataaaagcgcctgaagggagagaagttgtcaaagattatttaggatatctaatttgggtgatagaatgaattaaccaagagaggaacacaggaataagagccagtttggaggagaaaattttaaattcagttttatattgtgttagagatgcctatagagtatccagcaactacgtatagaggaatataggaggatgtgaaaaataaggctccaaatttcagtgaagagagagcaggaatcatcagcacccattgtaggttagagaggtcacactagggaccacagaatacaagctaagggagaggcaccatcagagagatctggagagcagctggcagaatgttagaggacccagaacagcaggaaccaggacaagaaattttggaaataagagggcggagatggtcaccagaattaaaggctgggagaatactgaagagctcaagtctattgagaacttagaagaggccattagttctggccgagagaaaagcattcaggatttttacaaagttttggtaaatcccagtgagcgcaaagctagactgcagtagatcgagaagtgaatagaaagtgacaaacacagacggagtgaaaacaactctttcagtaagttcagtggtggaggaaagatagcttaaagaggaggtaatagtagagtcagaaccttcaacctgggcagaaaggccagagccagtacagagaggcacactagagaaagactcatctgtgtaatatacccagtctcccctaccagacatgtcctttccatcctttcccccagccccatctgtgcagcacagtgttgcatcaacgaagtgttcagtgaatgaattaaaggttgtcaggaagacttcagggaatcagagattgagttagaaggtgagctggtggtgttttgctcatcttcatttttgaaagaaacctaagaaaatgtttaaatgtcctctacaaatagtgtgaaaaatggtacctctgcataaaaataatttaatattagtgctaaagttgctccttgttttcctttagaggaactacaaaaggatagttattagattgccaaatcctgcagaacctccagcaggcacaagttggtttttctccctcaagaaagagaagtgagccaagcgtggtggtgcatgcctgtggtcccagctactcaggaggctgaggtaggagcttcccttgaacccaggtgttcaaggctgcagtgagccaagatcacactactgtgctccagcccaggcaagagaatgagaccctgtctctttaaaaaaaaaagaaagaaagaaagaaaagaaagagaaaggatggaagggaggaaggaaggaaggaagggagggagggagggaaaaaggaaaaaggaagggaggaaaagaaggaaggaaagaaagagaggtgagccaggtgtagtggctcatacctgcaattccagcactttgggagactgaggcaggaggatcacttgggccaggagttttggcgagatcccatgtctaccaaaaaaaaaaaaaaaaaaaaaattagctgggcatggtcatgtgtgcctgtgggcccagccacttgggaggctgaggcagaatgattgcttgagcccagaaggttgcagtgagctacgatcatgccactacactcccacctgcgtgatcgagaaagaccctgtctctaaaaaaaaaaaaaaaattttaaaaagagatgggaaaacaacttattggcaatagcacatgttcttgtttgtatgcaacaaacatataaaaagtagaaaaattgaccataagacatagccttactatttttcaaaagcctgataatgattgcaaattcatcccttagatgtggaaagacaaaaataagacttgtcttatttcattctgttattttctattgatttattattttgaaaacctgctttaattaaccttagtaattaagtagcatttgtctttaatgcttctacaattaggtagatgttttaaaaacatgccgattaattgtttcttagcgttatacccagatccaaaaagcaggacatctaactattccatgtgcttggtgtttgtgtgttcagcaatatcagtactaaatacacaatacaaatctataacatgctagtagtagctacattcagctcaatagaagtgtgttgtataaaggaatgccaatatgctttcccagaagttaatgagtctctatcaaacccagtcttcctgaagggagcctaccagctctgatatggataattttttttaccaagataccagatttctctgtaggtgatgaattattccaaataggaaactgcgtgccagtgttctggaagttgctctgtgtgacaggtgccagatctgtagaacagacagaatgtaattttttttgagcctcaaaaactagacaaatactgcttttaaaaagagagcagagcattttcttgagtactatgtagacatttgtagaactttagagctaaatttagagctagaggaaggaaactttagaatcttcttttctaagttcctcattcagtaaataaatcagttgaagaccagagaagttcagtaattttcttaaagccacatagctagtttgtcactgagctgaaactagaaattaagcttcctgactgcattcagtgcagtattcattcccttgctttccagagaggccaaaagttcttgctcagtgactcacagtaagacatgaagcattttccttttaagattaatcagcagtggtagaagatttggaaaaatacacttgtatatgagtacactcagcctttatagttctgacccccaatgcagaatgttcatcttctatttctaaggtctgacttcagtctttcaggaaacacctcccaacctccttcgctttcctcctcttggttgtcagattctccacatgaagggtagaacctgaggctcaagaattacttaactaaaaaacaccatctcacaaacaatttaaagatggaaagatagaaatagagataggcagacagatggacacatagattagggtttcagattctgttctttctctgtgggagaggtcagcgtgccatgactaccagcctggtctagaacccacagcagccatagttaccaagaccacagcaataaaagctgtgtttgttaagcattgccatgcacctagcactgtgttaaacacttcctgtgcctcctctcatcacctcacgtgaggtagataggtacaattatgtgggactcaaaagcaacgaaataataaaactggcttttttcccccttaaaaaaggtatgcgtgcctcagctgaaagacagaaaaaaaaaaaaaagtaggcaaataaaaatccttgttttctgtacaatttcagatttgtgtatgttttatgggaatttagtctcaccaaatgggatcgatttttcattccttttatgaacttctggtgtataaaaatgttaaaatcacctatataattggttgcactggtagttaaatggaacctaatttgtagcatgggcatttaacaatacagataatttattcattagagttagcctttggggggaacttcaacttacaaaaatacgttttagtgagattatagcagagggatctcactttaatatatcctaattctaaaatggtttttcggggtattttttggttatatttgttaggtgatagaaaagcaagactagtaaatgtagtaagtggctatctttggctgtttgtccatttaaattaacttttttgattacccattaggaaaaaattgcttttctaggtgtgtaaagttttgcatatgattatagcctcttacctgtaaaaactgaatcagagcttagaaccatgcctggcgcacaatagtcattcaacaattattccttgaataaagagacagtattgtgtggtctgtgaaataacaaaagttcaggagcaacagacacttggtgattctagtcacctctattttgttataggataactggttttctctgagttttacaccagaatgccttcttcttttaatacgccttcttacttagtgcttttctcatgatcattttcccaaacttcctaatggacatagtgtctcattttctgtctgtttttaaacctgatactttggagtttaatccatcaaacatttattgttaacctactatgtgtattttgttacacctaggaacaaagatgagaaaacatgttactcatataatttatattcgagtagaataactgatataaaccaacatcatagtatagtaacagtttaatacatgagctaatgtatgcatacaacaggagcccagcatttaggaagctttttataaactgtcccaaaccccaggttttttatatactcctaattgagtggatggatggcccatcaaaatgtcccgtggaagacatataatgtcagaagttaccgagtgactctgataggctctgcctcccctaccctccgcactcctcaattaggaactactggtgaacaagaaatgaatgtagtacagccatccctccttattccctgggattggctccaggacccactcagataccaaaattcctaaatgtgcaagtctctgatataaaatggcatagtatttgcatgtaacctacacataccctcctgtatactttagatcatctctagatggcttataatatctaatacagtataaatactgtataaatagttcctatggccaggtgtcatggctcatgcctgtaatcccatctctttgggaggtggaggcaggaggatcccttgagcccaggagttcgagaccagcctgggcaacatggtgaaaccctgtctctacaaaaaaattaaaaattagccaggcgtggtggcacacacctgtagtcctagctactcaggaggctgaggtgggagaatcgattgagtctaggaggtcgaggctgcagtgagccatgattgtgccactgcactccagcctgggtgacagaacgagaccctgtctcaaaaaaaaaaaaaaaagttgttatactgtatttttttatttgtcttattttttatcattgttttatttatttattttagagacagagtcttgctgtcacccaggctaaagtgtagtggctctatcacgactcactgcagcctcaaactcctgggctcaagggatccttccacctcagcctcctgagtagctgggattagaggcgcacaccaccacgcccagctatttatttttatttttatttttgtacagacagggtctctctatgttgcccaggctgctctcaaattcctggcctcaggcaatcctttcactttggcctcccaaagttctgggattacaggtgtgagctaccacacccagcccatattattttttattggttcttttttccaaatattttcaatccacagttggttgaatctgcagatgtggaacctgcgggtatggagggccaactgcataaggaattctatctgagcaaagtggtcaggaggtcacagaggattttgaaggaatatgctatctggggttttctttccattgtatttcaaaatacagtagacaaggacttaatatgtgccagaaattgtactaagtgctgaggatacaataatgaacaagattcctgcctttgtggagattatatggcaagggaggaaagaaaacattatagattaattcctgtgatcagtgctgtgagataaggtcatatcctgagggacccagacaagcctagcaccaggggctggggtcaccagtagataaaaatatgaacaaccataccccagccccatggaacaacacagaaagaaaatggggaagagtgagtagggaacaggatttttgaccaaaacctcctagtttaaaggtttctatatgaagaggccatgtaccaaggatatattcactaaaagtatctaaatataggctaattcaatttaaaggaatcccaactgagaggtaagattttcttcccctctaacacccaagtctggtctctaaggaggcccctacaaaacaatagttgtattagtcagcgataaaatttatttagggtcaatggaaatgaatttatgaatttgagactcaagggtacatgtcagtttcttcttgggaaaatccaaggtaatattcacagagtactcagatgggaaagttgtcgtgtgctgtcatgtctcatggtagaaatgctacccttagcataataacatataaaataactatctctggctgggcacagtggctcatgcctgtaaccccaacactttgggaggctgaggtgggtgaatcacttgaggtcaggagtttgagacccacctggacaacgtggtaaaaccctgtctctactaaaaatacaaaactgagccaggcatggtggcccaccccttgtaatcccagctactcagaggctgaggcaggagaatcgcttgaacccaggaggtggaggttgcagtgagctgggattgtgccactgcactccagcctgggcgacagagcaagactccatctcaaaatataaaataaaataaaataaaaatctctttgttctgggattcagcagagacagagtcttgctagagacataaacaaatatgacagtctctgcgctcgaggagcatatagtctagtgaagccgatcaccataaaaacgcatggctgtgataccacatcgtgagtgtaagaacagagctatgtatgcatggggaacagtggacatgatggccaggtacccttattatgggaaacatagaacccaaagtgtgttcccaaaggaacatgattcaaaataatattttgctgaacatattggtaagaaggaaagaaaacatatctgagttgaaaagttacagtttattttttccccaaactagtccccactaacccctcttacattttccttgttgcttttctttctttcattatcttctttgacacttcctcaccctacaggcagccagtttgtctttctgacaaacatcattaagtggtaactctggagagtcgggagataactatggcttctctccgctacatgtaaaagtgctctctggactagtaaaatgtgataaagcaccatccatatttctttttaacagagacaaacaaatcttataaactccctgagaacaaagcctatgtctgtacaactttgaattctgcacagtttcgtattttaattcgtgaaacgtgttgatccttctagtgcctgaccttaggtcaagtgctggggatacaaagaaggtgacctttgaattgggtcttgagggatgagtaggagttggttctcaattatttcacgtttaagtcgacatacttccctccctttgctaaactcgaattctttcactttctcagcaggattatgcattaacttttaaaaatgaaagttaacggtttaatttttactgatggtctgtgctacttttgtgaaataaaaacatgagcaaagtggtagacagaaaccaggactcaagagcagtggaggaggagggcttctactgtgtgggaacgagggctgggagagcacagtgtgtgttcagagcagtagtaatccaatgattcatcctgtcattcctcttcctctatagccatcaggtttgggcggatgccacaggccgagaaggagaagctgttggcggagatctccagtgatatcgaccagctgaatccagagtccgctgacctccgggccctggcaaaacatttgtatgactcatacataaagtccttcccgctgaccaaagcaaaggcgagggcgatcttgacaggaaagacaacagacaaatcagttagttctcttctgctgtcttcattgggggaggcgggaagttgttttgggtttttgtttctttgagtaaatggtttactgcgctacaaatgcacacacagaatattgttcaactgttggctgttaacatattgcaggctgagtctgaaacgcaggaagtgttttcagatagcacaagtcaacattattttgaaaagggagaaaagtccataaagtttttgagaatagtgtaacaatgtattggtcatcctaactttaatgaatgaacttaagccccctgagcctatcaccctcttttaggatccatctcctttctcggcatcaaaataactggccacagcaatattcattcaagcagccttgctttcctctgggaagaacccgacctaggtttagaaaaggtattgaatcccactatttcacctttcaggagaactaccagagttacctctttttttttttttttttttttttttgagatgtcgtctcactttgtcgcccaggctggagtgcagtggcacaatctcggctcaccgcaacctccgcctcccaggttaaagcgattatcatgcctcagcatcccgagtagctgggattacaggtgtgcacgaccatgcctggctaatctttgtatttttagtagagacggggtttcaccttgttgatcaggctggtctagagttacctcttaagaagttcaacatgaggcataaaaatagattctagatattatgttacctttctttccttgtagcattcttgattattccggggcaactagaagctctatccttttattacatatgtgaattttatcttctgcaaggctctgagctgcctggactacttcagtggactctccaacatctgttcactcattgagcagcactgtttagaaaacccagaatgggttgtaattgttactgagttaggttttccaagcagcagagctcttctctgactggaaactgagaaaacaacatggaattatagaataaaattgtacctgaattctagtcccaattctgccatcagcttggatgacctggatcatgtctctgtacctcagtttgttgttgttgttgttgttgttgttttgagacagagtcttgctctgttgccaggctggaatgcagtggcgtgatctcggctcactgcaacctccacctccctggttcaagcaattctcctgcgtcagcctcccgagtagctgggattgcaggcgcatgccaccatgcccagctaatttttttgtatttttagtagagatgggttttcaccatgttggccaggatggtcttgatctcctgacctcgtgatctgcccgcctctgcctcccaaagtgctgggattacaggcatgagccaccgcgcccggctttgtagctcagtttttaatgacagggtttggctttgattctgatgtctgcacaacgctcccagggctgtaagaactgcagaacacactgagaagacaccgtcccagccatggaaagcccttctatgcagtcatttattttcacatgaacacctcccagagagctatgcaatgacttgatagatatgtgtaacttttcccctattcagatatattgttaggaaaatctcattaacctttcatgtattttgatgactatctcaagatggtagttcttctgtttagctaaactagtaagagtagaatcagttaatagaaaaaggaaacttatggcataaagccatatggtaataaggacaatgagttttctgatttgaaaataggtctttgatacctcaacaataatatacctggattcaattctttacagtataaaaaaaaccttgcacatttgttaggttcgagccacatgcacctgactactgctattattatcctctttattttagagatgaggaaaataaagtccagagaggttaaacattttgccctaagaccccacagcaagtgggtagaagacctgggactataatgcaggttttctggcctctagttcagagcattcgtagcatgctagcccctcagtagcatagtactttaggaagctagtctttcccacttgctggtagtaagccagggagacataatacactaagaaagcttcggtctgagaaaactttccatgattgttttttctcaatttttagaacagtaggaattcttcacctcatctgctatcccaacatattcacaattggaaaatttttgtgctgttctgttcttttcaaattacaaaagtccttgactaggactgctggcttttacatgcacaggactgcacaacactggtgtttataaagctcattcgttcaatgataaaattggccatagcaaatcaaaaataaatgaagacctctgcgtagctgattggactacagaaaataaaccattcatatccaggaagaaaaaattaaaagggttgctgaaaaggaaagagccctaaagcaaactatctacacggttgggggggttttcttttcttttcctttctttttttttttttttttttgaggtggggtcttgctttgttgcccaggtgggagtgtcttcttatattggtcaggctggccttgaactcggggctcaagcagtcctcccacctcagcctcccaaagagctggtattacaggtgtgagccaccagccatggttagttttcatcaactgctttctcaccttcttttcatcctctaattcatacctgcaatccttattagaaatcctgtcaacttaatagtaccagaaagtcaggcaaaagactgataaaaaaaaagcctcggtggtcaagaacttaaaattacactactggtgtgcaacgtgctcttatctgtgttactggaggacaccctcaagatacctcactccagttgactccttggctctaaatctttgagttaaaaaataaggaggttctttatggaataaacaggtattaagctatttaaaggagagggctgcgaaatgcttgattatgggcttttcaagttcagaggccaagcgtttgtcattttcttccagtaactaggactgtgtcttgcccctaatagttactcagactatatttgcttaattgaattaaacacagttgcctatgccctttgaaattctggactttcaacagagggcctctagcccaatatttgcttaccaaactggacatcattgatgatctggattcaggcagggtctggaaaaagagagactgggccaaattaaaataatccattcactgatgacacaaaactaaactacaattgtttggcaccctctcttctccttatcttgcaaaatcaaattaagcactagtggaaagaaacagttcagagaggaatatgggaaaggaaaaaaaaaaaccaaaatgtgatttccaacgagactagagatttgttctttatctacatggtcatgttactcatttgatagcatctatctcaggggtattatgttatctcttggccaggactcatgaaagttaagatttgcattgataggaaaagttttgcagaaatatggactcttgagagggtgggaggtatataaaagtggctatggctgtgcagcagagcaatttgcatttcttatacaccctgcttgagactgatgtcattagtgttggttaggccaaggctgggggaggctactcagaatagtgggtgaccaattacccagaacctttggaaaaggaaatgacttgattgaagaggccattctttaaatgtatcttactgctcaatttcaccattgcctattgtagaatgcgcgctgcccgctcagcatttgcctctaggcagaccaggactccttcccctccccaactaatcttccttctcctgtatcttattccctagggccacttgcacctttcaaaatggataaattaaattcccctgctccccttctaccaactttaacatcatatccttggtgtatgatgccctacttttcattgttttgcctaaataagagtatgcttgggaattttaggcttagggctgggaaaagatgggatatggaatcgtcagctatagattgccggacaagaaattttaggagcagtagacctttcaaccgccctcaataggatggaactgactgtccccacaacctatttccctttcagtggcttgctccagccaaggccccttatttaagagatctttgtgcgctctgaaaaccatgcatatgccagaactaggtgctctgtttcatgaaggcagtttgataactgaatggactttggaagtgcccagtgtttgactattaccctggtgcgatgatcacactgggcgtatcattgtcacatgatcccatgtttgttgatgaaaataaacagtggttttcaaaaaccattttcagtgccatggtttgtcataaaacaataaatagaaaagcgcttgatgtacctgccaacttttcacccctatctaagagatggcgaagctccggctgcactctgtctgcaaataaggaataaaactttttatttgtgctatattggactttgggttccaaagcatcacattgtttatggtaggtacatgtggagtcactgtatttataattataagagcaaactggtgccattggaaaaaatggtctttctaaatagtgtgtgaaatatgaaactagtgaagaataaaatcaatatggaaatgtaaacttctatgaaaacatttccttacccatttaagtttgtgcattctgaaatttacaatggccatcaaacccagtgactcaaagctattggaaagatatctgtccttttaaatcctacacttacagctaaacaacgtatgggttcttttccctttatctctggaaaagcccgactgagctggaatttgctccccaaaggaaagacatcaggcagaatcctcagagaaaggggcttagggaccccagtagaaataaaatcaggatagtagtgccaattcatttctggggctgctggagaagttaggcttctgggatcattcatccatgtatcaatattaataaaataaattcttctattgccaggactgtcaggaatagctaaagatgtaaaagatctaaaccagtgtgttctttcagagaataagttaaaaataatattttatagagttaaaaagaaaagcacttggattttttttttccaatggctggactcagttggccaatacccttgtttgcctgctgagtaactctttggctggcaattgatttttttaagagctgtggttatgtgctagttcattagcatgtgaataattcttcatattaagttttcatttgtttgtcgtaaatctctaaaccctgcaggaaagcagaatatctttgacagctttcaaacttcacttctatcacacacagcactccaccagcacctctaggaaacagtggttcaaaaggccctgccccaagaccccagcatgttaagagcgttagtttaaaatctccagttcatcctagaacaatcattttaaaaggaaaaaaagaagtggggaagtcctatagaaagcaatggaaagggaaaagttctcaacccagaatcggggcttaggttctagttcctggtttgctataaatggcactttgactttggaatgtctctggcttccgtttatccattagtcagagaatgatgggacagattacttctgaagaccccttatgtcctataaatctcatagttctcaacaagagggaaacgggaacaacaggggcagaaaccaacgagaggctgaggaaaccaaaccaatgagttttggattgtagctaaccgaggagaaccaggtgtgtcaaaggtgatgaaagtcagatgtgtaaaaagcaagaaggaaacaaaatgaagaacatgagccctaagaattcagtgtctttccctggtaaaactaagaacatcaggaaagccacactcgatgaggcacacatttttccaagccagttttcactctgacagggttacctcaagtgattgtttgagagagggtagaggggttgactacactcattcaatctgccaaattagaaaagtcacccagaataccctgtgctttttgagtgattttcatgtttatctcccgtagcttgctattttgttattcaaaaggagtgtaaacttagggcattcatgtataatacctttcataactcatgttaaaatgctgatgttattggatttctcaggaacactactgttctatttctccattcaaaaaggtaaaaaaaaaattaattactctattttcatcattaatcccatttcccccattgtctttgtattctacataggaagcatgccatagatctataattgaatttactcatctatataaaacagtacttttaatcccatcctgaaaatcaaaatatatttttgaaaatcaaaatatgtcaaaattgaaaatcaaaatgtcaaaatattgaaaattgaaatatatcaaaattaattatatttgatgtatccctcaaaaaattgatttctccttacagaaatcattttgctttcctggaaaaacactgggttcaagtgcagctttcttcattccgttctggtctgtccagtatatgaaaagcacaagcacacaatgaccagtgacagattcaccatgaagctaatgaagcttcatggggcccttcccttgtgcagaagtccttccagtgcttggggaagggccgaagcaattttattctcataatttgtaatattttccttagagagactccactactgtgtatattttatgccccacaaaacctgaattcaccccatcatgtcccatttgtaattaagctttctttcctgttaaggagggacgcttacccagccctttgatgtacggtctgaagataaatacactgttagcccccaactagaagtgtaaaatcattaagacaaaatttgagaatgatacggctcctataatggcaatctttggatgatactgtccaagctgatggaaagtgtaaggactccactttgctttgtaaaaaatacaaaaaaacagccatggaagtgcagtacattttgtatggaacattgtaccacattgtaccaaatgtcatgttaaattaatgattcaagataaaatgcagaccaaatttgaccagggttttaagaggttctctctccataaagcaggctggccacgatcttctcactaggtttgagggtaaggaggtcccctgtgaaatatgaaagtgaactctctgctatctaagaattggtgaattggttgcaaagaaaggcagaccaggcccacccagggatcactcttgcagtttgacagatctacctggaggctgaaagaatctatgcagccttcggaaatgcagtgaaaacagtataatcagatatgactagggaaaaaataaaacaactggtgttcatttgcatgtcaacacccagaattctctgctagttcacctcttcttcagaatgcagaaaggattgaaaaagctggaatggggccgggcatggtggctcatgcctgtaatcccatcactttgtgaggcagaggtgggtggatcacctgaggccaggagttcaagaccagcctggccaacatggtgaaaccccgtctatactaaaaaataaaaaaatttaaaaaaaattgccgggcgtggtggtgggtgcctgtaatcccagctactctggaggctgaggagaatcacttgaacccaggaggtggaggttgcagtgagcctagattgcgccattgcactccagcctgggcaacaggagcaaaactccatctcaaaaaaaaaaaaaaaaaaaaatgaaatggtttggcatgatggtggggtgctgattcctctctctgtccttgagtatttactgccaggaaatcctgaccaacatcaattgccaaggggttaaagtcacattgttgttaaattgggagagaaaattagcaggattttgtgccctatgttcaactattacagagtttcaaaaacaggaacctggagctttatatgaggggacaggggaagtaaaggggaagagtgacaagggtgatttatcagggcatagttccagataaatcacttacatggaggtgaaagaatttcatgcatatgttctgtgccaagaagccaaatggttgagcagaagctctgaaagttgaagtgggcagttctgggtacagtctttccacatgtgaaaaggtgatgattttatattcatgttatttgtactcctgcatgtgcagttggtcttttcaggtgtccagatcatcattttctcatgacatgaaagaaagccaataaaggctagttgtggtggctcacacctgtaatcctagcacgcacttagggaggccaaagcaggacgatcacttgagcccaggagttcaagaccagcccaggcaacatacatagcaagacctcatctcaaaaaatgaaataatttttttttagaaaaagaaagtaaatatttcattaatataaattataatacactgtaaaatgcctggaggacaagaaacacgttttctctaggttctgtgaaagcatcattatccattcacatttttctcataattagaacctgacgttctggaaaaatacagtaaattttcatcgatgttacttgctctgccccccttgtattcctcccattaataatattaatcctgaaaagaaaaaaagaaaaaggaaagaaaccacccaagcaaaatgtttaagaaatacggtaaggacagtttggtcccaatttccttaaaaattagagccaccaagtaaacctgtttgggggtcctcacatctgtcctcttttggagtttgctaagtagtacagttgaagtgaattttttggtaacaaaagtaaaaacttccagaataactccagtaaagggtgttgatgtgacgtacaagtttggaaatatatttaatatctgagactcctcaatgttggtgttatttcctccagtttagaacaaacttaatcttttgatgaaaatcatagagttccatagatatgaatagaatctccaaccagtgcatcttgaagccggctgccacggccactcatgcaccttctctcctttcaggagagaattgtcagcatctctgctcaaaacaatctttacttttagtccatcagagacttcatgtttgtcgtgcatgcacactcacacctctccacacatatgcccactccccacacacatcctgcttctgagaaatgcaactagaatttcctccggagaagagatggaaacccctgattgagaaatttaaggcctaggaaaggtaaatgacttttcttaagtcacatggctcaccacagaaccaaagctggaacacacataccctcagctcttcttccagtgctttcaggtatacaagtatttgaacaggattcaaggtttaactccttatgtgtcattcagtgtatccagtgtaagtaaaatgttaccccttagtcagaacagccttgagaatttctcaatgactacaaaccttgcttagttctatacaagggaagtaaaagagagagaatgtcatgaccaaatgacttaacttttgaaggcagcctattgcaaacttgaataattggggcatgtattttattgattgtttgacctataaggacagatattttaaaatataaattcaaaattgcttttttgcagcattcacctgtaggccttctatatctgctctttgtgaaatagatggcttccagagcattaaaaaaagaaatagacattttcttggttcaagagctgtaatctgctttccgagtgatttttcatagttaagcatattttatgtgcacatagtttcatttgagatctgagaggatttcatctaaaacggaaaagttattacctgtgaaggagaacaaaggaaaaggaaaaagaaattttaagaaaaaaaaatttttttaaacctgtagttactttatgttcaagtgggtattttcaacgctgagttgctgaaatggttttttattgaaagaaggttaaaagtgtatttcattgaaagccaagataaacagtagattttgtatcattttaaaaatcaacaatcggccgggtgtggtggctcatgcctgtaatcccagccctttgggaggccaaggcaggcagatcacttgaggccaggagttcaagaccagcctggccaacatggtgaaaccccatctctactaaaaatacaaaaatcagctgggtgtggcagtgcatgccagtaatcccagctacccaggaggctgaggcacaagaattgcttgaacctgggaggtggaggttgcagtgagccctgattgtgccactgtaattcagtctgggcgcagagtgagactctgtctcaaaaacaaacaaacaaataatataaaaatcaacaatgaagactccccaaacaaaagaaatcaggattcttagccagtcataggtaaagtgttacagtgtaaattgaagggaaagaagaccaaaattggtgaaatatgtttggtcccagaagataattaagatgaataaaagaacttgagagtattttctcattattaagcatcttcagctttaaagattttagttagcaaagcaagtttacataaacagttttctgaacctgggatggcattcactgtgagttagaaatctccaagtcatccacgttttccctgttttatttgcagccattcgttatctatgacatgaattccttaatgatgggagaagataaaatcaagttcaaacacatcacccccctgcaggagcagagcaaagaggtggccatccgcatctttcagggctgccagtttcgctccgtggaggctgtgcaggagatcacagagtatgccaaaagcattcctggttttgtaaatcttgacttgaacgaccaagtaactctcctcaaatatggagtccacgagatcatttacacaatgctggcctccttgatgaataaagatggggttctcatatccgagggccaaggcttcatgacaagggagtttctaaagagcctgcgaaagccttttggtgactttatggagcccaagtttgagtttgctgtgaagttcaatgcactggaattagatgacagcgacttggcaatatttattgctgtcattattctcagtggaggtaagatttgtcttttgatcttctatgaaagagggtgggatgatggtggggtggccaaaagaattttggatttccttagtgttagtctgcattgtcactttaagtgccagtggcatgatgccatgaatcatcactacacgtgcaaaacactgtaccaagaaagagtgtcataggtttgcggtgtgaaggttataagtaacccaggatcttctctttcatccctcaacaatatattttttccagtcaaatgccctcttctcctttttctttttcttttcttttctttgtctctttcttttccttccagaaaggaagattagaggccagtctaatctttggttcctgtaagtaatggcatgtataactttgcttaagacaatgctcacttgatgtagagaagggaccactaagtatttctggtcaaatcatgctcctgccccaccatcagtaagatactactttgaattgcttttgtgatatcaggaattaaggaatacctactgacctccacccactctcttgtgtggattcctctgatggcttcccttaaagtacctttgtgaggtagttggttgtgattaagaatgcaatgtgaaccgaacacacaacatagaaataaatttagttatttagcaatttgttgtatttttggccctgcaagtagtacatgatctgactaaccaattccaaaagccagattttcttctgagtgtgacttttttcttttttttttcttttttttttttcctttttttttttttttttttttttgtgagacagggcctcactctgtcacccagactgaagtgcagttgcacagtcatagctcactgcagcttctaactgcagttagtaagctatgatcatgctacttcataaaagtaatacgtggccattttacagttgggctcaagtgattctcccacctcagcctcccaagtagacaggacaacagctgcacaccaacatgccctgctaattttaaaaatttttttgtagagatgaggtctcattatgttgcccaggctgatctcagattcctgacctcaagcaatcttctcaccttggtctcccaaagcgctgggattataggcataagccaccacgcacaatctaaacattactttcattagcctctcatgagtagaagaaagttttactttcatctctctgtataaaaattgtttttaagtggcaagttttcctattgaagtggactttaggtgagctttttgtatgtactctacagtgtatcctctgtgaaaaacccgtcgggggatagtggtaaactgtatataactgcacaatgtattataaagagcacgatccctttgtcatcttttgttgtccagttgaaaggagaatgtttctgaaatcaggtgcatagtgcagtagtcataagaatagcaaacatttatttaatacttgctgtgtgccaggcagtgttctaagcacttcatgcatatttattcaatcctcacaacaattcagggaagtaaggaccattttacaaatgaggaaaccaaagcactgagaggttttctcatttgcgcaaggttacgtggctagcaaaagatggagacaggattgtgagccaggcatgctggctcagactctacactctctaccatcacatcatgcggaataccggcctttaaatgcctagggtgcaaatagatcacagtatggcatagtttacctttggagctgtgaagtccagggtcaagtcgtgattcactttaaaataactacttgatattgtgggtttttgttgttgttgttgtttgttttttgtttttttgtttttgaggcgaagtctcactcttgttgcccaggctggagtgcaatggcacaatctcggctcactgcaatctccacctcccgggttcaagggattctcctgtctcagcctcccgagtagctgggattacaggcacatgccaccacactcggctaatttttgtatttttagtagagacggggtttcatcatattggtcaggctggtctcgaactcctgacctcaggtgatccgcctgcctcggcctcccaaagtgctgggattataagcatgagccaccatgcccggccgacgttatgtttaatagaacaaaaatatactacctggcatggtttaatatcttgaccaaatttacttcctaaattaatccctggctgtctggtatctttgattaattcagcaaaaaaggatgagattccagtatataagaggtttgccagaagaaaaatattaaattttgaaaaaccagattagaaaaacagttgatattatttatctagtattttattttacttcattttattttattttattttttgagatggagtctcgttctgtcttgcagtggtgcgatctcggctcactacaaccgggttttccgcctcccgggttcaagtgactctcctgcctcagcctccctagtagctgggattacaggaatgtaccactacacccagctaatttttgcatttttactagagacagggtttcacaatgttggccagtctggtctcaaactcctgacctcatgatccacctgcctcagcctcacaaagtgctgggattacaggcatgagccactgcacccagactatttatctactattttaaggcacattttatttttaataaaatttgaaaatatattaatatttaatttatttcaaatatttttcctaagcatactatatatcccatgtctattcttttcacttagtcaatttcccatgtcattacatactctttgttaatagtttttgttaactttttaaataaaagtattacatggtcattttataattgagagtacagaaaggtataagtgaaaagtaaagggctttgccctcaggataaaatagaattaacaaagtcctatttttcctatcaagaagtttacatgcacactcatgtagatagatacatacatacacatatgtgtacgttcatagcagtttgtattcctacccacatatacgaagggaagcatttgaaatgagccattcaaaggtacttagtttctactaggcaaggtctagacaagaaacagtcatgagaattctgggctttatgaagtgagatctgaatctcaggcatctatcgaggatgagatccacctccccgattgtgcttccttagagtaagacaaaatttctcaattagtttttcctcctattccagattttccattcagctaagcaggaggctttcatccactaaacaaatttctgatcctacccagtcttaacaagagtgattgttttctcctctgcaatttattcgaaagtctatcagttactttggtggtttcagaaagaagtgcttttgttggggatccagttggcctcattctgagctggctgtggattcacagaagaacttcacttcagcaaaggctcttagggccccagactaaaagaaagatgagcaagatgtgcgtcatctaagagtgggcgggggtaaggaattggggattaatgggggtgtccctagaggacccaaagaggagatttttagatgaaagtaactgatttgacccaactcagtatttgctggggaaactggagttgctacctaagattgctgccattgaacttcagccttaaaaactgctgataccatttgattggtacttagatttgcctgggcttagcgtctctgctgttcactcagctctcaaaccaagctgctgagaaagatgacctagttcttctcgagtctttctcctctctctctttctcccctgagcttgggggcaagaattagactaaatgaaaggaacagcaacctattctagaaccaaagttcaggacttggtacctttttaagggcatttcatgttcattctctcattccatcctgacagcgctcctgggcttttaattctcatttcacagaaagaaaagtgagggtcgtaaacttaagtgatttgtctgagatctgacaaactagtgccaccgtggaactaacactgaaacctgggtgtcctaactgtcccctctggccctggccagtggactgtggtcagcacactcactcttgtgttggtggctgcaacctgttctctattcactatatccctaaggtaggcccatacctagaagccaggaacagcgcttccttggtcatcatggtaaacaataacttcccttgcactccctagtcttactgacaggctgggcggtgtcaagagtaataaaactgcctccagcaaagccatgtttgcaactggcgccgcagcatcatgccagccaccctagcaaactcccaaaacctacccagcagccaaagccaagcgtaaagctcagtgaagctgacaagccccaggacactctggtggatgttttgcccccttgagtgtttgctgttttgtgaagaaaaagtgtaggagagttccagctggaactctgcagcaggcaaaagctctttttgttaattcaaaacagtttggaatccatttcagttcttcctaaacctccaagatacgggggaggaaattcactggattttacaatatatttttcaaggcaaattgccatcgccgtcctaatgacagagaagctgccgatatcactacaacggctgcagatggcaagtcatccagcctcctcctgtgccctcctgagtctggcttggtgacgcaaaccacctcaagggcagctccttctttttccagcagtcccagcactgttccttctctgtgaagccactttggatggctattcttggcatgatcatagacttttctgctgttgagtgggcaaggagaatagggtagaagcaggggaattgttctcattgctatgcatttatagatcaaagaggagcagatattttatgttaattggataacacctagttctatcaggtcagtaacctggggtccctggggctcccccatgggtcataccagatagatagattttttaaaaatttgttggaattaaagtagaatcaaagcctagtgctagcccagaataagttattcaataaatgcttgttgagtgaataatcatccgaaatgattataatactgcctaccattcgttgaaagcttcagtatgtgggagaatctgtcctgggcactttatatacacccataatctgtttggatttcttggtaggaagactacatggctgcatacatggtctttcattacctccattttatagatggagaaaatggaaatttaaagaggttaagcagtttgccgaaggtcacagagctactaatcggtgaggtcaaggttcagacccaggtctctcagactttaaaactggtgcacttaaccattagactctactttttgcgtattgagatgtggaagcatctcaattaattgcttcagtcttggagttctttggcggttatcaaaaactgcctatttccatattgcctccagatattgtaattaagaatttccaaggccaggcacagtggcttatatctgtaatcccaacattttgggaaaccaaagttggaagatcccttgagcccagaagtttgagaccagcctgggcaacatagggaggcttcgtctctacaaaaaatacaaaaattagccaggtgtggtggcgcatgcatgtgtagtccaagctactctggaggctgaggcaggaggattgcttaagcccaggaatttgaggctccagtgagctgtgattgtgccactgcactccagcctgggcaacagagtgagatcctgtctcaaaaaaaaaaaagaaaagaaaaagaaaaaagaatctccagattatagttcagatattacgtattaatatccaaagccctccttaagacaccattttaatctgtctaacaaaattaacaccctaggttttgacaattgcttgaggagggagtagggcctggtgatagagctaaagactagtgttctggttctttaatttgttcagccagcaggtacctggaaataatgatactgtttgcagaactccccacaaaaatggacagtcaactttaaataactaagtaaacacatctctgcttaatcagataccatcttatactaggttctaatatagataagtggttgcagaaacatttatgagaggaatgttaaattgtcgaaataccatccagtcccttcatttcttcctgcccttcagaaacaaacagaataaccctgatgcagctgtcacggcagaacactcattccagctcacagaacaccagtgttcaatcagcactgagtttgaggagcaccgggtttgggagtattcatctctcttccctgtcccatagctgcccttcaaactcttgagactgttcccagctctaaaatggaaagggtcgtcttctctctggaacaaaagacaggatgtacttgcttgaataggccagtgctttcctggaggaaactccggcttatggagcctctgcttctgcacagcccagtgccttccaccccctcttcatctgctagcatctacattactagttaactggagaggagaccaaacccaaaatattacaaaacatagatattaaaaatactgtgaacaacaatcagcccgctttctcccacctctcctgtaccagctaaatatttacctccctcatccgtagagggtttttggacaagacaggctggtgcctacatggtgaaagttgtttttctctcttttcttgtaatattgcaaataaacaaggatatctgctttctcttgagcaggacaacagccaaagagtattattgcatagttcctgtcccctatctgggctacgattgtgtctgagagtaatagcacttatttattaactggaagaaattttacaggcacctatgttgtttctgcctagcttctgaggctcctctcttaggccactcctctcaccatgcccccacagctagttggtaaaatggctttgaataatgactcgctttgagttatctagaaatgtcccattagttcactattttcataaccccatagacttggtttgacaagggtgaggtttatttatgagttctcaactggcacccaatttttaaaaaccacagagctgggggcggggatagaatgatggggaggagatgaaacatcctagaatcatctgatatactttaaacatatacatatacaggcttttgttgtttgtaaaatatagaagcatctttatctgtgactggttgagaaataaaatcccttccccagcccaggcatggtaggttgggatcatcccagtgagcgagcaagcaattggatttgccctcagagactgactatggggtcgaatgctgagtcattcctgtccccacaccagcagtcctggaagaggctcagtcgatcagtcagtgggctgctttctggagcactttatcattttgggctctcacaatgtgtgtttaaactctgagtgaccccaggcagccttccagactggcacagttcaccaagacgttcagacagatcatctgcaagtgaggaagaatgaaaacccagcactggttcaaatcactcctagcagaggtagtgaaggcatcactcagtcctggagaaatcttcggagggctcaccagcatcacaagtaggtagaccagaagaggcaggctggcccattgcaaagccctggaatcagagggacaggagttccaaatccccactctctctcttcctagatgtgtgcttgcggcaattatttatctctctgagccttaatttccttatcaggaccctgagcaaaccaaataacatgatgtgaagcctctggcacaatgcctgggacatgttcagcacacaataaatgctaattttcccttttgccctatatgatatgatttgaagcagcgccactcaatcctgccagtcacattgctggaaatgccaccaacagtcattcttaagatcgcttattacaatataaatacccctaggggatatcagctaatcgctttatcaactatcgctttaaggggattaggtgtggattgagaacaaaacccagaaggaaagagatcctggaggaaggggagggcttggaagtggggaggattcggacgtcctgtggcccccgaaggagacggggaatggcaggtctgctggattcccagccttcaggaattcccatgaacttcttggggacttcatgtgtttagaccatatttagagagcgtgcatgtgttttgagatcacaggtttttctgagagacattgggaaggaggacagcgggggagtggagtggagagaagtcatacctggcagcttttaacttcacttactgcccttcatgtgctgttgccatttccagaagttgagggagtaaggaagggtaggagttcttggtattcccttatctcttcctttccctccccttatcctgcccagagcatcgcagggtagagccaccagacggattcagggcatggagatggcaggttagtggtagacttggaagggatcgttcttcctatttcagcaccacccttcttcctctacctcccaccctgcatttccagccccagtcagattccttcttggacagagaaggagcagaaatgtacgtacatcactaggcttaaggggggactgcagatggctcccctggtcctgacaaaaaggtggggagcaaaccgcatggctggacgtaaattgagtgacctggaatgactagaacgacagggggcctctaaccccagggtgcacagaggtagggacccaagggctttccggggtcggacagaaatctcgggttccattttcactctgagagacccagaaatgacagagcccatgctcagtttccactggtggtgctgttgagtggaggggctttgaacatggcacacaggaaagggttgcccaccctgtcaccagatgggcttgcactgttttgtggtttgggagttgcatattggaggtgggagtggagtgttgagatgaggcaagttgagatgtaatcgctatttaatgggcagatcaaagaaaacattggctggtttgatttttattatggttatcccgctccaccatcctggcccagtcatatatattattgttatcaggcatagataggggaagcaattaaatgtgaaactgttatttaaaccggcaagtgtcagaatgttaacccacttcagagcgaaggctctaccagcaacatgtgtgttcactgcagaatgtgctggttacagatgatctttatctgtttgtcaaagcatttgcaagatctctattttatgtcatcccctttccctgaaagcagcagcagtaaacgacattgctcctcaaatcatccatggctcagacctctgattaatttaagctggccctgctagcgttcttataaatccccagcaagatgcaggcccaggagtggaaaggggaaaacatccggaaagcagcggggggcagggagggggaaggctgaagggaaaagaaaaaggctgaagggagcaataattgaggaagaaagaataggaaaaatgtagaaaggacccaagaaaatcagagaaatgagaggaaaagaaaggtaagaagaaaatgaggcaagtttacagagcagtaatgaaaatagtaatagctaatttactgtacaacagacactgtgctaagcactttccgtatgtccctcagtcctctgaccaacactatgagttaaattaccgctacagctccaattgttaaagtgaggaaactgaagtatagaaaggttaaggaacttgcccaaggttacctagcttgcaaagttgtaattccaactgcgtctcactcagctggcagtgtgcacccttggccacacattagaatcacccaagagctattaaaaatcctgaaggtcataccccaggcaagtgaatcagaatctctagggatgggtcccaggcattcgtttgcttttttagtctccccagataattttaatatgtagccaaaattgataatccctgcactagaccaagctccgattcaaatttaaatattaagaggacacatgtataactttgctgaataattttttcctatcggtaggatggtgggaaggaattgctataggccacaccatgatactttgctgaattggatcagaaaagtaccctcaaattcccagcatcatttcttcaaggaagtagtgaattggggcaccgtgggttttttgttttgttattgttcttaaaccaccttgcctatgtgcactcaactacaggaacgagaacttgcctgaaaccccaaacgtgtctgcatcaggcattatttttcttgagctcctgaatttctgctctaaccaagaacaactcaaaaaccttcaatttcataactgttgatatgccacccactcctacttacactcctgaccccaaccccatggaaactgcctttattcgaacaaacacaagaattataatatgttctaaagttcctctacctatttcattctcaccatacgcttatgaaagaaatgtcattgtcttgaaaactaagcctaaacccagaaagattagatgatttgtccacaggcacacagaaactaagtggaagagaaacaggactcaagtcttcagtttcccaatccactgcctcctagaacatgcctgtgaactgagggagcagtgcaataaaggaaacttgagaggaagcgcaaaaggaacttaaattgcaaagtactgggttccctaagtagccctgcctcccctccagttttcagcccacacctgaactaaggtctttcattgtctgtggatcaatttacagctgccctgcaatcacatttgttttgtttgtttgtttgttttggttttgaacgccctagggacagtcggtttcagattagtctctatcagagagccaatagggaaagatgcagaaagccaggagagcagctcctagaatagagacaaaaccacctgcattttttctgcctcttcttcaggagactccactgtggtcatctggttccctaattgagacacctcctgagaaaatctgtgctagggaaacacccagcccaggtgggcagatctcaagaggaccagaacgtttgaatctgcttcagataaaccctccacttaacagtaccagatctggacgagatggaagctttgtagatttgcccataatccacagtgctctgtaatcaattccaggaccgtgtggatggagaccggaaaggtttctttcccaattcttcacagcctggggagtagggaactagtaattgactccagcctcctcgagtgctaagtcctggagtctgagtcacacacacttcccaaaagggccttctaagcagcctaccccagcagagaggacccttggccctggccctactccagactcaactgtaacctcagcaaggtgcagggagaggatctcaggtgggcctcctggcaacagtgccttttcaggcactaggctgttgggaatggagagagaagagaaaggccctggcactgtctgggtatttggatggatttctgtggcacaactgtggcacctggcttagctcagtaaaggactgagtgtgcgtggagcagaaaggggaaagagactagtggggagctggtgaccagttggagggtggagggtagggaacaaccctggcagatccattttgcccttgactagagcttaaagaccaaaggaagcgttcttgtttttaagtaagtcaggtgttctaagtttaatgttaatatgctttttcaattagatgtttgagtatatttccccagttgaattatgtagagggaattacaaatgagaatacatcttacaatttttgaattagaatctttgagattatctatttagtccggtctgttttgtttagacaagaaaattgagcccattgatcttaatcagtttgcccaaggtcacagagctggtgagtgaaagctttagatgtagaatatgcaacttttctctgctgccctccttccctaaaccatcttgccttaacggaggctcagtcagggggacaatgggactgatctgtaaatgatctaacttgtcattgcagaaaatatacttactccgtggccacaaaatttcagcccttcagccaagcttcatccatcacatcataaagaataacttgccaaagaggggtttgaaaatccaaaccagatccctctccactcctagagaggccagttccatgacactgcaccggagccaagtgtttccagcaagccctgatcagttgcatgttagtccttgtttgtatgataaacgggacctagtagattaacatcatctcctcagcccaagggctgaccccagtggtgctgctcaagaggaaggaggaggctgggagcggtggctcccgcttgtcatcccagcactttgaggggctgaggagggcaaatctcttgagcccagcattcaagagcagcctggaaaatgtagagattctgtctctaccaaaaaaaaaaaaaaaaaaaaagaagcaggtggaggaaggaggagctgcagaaaggctccgggagccagtgtctagtaagcagaggcctagcccaggctgagtggtcccagcccaggagggcctctctcggcacctgtctttagatgcacgtctgcctctggcctttgagatgcacacattcatcaagcaggaggatctgtagtcattaaaccaaggtgccagtctggggcccagccttcaatgaagcatcagtggctttttcattcccatagagcaactgcgaggaagaccccatgctcccaggggcccaattctccaggccaggaccagatcatttgttccttctcagaatctgagatcttttgctgatggttccaaaattgaatgctgaaatctaaaaagaaaattatacttactctggtcaatgggatatgttggagacctgagagtgaaaaaatcaaactgaagaccagtttccttctttaatggaagaaaagtaagaaagttaacttagaagaatatttagagttctgaaaatcccactctgagaccactctgccatctcacattgttctcttgagccttatctcaatggataaaggtcactagagtttattagacacaggaaaacatcgtttacagacttcttcattgtgtagggattctgccttcaggcctgttcaccagccaggagaattgtgctttttgatccagggctcttggccagaacagccttctcgctcattaactcagtcaaccaaatgcttcctgtgtttccactggtggttcagaacgtagtctctgccctctaatacctcacggtctaacgggggagaaacaagaaagtcagaacttacaatacaagataataaggaataagagcagagcctttggaaccagacagacttagatccaaatgtcagctctgcatttactagcaagtggtctatcttggtaagatgcaactcttttctctaagtcttaatttctccctctgtaaagtatgacctcatggggttattgtgaagattaaatggcatatcgtatataaggcccttggcacgatctttggaaaataataaccattcagtgaatgtaatctactagtatagtagcgattgaggtgtttatagggtgctatgagggcccagagaaaggagatgagatgaacaggagagaggaagggatactgttgaggaaggatttcaggatggaatcccaccacaggctgtattttgaagaaatggttgaagtcaataagaagagtgaagggaaggtgagaatgtttcaggcaggaagaataaaatctgaataagtgcagagtcctgacagaacatagggtgtttgaggaacttggtatggaaatagattaatatggcttaacatggagcaaaatgaaacagaactgagactagaggatgaccaggaccaggtcatgaaggacattaaaggtgggtaaaactcataccatgaaggagagaagagttacagtttttaaaagaaaataaatagccttcaggagctcaaatttgaaatcaatacgagatagatgatcaagtgaatgttctgtcttcttgatgagcctgactgagaaaaccttataatctaacccaaggcaacaaactgagaaattagaaaataaaacttagagattagaaaacaaaaactgaaacccaaactttttacttggaaatttaaaaacatgcttctatataactcttaggttaaaaatgaaatcaaaattgtaagacaagctgtttagaaaagaactatgagagtaccgtttatcaaagcccatgggatgaaaccaaagtggcactaagaagaaaatgtggaggcttcaatgcatttattagaatacaaagaataccaaatcaaatgaattaagcattcaactcaagaaaactagaaaaagagaagaaagtaaacctaaagaaagttttaaaaaggaattcaataaattaaaaacaaaacacacaatttttaaaaacagacttgattaataaaaccaaaagctatgtcttttttaaaaaagcaaaaaatagataaacctttgacaaatcagatttttttaatgagagaatgcacaaataaagagctctaagagctgggcatggtgactcatgcctatattcccagcactttgggaggctgaggcaggaggattggttgaggccaggagtttaagaccagcctgggctacgtagcaagaccccacctctacaaaaaatttcgaaattagttgggtgtggcggctcatgcctatagtcccagctacttgggaggctaaagcaggaggatcacctgaacccaggagttggaggctgcagtgagccatgatcatgccactgcactgggcaacagattaagactctgtcacaaaaaaaaaagcgttaagttaaggagcgtgaataaaaataatacatttcatattctaagacaatatcatctacaactttattccaatataaattactaaaactttaccatataagtagtagaaagcctgaatagataaaagctatggaagaaaaattaaagatagtgatagatttatcaccaagctcagatggttctgcaaacaaattctaagaaaccgtcagggaacagatcattactgcgttgacacagaaggcaaacctctcaacttggtgtataaggctagttaacattgttactaaaacaggcaaagaatggcccccaaaataactctaaaccagtatcacctacaaatacaaaaactctatataaaatattagcaagtgagtacaagagtataaggaactctattaatgtaattcactgtgctaggttaagataaaaccataactcttcagatatcatagctctttagatagaaaaatgtaaaagtatttgataaaaattcaacaacattcctgactaaaacaaattaaaattgtaaaacccctggaaagccaggagtaaaacatgttctccataatctatagcaaacatcatagttgctgataaaccattagaagcatttccttcaaagttaggaataaaacaagaattgctactattgctactattatttaatcccatattggaggttttagccaacacactatggcaagaagaggaaatgagaaaggttaatgctgcaaaagaagaaataaataaagctaccattgctgatataattatctatccaaaaaaagtagaaatccatgattaaaagctatttgaactgataaaagttcagaaaattggaattgtttcaatatactaaaatcaattagttttctgcacatcagtggggatatattagatgtaatgaaaatgaagggtccattcacaatagaagctataaagtatttgagaataaatctaacaagatctacataaagaaaaaagtaaactgcttaaaagtaatttaagttcaccatttgcaaattgaactaaagaaaaatctaaagaagaactagtgaaaattgcttgcaatcttaccactgaaaagaaacctctgttaaaatgtatcagtattttaaaactgtgttttgtcctttggaaatatgccatattaagcaaacatagcataagcaaattaagcaaaaagacaaacctttttttaaaagcatatttgtgaaaaaagcatatttgaagctatgataagaaactgagtagaagctataaaacgtagattcatcaggaaggagcagaagttgaaaaggagatttctggctgggcacagtggctcatgcctgtaatcccagcactttgggaggccaaggcgggtggatcacttgaggtcaggagtttgagacaagcctggccaacatggtgaaaccctatctctactaaaaatacaaaaattagaaaggcgtggtggtgagcacctatcatcccagctactcaggaggctgaggcaggagaatagcttgatcccgggaggcataggttgtagtgagccgacgtcatgccactgcactccagcctggatgacagagcaagactccatctcaaaaaaaaaaaaaaagaaaagaaaagaaaaggagatttctgagtagaaacacgttagcagaggaaacttcatttggggaacaggattgttttgatgccatgctccctcagctgaccacacagattacatcctggccagaaaaaggccctgcaaagagctctgatcattttggttctgattccatccttagttcttacccattatctgcttacccttcctccccacctatttaagatacaaagcaaaacaaaccaaaaatacagatgagttgcttggtagagctgcctaggcctccaaggcggggcccagaggattttttgactgaaccccctgttgtgttttccatatgtgcttccccagaccgcccaggtttgctgaatgtgaagcccattgaagacattcaagacaacctgctacaagccctggagctccagctgaagctgaaccaccctgagtcctcacagctgtttgccaagctgctccagaaaatgacagacctcagacagattgtcacggaacacgtgcagctactgcaggtgatcaagaagacggagacagacatgagtcttcacccgctcctgcaggagatctacaaggacttgtactagcagagagtcctgagccactgccaacatttcccttcttccagttgcactattctgagggaaaatctgacacctaagaaatttactgtgaaaaagcattttaaaaagaaaaggttttagaatatgatctattttatgcatattgtttataaagacacatttacaatttacttttaatattaaaaattaccatattatgaaattgctgatagtatttgaagactgagtcttgtgtgtttcccaccctagcccccaggctttcttttttaccccttttccttctcccctccctccctccatccctctcactcttcctccctcccttccctcctttccttcttcctttatttttcttttctttcttagacattttaaaatatgtgagtggaactgctgatacactttcattctcagtaaattaattttttactcaatttacaacttttcggaactctgcatctgctttaacaatcagaactaagaagggaaggggaacttcagaatcagaaactgctcagagcatgtgttttgtagcctggatgtgctgatatgcagcatatccctgggattacccagaattcagtctt

SEQ ID NO: 24894 - DNA, 1843 bp, Homo Sapiens
ctaatgaactcctgggtcacgtggtgcgcacgcgccaaaggcacacgataaaggaaaacgcgggcttatcgtggcctttaaaatccggcttggtgagcttgggtcgcctctgaaggagaaccattttccatctctttcatagttttttcccccagtcagcgtggtagcggtattctccgcggcagtgacagtaattgtttttgcctctttagccaagacttccgccctcgatcaagatggtggttggacggccttcctaacctttacggggcctggcggtgctgacgcctgagctggtaggggtggagcaggtaggaaacagcaaatgcagaagctgctgcgcggaagtcggccatggactggaaagaagttcttcgtcggcgcctagcgacgcccaacacctgtccaaacaaaaaaaaaagtgaacaagaattaaaagatgaagaaatggatttatttacaaaatattactccgaatggaaaggaggtagaaaaaacacaaatgaattctataagaccattccccggttttattataggctgcctgctgaagatgaagtcttactacagaaattaagagaggaatcaagagctgtctttctacaaagaaaaagcagagaactgttagataatgaagaattacagaacttatggtttttgctggacaaacaccagacaccacctatgattggagaggaagcgatgatcaattacgaaaactttttgaaggttggtgaaaaggctggagcaaagtgcaagcaatttttcacagcaaaagtctttgctaaactccttcatacagattcatatggaagaatttccatcatgcagttctttaattatgtcatgagaaaagtttggcttcatcaaacaagaataggactcagtttatatgatgtcgctgggcaggggtaccttcgggaatctgatttagaaaactacatattggaacttatccctacgttgccacaattagatggtctggaaaaatctttctactccttttatgtttgtacagcagttaggaagttcttcttctttttagatcctttaagaacaggaaagataaaaattcaagatattttagcatgcagcttcctagatgatttattggagctaagggatgaggaactgtccaaggagagtcaagaaacaaattggttttctgctccttctgccctaagagtttatggccagtacttgaatcttgataaagatcacaatggcatgctcagtaaagaagaactctcacgctatggaacagctaccatgaccaatgtcttcttagaccgtgttttccaggagtgtctcacttatgatggagaaatggactataagacctacttggactttgtccttgcattagaaaacagaaaggaacctgcagctctacaatatattttcaaactgcttgatattgagaacaaaggatacctgaatgtcttttcacttaattatttctttagggccatacaggaactaatgaaaatccatggacaagatcctgtttcatttcaagatgtcaaggatgaaatctttgacatggtaaaaccaaaggatcctttgaaaatctctcttcaggatttaatcaacagtaatcaaggagacacagtaaccaccattctaatcgatttgaatggcttctggacttacgagaacagagaggctcttgttgcaaatgacagtgaaaactctgcagaccttgatgatacatgatctctgaaagactagactgtcttatattatgagatacttgaatgctgcatgtaaagcctttaaagcaaaatcctcagaaatggtctaaataaaacacttgatatgcctagagaacacaaaaaaaaaa

SEQ ID NO: 24895 - DNA, 8500 bp, Homo Sapiens
  misc_feature (4355)..(4355): n is a, c, g, or t
tcgttacataatctcggaccggaggagcggcggcacatggcggcggagcggcgctggtggttcgcgtcctgcgccggcagtcgggtccctttacggacggccggggccgcgaccctttcccactgttctcccacgcgatggactcgttggcgggcctttccccgagggaagcggccggcgtgctgagcctgtcctgtgttggcgtgtgttccacatgcgcttgggcctggccacatggaagtatgcgagacttaagagctcaagtgactagtggtctcctgccatttccagaagtgactcttcaagcccttggagaagacgaaataacattagaatctgtgcttcgtggaaagtttgctgcagggaaaaatggacttgcttgcttggcttgtggtccacaacttgaggtagtaaactctataacaggagagcgattgtctgcttacagattcagtggagtcaatgaacagcctcctgtagttttagctgtgaaagaattctcttggcagaagagaactggattattaataggattggaagaaacagaagggagtgttctctgtctttatgaccttggaatatcaaaagtagttaaagcagttgttcttcctggaagggtaacagctattgaacctataattaatcatggaggagccagtgcaagcactcagcatttacatccaagtctgcgatggctttttggagtggcagctgtggtcactgatgttggacagatccttcttgttgacctatgtttggatgacttgtcatgcaatcaaaatgaagttgaagcatcagatcttgaagttctaactggtatcccagctgaagtaccacacattagagaaagtgtaatgagacaagggcgccatctgtgtttccagttagtaagtccaacaggaacagctgtttcaactcttagttacataagcaggacaaatcagcttgctgtaggtttttctgatggctatctagcactttggaacatgaaaagcatgaaaagagaatattacatacaattggaaagtggacaagttcctgtatatgctgtcacttttcaagaacctgagaatgatcctcggaattgctgttacttgtgggctgttcagtctacacaagatagtgaaggggatgttttgagtttgcatctgctgcagctggcctttggtaatagaaagtgtttggcatcaggacaaatcttatatgaggggttagaatactgtgaagaaagatacaccctggacctgacaggtggcatgttccctttgaggggacagacgagtaataccaaattgttgggatgccagagtatagagaaatttcgatctcatggtgacagggaggaaggcgtgaatgaagctctatcgcctgacactagtgtttcagtctttacctggcaggtgaatatatatggacagggaaagccttctgtatatttggggctttttggtataaatcgttggtatcatgcacaaatgccagattcgttaaggtcaggagaatatctacataattgctcttattttgcactgtggtcattggagtctgttgtaagtaggacttctccacatggcatcttggatatattagtacatgagagaagtttaaatagaggagtccctccttcatatccacctcccgagcagttttttaatccaagcacttataattttgatgccacttgtttgttaaactcgggagttgttcatttaacttgtactggctttcagaaggagactttgacttttttaaagaaatcaggtccatcactcaatgaactcattcctgatggttataatcgatgtcttgtagctggccttctttccccaagatttgttgatgttcagccttccagtttaagccaagaagaacagttagaagctatattgtcagcagcaattcagactagttccctgggacttttgactggttatatccgaagatggataacagaagaacaaccaaattctgccactaatttgcgctttgttcttgaatggacgtggaataaagtggttctcacaaaagaggaatttgacagactatgtgtgccattatttgatggttcgtgtcatttcatggatccacaaactatacagtctatccagcaatgctatttgcttcttagcaatcttaatatagtcttgagctgttttgcatcagaagcccgagagatcactgagagaggactgatagacttaagcaataagtttgtggtttcccacctcatctgtcagtatgcacaagtggttctttggttctctcattctgggcttttaccagaaggcatagatgattctgtgcagttgtcaaggttatgctacaactaccctgtaattcagaactactacaccagtcgtcgacagaagtttgagcgtttatcaagagggaagtggaatcccgattgcttgatgattgatggactggtttctcagttaggagagcgaattgagaagttgtggaaacgaggtgaaggaggcacaggaaaatatcctcctggtagtctgcatgcagtacttgatatgtacctattagacggcgttactgaagcagccaaacactctattaccatttatttgctacttgatattatgtattcctttcccaacaaaacagacactcccattgaatctttcccaactgtatttgccatttcttggggccaagttaaacttattcaggggttttggttgatagatcataatgactatgagagtggtttggatcttttgtttcatccagctactgcaaaacctttgtcatggcaacattcaaagattattcaggcattcatgagtcagggcgagcacagacaagccctcagatatattcagacaatgaagccaacagtgtccagtggtaacgatgttatccttcacctcactgttttgctttttaataggtgtatggttgaagcctggaattttttgcggcaacattgcaataggttgaatatagaggagttactgaagcacatgtatgaagtctgtcaggaaatgggcttgatggaagatttactgaagttaccatttacagacactgagcaggaatgtttagtgaaatttttgcagtccagtgccagcgttcagaatcatgaattccttttagtgcaccatttgcagcgtgccaattatgtgcctgccttgaagctgaaccaaactctgaagattaatgttatgaatgatcgtgatcctcgtttgcgggagagatcactggctcgaaattctatattagaccagtatggaaaaatccttcctagagtccatcgaaaattagccattgaacgagctaagccttatcatctgtcaacatcatcagtttttcgattagtttctagacccaaaccattatcagcagttccaaagcaagttgtaacaggaactgtgttgacaagatctgttttcatcaacaatgtgttatctaaaattggagaagtttgggcaagcaaagaacctataaatagcaccacacctttcaatagttctaaaatagaagaaccatctcctatagtgtattcgctcccagctccagagctgcctgaggcattttttggaacaccaatttcaaaagcatcacaaaaaatttctagactgctagatttggttgttcagcctgtcccccggccttctcagtgttcggagtctattcagcaaagctccatgaaatctcctttgtacctagtatcccgttcactgccctcaagttcgcaattaaaaggatcgcctcaggccatctccagggcttcagaattacatttgcttgaaactcctcttgtagttaagaaggctaaaagtttggccatgtcagttactacttctggattttctgaattcactcctcagtccatcctgaggtctactcttcgatcaacacctttagcatctccctctccatcacctggaaggtctcctcaacgacttaaagaaactagaatttcatttgtggaagaagatgtccacccaaaatggattcctggggctgcagatgatagcaaattagaagtatttactacacctaaaaaatgtgcagttccagtggaaactgaatggctgaagagcaaagataggaccacatcttttttcctgaacagccctgaaaaggagcatcaagaaatggatgaggggtcacaaagtttagagaaactggatgtgagcaaaggaaacagcagtgtttcaatcacatccgatgagactaccttagagtatcaggatgcaccgtcaccggaagaccttgaagagactgttttcacggcctctaagcccaaaagctcttccactgcactaactactaatgtaactgaacaaactgaaaaggatggagataaagatgtatttgcatcagaagtaactccttcngacctacagaaacaaatggggcaatttagaagatgcagaaacaaaggatctcttacttgcagcagaggcattttcagaattgaatcacttaagccccggttcaaggcaactgaagcttctctttgtgcaccatcagtctatgaagggaaaatcttcacccagaagtccaaggtaccagtgttggacgaaggattaacatctgttgaaacctacacccctgcaattagagcaaatgacaataaatctatggctgatgtccttggtgatggtggaaactcctcgctcactatctctgaaggtcctattgtctctgagcgcaggcttaaccaggaagtagcgctgaacttaaaagaagatcatgaagtagaagttggtgtactaaaagaaagtgttgacttaccagaagaaaagcttccaatttctgacagccctcctgatactcaagaaattcatgtgattgaacaagaaaagcttgaagctcaagattcaggagaagaggctaggaatctttcatttaatgagttatatccctctggaacacttaagcttcagtacaattttgatactattgaccaacagttttgtgacttagctgataacaaagacactgctgaatgtgacattgctgaagtagatggggaactttttgtggctcaaagcaactttaccttgatattggaaggtgaagaaggagaagttgagccaggtgattttgcatcatctgatgtgttacctaaagcagctaacacagcaactgaagaaaaacttgtatgcagtggggaaaatgataatcatggacaaattgcaaatttgccatctgccgtaactagtgaccaaaagtcccaaaaagtagacactttaccatatgtgcctgaacctattaaagtagcaattgcagaaaatttactagatgtaattaaagacacaagaagtaaagaaattacttcagatacaatggaacagtccattcatgaaacaatacctttagtgagccaaaacataatgtgtcccactaaattggtcaaatctgcatttaagactgctcaggaaacaagcacaatgactatgaatgtcagccaggttgatgacgtggtttcctccaaaactcgtacgagaggtcaacgtatccaaaacgtgaatgtcaaatcagcacaacaggaagcatcagcagatgttgctactcctaagatgccagggcagtcagtcaggaagaaaactaggaaggcaaaagaaatttctgaagcttctgaaaacatctattctgatgtcagaggactatctcagaaccagcaaatacctcaaaattctgttacgcctaggagaggaaggagaaagaaagaagttaatcaggacatactagaaaacaccagttctgtgggacaagaattacagatcactacaggtagggaatcaaaaagattaaaatcatctcagctgttggaaccagcagttgaagaaactactaaaaaagaagttaaggtttcatctgttacaaaaaggactcctagaagaattaaaagatctgtagaaaatcaggaaagtgttgaaattataaatgatctaaaagttagtacggtaacaagtcctagcagaatgatcagaaaattgagaagtactaatttagatgcttctgaaaatacaggaaataagcaagatgataaatccagtgacaagcagctgcgtattaaacatgttagaagggtcagagggagagaagttagtccatcagatgtgagagaagactccaaccttgagtcatctcagttgactgttcaagcagaatttgatatgtctgccatacctagaaaacgtggtagaccaagaaaaatcaatccatctgaagatgtaggatctaaggctgttaaggaagagagaagccccaagaagaaagaagctcccagcattagaaggagatctacaagaaataccccagctaaaagtgaaaatgttgatgttggaaaaccagctttaggaaaatccattttagtgccaaacgaggaactttcgatggtgatgagctctaagaaaaaacttacaaaaaagactgaaagtcaaagccaaaaacgttcattgcactcagtatcagaagaacgcacagatgaaatgacacataaagaaacaaatgagcaggaagaaagattgctcgccacagcttccttcactaaatcatcccgcagcagcaggactcggtctagcaaggccatcttgttgccggacctttctgaaccaaacaatgagcctttattttctccagcgtcagaagttccaagggaagcaaaagctaaaaaaatagaggttcctgcacagctgaaagaattagtttcggatttatcttctcagtttgtcatctcacctcctgctttaaggagcagacaaaaaaacacatccaataagaacaagcttgaagatgaactgaaagatgatgcacaatcagtagaaactctgggaaagccaaaagcgaaacgaatcaggacgtcaaaaacaaaacaagcaagcaaaaacacagaaaaagaaagtgcttggtcacctcctcccatagaaattcggctgatttcccccttggctagcccagctgacggagtcaagagcaaaccaagaaaaactacagaagtgacaggaacaggtcttggaaggaacagaaagaaactgtcttcctatccaaagcaaattttacgcagaaaaatgctgtaatttcttgggaagattttaatgtacacctatttgtaaagtcatcagaatagtgtggattattaaatatctagtttggaagaaaataatttatataaattattgtaaatttttatgtaaacagaaggtcttcaataagtaaagtaactccatatggagtgattgtttcagtccaggcaatttttctattttatattaagacttcatacatttatatatgtaaatatggcttattaatggaatgttaaataaaatgtatacttcacagtcgtttgtgtcttggatttttgaaagggaggggatatctgtttaaatagttttatatgctcattggtctcattttctctataattaaaatactagaccagtcttaaaatggggatgattgaagtattgatatttctttttacagttactattttataatttatgcactttgattctgtgattcagatttctaatcagaaaatgtatttttttgtttttggctgttactatgttaaaattgaattatgggcatgtcattttgccatctttgtagtttcacaaattttgtgtaatctacctcaaatgaataatccaagtattggttaactataatgttggcatctcttattcggcaagcttaaaggctctttaaagtcttaattagtcaaagactaatccaggttagattgaccggttcactgctcacttgcaaccttatcaaagggtttgacaaagggaaatgtaaaataaatctgtttatggatattgagtgcatcttgtatgtgcctaatattgataggatgagatgtctgaacaaatttttataatattgctgtgaaggagcttgctattgaaccacagaaatcccttaatattcaggttttaaaactggcaaattctcacaggacctcaggcacagattattgaggttgggagagagtgagtagatgtagaaaaggagaaaaacaacacacgccctgttctctacagtacaactgtgtgcaattaagcaatggtacttgatgtaggctctaacactcatcaataaataagtgttgtaaaataatttataacaggtaatcgatagtgtgtaatgaatggactattaataattgattatctagaaacgaactgctttcgtgggcttttaatattttaatgtgaagcatatgcagtgtgctttctgcatttatttttctaccaaataatacagataatgagaaattggtgaaaatgcctacgcaaagtgttgacagtgtgaaagcagtgcgagtgcggccttttagtcaggttagtgatggatgttacgctgccttgttgaaaatttcactgactttgattttattacttttttaatgatagttatcaaacttgtatttaagctgcttgtcatttatggaatattgaacttatttaaatgaacttgttaaatgaataaagagctaaacataaaaaaaaaaaaaaaaaaa

SEQ ID NO: 24896 - DNA, 4759 bp, Homo Sapiens
aagggcgctccgcgagcccgtctctcctcgaatgaaaggaaacaacctccggcgacagagccccgctctcaggcactgctggagaaccgagaccgacttctttctctttaccctcattggcgcttctctcctgcagtccgcctctgggccctgccgcatttcttgagacttaaagtggcattctaaaggcaatttaaaaatcatgtcaagctcagttgaacagaaaaaagggcctacaagacagcgcaaatgtggcttttgtaagtcaaatagagacaaggaatgtggacagttactaatatctgaaaaccagaaggtggcagcgcaccataagtgcatgctcttttcatctgctttggtatcatcacactctgataatgaaagtcttggtggattttctattgaagatgtccaaaaggaaattaaaagaggcacgaagctgatgtgttctttgtgccattgtcctggagcaacaattggttgtgatgtgaaaacatgtcacaggacataccactaccactgtgcattgcatgataaagctcaaatacgagagaaaccttcacaaggaatttacatggtctattgccgaaaacacaagaaaactgcacataactccgaagctgatttagaagaaagttttaatgaacatgaactggagccctcatcacctaaaagtaaaaagaaaagtcgcaaaggaaggccaagaaaaactaattttaaagggctgtcagaagataccaggtccacatcctcccatggaacagatgaaatggaaagtagttcctatagagataggtctccacacagaagcagccctagtgacaccaggcctaaatgtggattttgccatgtaggggaggaagaaaatgaagcacgaggaaaactgcatatatttaatgccaagaaggcagctgcccattataagtgcatgttgttttcttctggcacagtccagctcacaacaacatcaagagcagaatttggagactttgatattaaaactgtacttcaggagattaaacgaggaaaaagaatgaaatgtacactttgcagtcagcctggtgctactattggatgtgaaataaaagcctgtgttaagacttaccattaccactgtggagtacaagacaaagctaaatacattgaaaatatgtcacgaggaatttacaaactatactgtaaaaatcatagtggaaatgatgagagagatgaagaagatgaggaacgagagagtaaaagccgaggaaaagtagaaattgatcagcaacaactaactcagcagcaacttaatggaaactaggtatgaaagttaattatatgggatctgttgtcaggatacaatacacactgatatatacatgttgaagtaatggtatgcagtaagattttttttaatcctattatgtttagttaagagcatgttactaaaatgctgaggattttgtaggcttgcatagtagttgttttttaactagctgattttgtaaccataaaaacaagctatctgctttatcaataagtgtagttgtaatgtcaaatcaataagatattcacactcctcaataacattatattgattgtgttcccctcaagcatcatattttacatttttttatcatcttttaaacaggttcatgggacagagttagaaaactgggaatgaataagacatccataactactattcttttttcactgttttctaaaatcaaaaagggtttgtaactttttactgcccaactcttagatccttcattgaactgcctaaaaatgtcttgtttgttttatgagccctcactagaaggctgagtttgacatgttgatattacgtagctatagtttgcagtttctgggaagcaattgaaacactattaaccctgtgtatagtgtcaacagttaaagcagacgaaacgaagtaagctatatttctggactgaacaaagctctgctgtttagagcatttaagtttgtttagtggatccatactcaaaggaaagcataagcaaattttcctttacaatgcaaacatgccactggtggcagcacatggtaatttgtggatttttttttcatactcaagtaatggaggctagaaatgaagagaaccttctttttctcttgactttgacagcacatgctaaaaatctcttccaagaagtatgctaaagcttttcatttggttcctgttaaagttgttctcactgaccagcatggactcaggcaactggtaatgataagctatgagctccagtgcttttgccaaaattctcttgacagcacacctcctctctttccatgttatacaaaggacttctggcaaaatgattgagtccttcaagtttaaactaacatttggcaacagcaaattaaacgtttttaagatgtaaagaaagggttaccgcttgctaaggacttcagacaccatgtccgaaacctgttcctctcaagtgccctgttgtgtggaacacttcacatattggcgcacagtacgtaaggaggtctcatgtgctgtaggagtaaaaaagtctttgcataaaacagtatttatttttacttttgtgaccactattttagaaactttatttaatattttaatgttttcagtcattgctttggttatctataaaataggcttttgtgccctacttttcttcttgtagggcttggtggtgttttatcgattgtcagaattgtttttgaaagcctaagaacccagctttttagaaaggattttcacactggcatttctaggtagtgatattttcttccacttacctgctgaagcacatttatgcatttctttatggcaaaaccaaataactttagttgtggtctgcctgatactaccatagcacctcagtaccaaggggagggattttgactagttgaattattaagccaccacaataaagcagatttttaaataagatataataatgttaacttgactgtacattgagatattctgcagctgatagagcagcattttaaaaatgtaacaggtggaaaattacactgtgcttaatgactgatttttttttaaactgcgagtcccttaagatcacgtttgtcaagtgtgtattcacacatttacttaaatcaagggactcaatgcttgcttttattttaaccatcttttactatttttagaaggaaactagctttagtagtgggttgccctgtatgttttctctttttgctcttaatatgccattgggtttttgtgtgtatgtgattttcaaaattcatgacttgaagtgcaaggacagatctagatgtttgtttaccaagctatgtgacttctcccaaaggatctgtactttctttccttacaacagcttgaaaatcattattttaaaatccttaaatcactgtgtctagatcattttttacattgtgtgccatagacttacccatgggacaacagagctccttcatttttggacaactactgtaatcattttttttttaggaaaaatggaaggtgccgggggtaatcatggccagtcaataattatataaaggagttcaaatactatagctgtcagttgatgaatttgttatgtagtaaaatgtatgactttgtatgggtttcttcagccctttttctgccactagcaaccagaatagcactttaccttttggttggctagataagtggctgactacctgtttttctcactgtggtgtgattggctaaacaatctcgcattaaaaattcaaatgtaaattgaattcacatgaaaaatcatgtttggttgtaaacctccaatgttttgattctctaatcatgttttcgtcacatgctgagtaaaagtgccttacaatgtaaaaattgtacagtacttatgttcccaagtagcatcatcatcttctgggtagtaattacattgtggtattaatatttagaaaaatggacctcagcagtgtatttactgtacatctcttaagtccttaactgtagttttaataagcatgacattatttgataagtatataacatttacatcatttcaaaaaatactgccgttactgtcttttatgcatattttagcctgaaattttgaagcgtcttttttctttcttttttctttttttgttttgttttttgttattgatattaaacagtgtaatctttgcaagcgtatattgaagattattctggagcatttattgccttaccagaaatgttagtaggaaatgttctttagagtagaaagatagacttgagtttctatacttttaagaagagctctttgttcctgggggaggggggcagggggtgaattttactttcatctcaagttattaaaaacccacaactgaagtaaattttatttcaagaatcagcagttttagaatttcagatagtacttgctcagaagtacatgctactcaagatattaagagataacaagatctgtagatctgctattgaatcagaatctgtgtacttgaacaaatgtgtgaatctcaaatatctcaaagcaaaagaaaaagtgttctagagtgttgttgcttttttaaaaaaagcgctgaagttagaccaaggtatacagttttgttctaacagacatttaggttaattgtaaagataaggaatgcattatgggtcaaaaatcaaacattcctctcatgttatgtatattttgttcctgttatattggctttattttcaaaattgtagtttgtagtattagtttccttttattggtattcttgcatatactattcattcaataaatgacttatgactttc

SEQ ID NO: 24897 - DNA, 5337 bp, Homo Sapiens
atgagcatagtgatcccattgggggttgatacagcagagacgtcatacttggaaatggctgcaggttcagaaccagaatccgtagaagctagccctgtggtagttgagaaatccaacagttatccccaccagttatataccagcagctcacatcattcacacagttacattggtttgccctatgcggaccataattatggtgctcgtcctcctccgacacctccggcttcccctcctccatcagtccttattagcaaaaatgaagtaggcatatttaccactcctaattttgatgaaacttccagtgctactacaatcagcacatctgaggatggaagttatggtactgatgtaaccaggtgcatatgtggttttacacatgatgatggatacatgatctgttgtgacaaatgcagcgtttggcaacatattgactgcatggggattgataggcagcatattcctgatacatatctatgtgaacgttgtcagcctaggaatttggataaagagagggcagtgctactacaacgccggaaaagggaaaatatgtcagatggtgataccagtgcaactgagagtggtgatgaggttcctgtggaattatatactgcatttcagcatactccaacatcaattactttaactgcttcaagagtttccaaagttaatgataaaagaaggaaaaaaagcggggagaaagaacaacacatttcaaaatgtaaaaaggcatttcgtgaaggatctaggaagtcatcaagagttaagggttcagctccagagattgatccttcatctgatggttcaaattttggatgggagacaaagatcaaagcatggatggatcgatatgaagaagcaaataacaaccagtacagtgagggtgttcagagggaggcacaaagaatagctctgagattaggcaatggaaatgacaaaaaagagatgaataaatccgatttgaataccaacaatttgctcttcaaacctcctgtagagagccatatacaaaagaataagaaaattcttaaatctgcaaaagatttgcctcctgatgcacttatcattgaatacagagggaagtttatgctgagagaacagtttgaagcaaatgggtatttctttaaaagaccatacccttttgtgttattctactctaaatttcatgggctagaaatgtgtgttgatgcaaggacttttgggaatgaggctcgattcatcaggcggtcttgtacacccaatgcagaggtgaggcatgaaattcaagatggaaccatacatctttatatttattctatacacagtattccaaagggaactgaaattactattgcctttgattttgactatggaaattgtaagtacaaggtggactgtgcatgcctcaaagaaaacccagagtgccctgttctaaaacgtagttctgaatccatggaaaatatcaatagtggttatgagaccagacggaaaaaaggaaagatgacaagagaagaaagaaaaatggaagcaattttgcaagcttttgccagacttgaaaagagagagaaaagaagagaacaagctttggaaaggatcagcacagccaaaactgaagttaaaactgaatgtaaagatacacagattgtcagtgatgctgaagttattcaggaacaagcaaaagaagaaaatgctagcaagccaacccctgccaaagtaaatagaactaaacagagaaaaagtttttctcggagtaggactcacattggacagcagcgtcggagacacagaactgtcagcatgtgttcagatatccagccatcttctcctgatatagaagttacttcacaacaaaatgatattgaaaatactgtacttacaatagaaccagaaactgaaactgcactagcagaaataattactgaaactgaagttccagcacttaataaatgtcctaccaagtaccccaaaacaaagaagcacttggttaatgaatggttaagtgagaagaatgagaagacaggaaaaccttcagatggcctttcagaaaggcctctacgcataactacagatcctgaagtgttagctacacaactcaattctttaccaggtctcacttacagcccccatgtatactccactcctaagcattatattagatttacttcaccattcctttcagaaaaaaggagaagaaaagaacctactgaaaacatttctggttcatgcaagaagcgatggttgaaacaagctctggaagaagaaaattcagcaattttacatagatttaattcaccctgtcaagaaagatccagaagtcctgcagtcaatggtgaaaataaaagtccactactattaaatgacagctgttcccttccagatttaactacaccactaaaaaaacgaagattttatcagttgctagattcggtttactcagaaacctccacacctactccttccccgtatgctacaccaactcacaccgatattactcctatggacccatcttttgccacgcctccacggataaaatcagatgatgaaacttgtagaaatggttataaacccatatattcaccagttaccccagtaactcctggtacaccaggaaataccatgcactttgagaatatttcttccccagaaagttctccagaaataaagagacgcacttatagtcaagagggatatgacagatcttcaaccatgttaacattggggccttttagaaattctaatttaactgaactgggtctgcaagaaataaagactattggttatacgagccctaggagtaggactgaagtcaacaggcagtgtcctggagaaaaggaacctgtgtcagaccttcagctaggactcgatgcagttgagccaactgccctacataaaaccctggaaacgcctgcacatgacagggctgagcccaacagccaactggactcgactcactctggacggggcacaatgtattcttcctgggtaaagagccctgacagaacaggagttaacttctcagtgaactccaacttgagggacctgacaccctcgcatcagttggaggttggaggaggcttccgaataagtgagtcaaagtgcctgatgcaggatgatactagaggcatgtttatggaaacaactgtgttttgtacttccgaagatgggcttgtatctggtttcggacggactgttaatgacaatttgatcgacgggaattgcacaccccagaatccaccacaaaagaaaaaggtttctctattagaataccgtaagagacaacgtgaagctaggaaaagtggctctaagacagagaactttccactcattagtgtatcaccccatgcaagtggaagcttgagcaacaatggtgatggctgtgccagcagtaatgacaatggggagcaggtggaccacactgctagcctacctttaccaacaccagctacagtttataatgccacttctgaagaaactagcaataactgccctgttaaggatgctactgctagtgagaagaatgaaccagaagttcaatggactgcctcaacttcagtggaacaagtcagagaaaggagttatcagagagctttacttctcagtgatcaccgaaaagataaagatagtgggggagaatcaccatgtgtctcatgttcaccgagtcatgttcagtcttcaccttcatctcattcaaatcacataccccagttgcaagctaagggcccagtcccttctttcagtgaacttatggaagaccctgatcctgaaaatccagaacccacaactacgaatgaatgtccatccccagatacttctcaaaatacttgtaaaagtcctccaaaaatgagcaagcctggttcacctggatctgtaattcctgctcaagcacacgggaaaatattcacaaaaccagatccccaatgggactccacagttagtgcatccgaagctgaaaatggtgttcacctaaaaacagagctccaacaaaaacagctatcaaataacaaccaagcactttcaaagaatcatcctcctcagacacacgttcgtaattcatctgagcaactttcacaaaagctgccttctgtgccaacaaagttgcactgtcctccatcacctcacctagaaaatcctccaaagtcatccacgcctcacacacctgtacagcatggttatctttcaccaaagcctccttcacagcagttaggatctccctacaggcctcatcattcacagtcacctcaagttggaacacctcagcgagagcctcaaagaaacttttatccagcagcacagaaccttccagccaatactcagcaggcaacttctggaacattatttacacagacaccctcaggacaatcttcagcaacatacagtcagtttaaccaacaaagtctgaacagcacggcaccaccccctccacctcctccacctccttcttcgtcttactatcaaaaccagcagccctctgcaaactttcagaattataatcagctcaaaggtagtctttctcaacaaactgtgtttacatcaggaccaaatcaagcacttcctggcaccacaagccagcaaacagttccaggacaccacgtgactccagggcattttttgccctctcagaaccctaccattcaccatcaaactgctgctgccgtagtcccccctcctcctccaccaccacctgctccaggaccgcaccttgtacaacagccgaattcccatcagcaacactctgtagcacatgtagtagggcctgttcatgcggtcacccctgggtcgcatattcattctcaaactgctggacaccacttacccccacccccaccccctcctggtcctgcccctcatcaccatccaccaccccatccatccacaggactccaaggtctacaagcacaacaccagcatgttgtaaattcagcacccccaccaccccctccgccgccaccttccagtgttttggcttctgggcatcataccacatcagctcaagccttacaccacccacctcatcaaggacctccactttttccttcgagtgctcatccaactgtaccaccgtatccctcacaagctacacatcataccactttgggaccgggaccccagcaccagccttctggaacagggccacattgtccattacctgtcacaggtcctcatctccagccccaaggaccaaacagtattccaacacctactgcttcagggttctgtcctcatcctggctctgtggccctgccacatggggttcaaggacctcagcaggcatctccagtgcctggacagattccaattcacagagcacaggtgccaccaacatttcaaaacaattaccatgggtcagggtggcattaa

SEQ ID NO: 24898 - DNA, 3067 bp, Homo Sapiens
agaggtgcgcgctgcgcgtgggatcagcccggcgccgacgggtggctccgaggagctcgctccttcctcgcccccgccccctcgccgcgcggggccagcccggccgctcctcccctgggtgggtccctgctccttttctggcagggtctatttgcatagaggaaactgcccaaagtggccgctgtggaggagctggctgcggcgaagggggcgtgcgcggcgatccgctgctacccggaggctaacccccgcgcccggcggacctcgtgcctcgggctgtcccgcctgctcctctcgcacccagcctctgccccagcagcaccgccccctcggagagtccacgcgcgacgaacgcgccatgggcccaggcgagcgcgccggtggcggcggcgacgcggggaagggcaatgcggcgggcggcggcggcggagggcgctcggcgacgacggccgggtcccgggcggtgagcgcgctgtgcctgctgctctccgtgggctcggcggctgcctgcctgctgctgggtgtccaggcggccgcgctgcagggccgggtggcggcgctcgaggaggagcgggagctgctgcggcgcgcggggccgccaggcgccctggacgcctgggccgagccgcacctggagcgcctgctgcgggagaagttggacggactagcgaagatccggactgctcgggaagctccatccgaatgtgtctgccccccagggccccctggacggcgcggcaagcctgggagaagaggcgaccctggtcctccagggcaatcaggacgagatggctacccgggacccctgggtttggatggcaagcccggacttccaggcccgaaaggggaaaagggtgcaccaggagactttggcccccggggagaccaaggacaagatggagctgctgggcctccggggccccctggacctcctggggcccggggccctcctggcgacactgggaaagatggccccaggggagcacaaggcccagcgggccccaaaggagagcccggacaagacggcgagatgggcccaaagggacccccagggcccaagggtgagcctggagtacctggaaagaagggcgacgatgggacaccaagccagcctggaccaccagggcccaagggcgagccagggagcatggggcctcggggagagaacggtgtggacggtgccccaggaccgaagggggagcctggccaccgaggcacggatggagctgcagggccccggggtgccccaggcctcaagggcgagcagggagacacagtggtgatcgactatgatggcaggatcttggatgccctcaaggggcctcccggaccacaggggcccccagggccaccagggatccctggagccaagggcgagcttggattgcccggtgccccaggaatcgatggagagaagggccccaaaggacagaaaggagacccaggagagcctgggccagcaggactcaaaggggaagcaggcgagatgggcttgtccggcctcccgggcgctgacggcctcaagggggagaagggggagtcggcgtctgacagcctacaggagagcctggctcagctcatagtggagccagggccccctggcccccctggccccccaggcccgatgggcctccagggaatccagggtcccaagggcttggatggagcaaagggagagaagggtgcgtcgggtgagagaggccccagcggcctgcctgggccagttggcccaccgggccttattgggctgccaggaaccaaaggagagaagggcagacccggggagccaggactagatggtttccctggaccccgaggagagaaaggtgatcggagcgagcgtggagagaagggagaacgaggggtccccggccggaaaggagtgaagggccagaagggcgagccgggaccaccaggcctggaccagccgtgtcccgtgggccccgacgggctgcctgtgcctggctgctggcataagtgacccacaggcccagctcacacctgtacagatccgtgtggacatttttaatttttgtaaaaacaaaacagtaatatattgatcttttttcatggaatgcgctacctgtggccttttaacattcaagagtatgcccacccagccccaaagccaccggcatgtgaagctgccggaaagtggacaggccagaccagggagatgtgtacctgaggggcacccttgggcctgggctttcccaggaaggagatgaaggtagaagcacctggctcgggcaaggctagaaagatgctacgttgggccttcagtcacctgatcagcagagagactctcagctgtggtactgccctgtaagaacctgcccccgcaaaactctggagtccctgggacacaccctatccaagaagacccaggggtggaacagcggctgctgttgctcctggcctcatcagcctccaaactcaaccacaaccagctgcctctgcagttggacaagacttggcccccggacaagactcgcccagcacttgcggctgggcccggggagcagtgagtggaaatcccccacgagggtctagctctaccacattcaggaggcctcaggaggccagcctgccatgagagcacatgtcctctggccaggagtagtggctgagctctgtgatcgctgtgatgtggacccagctccagggagcagagtgtcggggatggaggggcccagcctggactgactgtacttcctgtctctgtttccattatcacccagagagggacaagataggacatggcctggaccagggaggcaggcctcccactcagagtctgggtctcactggccccaagtctcccacccagaactctggccaaaaatggctctctaggtgggctgtgcaggcaaagcaaagctcagggctggttcccagctggcctgagcagggggcctgccaccagacccacccacgctctgacgagaggcttttccacctccagcaagtgttcccagcaaccagctccatcctggctgcttgccttccatttccgtgtagatggagatcactgtgtgtaataaaccacaagtgcgtgtcaaaaaaa

SEQ ID NO: 24899 - DNA, 3859 bp, Homo Sapiens
aaagatgactcctgtacggtccctgccgtccaggaccctggagtcaagtcagaaatggatgtgtccacagctgattgtgtgacaaggtctggatttgtgggtgttttcattggagtccagggaccctggtaccttatgtgcttttttgccttgtttctttccagattgctcatttagaaagtggatgtgtgggataacatgtccaatgtgtccgaggagagaagaaaaaggcagcagaacattaaggaaggactgcagtttatacagtcaccgctgtcatatccaggaacacaggagcaatatgcggtatatttgcgtgctctcgtgagaaatctttttaatgaaggaaatgacgtttatcgggaacatgattggaacaactcgataagccagtacacggaagccttgaatatagctgattatgcaaaatctgaagaaattttaatccccaaagaaataattgaaaaactatatataaatcgtattgcctgctattctaatatgggtttccatgataaagttttggaggactgcaatatagtcctcagtttaaatgccagtaactgcaaagctctgtatcggaaatctaaggctttaagtgatttaggaagatacaaaaaggcttacgatgctgtagcaaagtgctccttagcagtgcctcaggatgagcatgtaataaaactaactcaagaactagctcagaaattgggatttaaaataagaaaagcgtatgtcagagctgagctctcattaaaatcagttcctggggatggggctaccaaggctttgaaccattctgtggaagatattgagccagatttattaactccaaggcaagaagcagttcctgttgtctctttaccggcacccagtttttctcatgaagttggaagtgagctggcctcagttcctgttatgcccttaacttctattttgccactacaagtggaagagagcgctctgccatctgcagtgctggcaaatggaggaaagatgcccttcactatgccagaagcttttctagatgatggagatatggtccttggagatgaactagatgacctgcttgattctgcacctgaaactaatgaaactgttatgccgtcagctttagtcagaggaccccttcagacagccagtgtctctcctagcatgcccttttcggcatcgctgttaggaaccttacccattggtgcgaggtatgctcctccaccctccttctcagaattttatccacctttgacttcatccttagaagatttttgttcttctttaaattcattttcaatgagtgaatccaaacgagatctgtccacctcaacttctagagagggaacaccgcttaacaacagtaattcttcccttttacttatgaatggaccaggtagtttgtttgcttcagagaatttcctgggaatttcaagtcagcctagaaatgactttggaaacttttttggaagtgcagttaccaaaccatcttcatcagtgactccaagacatcccctcgaaggaacccatgaattgagacaagcttgccagatctgttttgtaaaatcaggccctaagttaatggatttcacttaccatgctaacatagatcataagtgtaagaaagatattttaatcggtaggataaagaatgttgaagataaatcatggaaaaaaatacgtccaagaccaacaaaaacaaattatgaaggaccatattatatatgtaaagatgttgctgctgaggaggaatgtagatattcaggccactgcacgtttgcttattgccaagaggagatagatgtgtggacactggagcggaaaggagcattcagccgggaggctttctttggcggcaatggaaagattaaccttactgtgttcaaacttctccaggagcatcttggggaatttatattcctttgtgagaaatgttttgatcataagcctagaatgataagtaaaagaaataaagataattctactgcttgttctcacccggttacaaagcatgagtttgaagacaataagtgccttgtccacattttgcgagagacaacagtaaaatactccaaaatacgttcttttcatggtcagtgtcagcttgatttatgtcgacatgaagttcggtatggctgtttaagggaagatgagtgcttttatgcccatagtcttgtggaactgaaagtctggataatgcaaaatgaaacaggtatctcacatgatgctattgctcaagagtctaaacgatattggcagaatttggaagcaaatgtacctggagcgcaggtacttggtaatcaaataatgcctggatttcttaatatgaagataaagtttgtgtgcgcccagtgtctgagaaacggtcaagtcattgaaccagacaaaaacagaaaatattgtagtgcaaaagcaaggcattcgtggaccaaagaccggcgtgcgatgagagtgatgtctattgaacgtaagaagtggatgaacatccgtcctctccccacaaagaaacaaatgcctttacagtttgatctgtgcaaccatattgcttctgggaaaaaatgtcaatatgttggaaactgttcctttgctcatagtcctgaggaaagagaagtttggacttacatgaaggagaatgggatacaagatatggagcaattttacgaactatggctcaagagtcaaaaaaatgaaaaaagtgaagacatagccagtcagtcaaacaaggaaaatggaaaacaaattcacatgccaacagattatgctgaagttacagtggactttcactgctggatgtgtgggaaaaactgcaacagtgagaagcagtggcagggccacatctcctccgagaagcacaaagagaaggttttccacaccgaggacgaccagtactgctggcagcaccgcttcccaacaggctatttcagtatttgtgataggtatatgaatggcacctgcccagaaggaaacagctgtaaatttgcacatggaaatgccgaacttcatgaatgggaagaaagaagagatgccctaaagatgaagctcaacaaagcacgaaaagatcacttaattggcccaaatgataatgactttggaaaatatagttttttgtttaaagatttaaactaatatgctggcttttatgtatgatacctaatcagagcattgaccagaaaaattgaaagtgttctgaggcacatagcagaggagctgcagatttcctgcttgtattggcgtatatcgttcctcctgagcagcaacccacagtaggtaggaaaatgggctgtttcacaggcctggccacgctctcacggaaccactggcatcagatggtgaagtgactgctacccggttgccatctgttgaacagacttttggatgaagtgtgttggggaagaggataaggttatatctaggacaactctttgagttggtccttcatataagaatcgtgacggtaagagaataaacacttgtactgggatcagaatacatgatggatgaaattctttacatgttttagcagaatgaatttgtttaatataataaagtttgctacttatctgtatgtaggttgctaaaaaggattttcttaactcagattttaagccaaataaccatttaacactagtatttgttaaatggggtatttttctgtatttgtatgtttcactataataagggaattaaggataatgtgcattgagaatattttgaaaaataattgactcaaattttatttcttggtcttttgctgtttaaatgatgattttgaaagattaaacctgtactgttggtattgtgttagtgtatggaccaatactgcctgtaataaagattttatatatagatgcctttcaaaaaaaaaaaaaaa

SEQ ID NO: 24900 - DNA, 7011 bp, Homo Sapiens
gtctttggcctccgggaccagggagggaggacgctggttgtcctggagcccgggaagctcaagggctgagagggagccgctgcgcgagtcttccccacctcttcccgatcccggactagcgaacttcggaccaccacgtccctccggggataagtggggtcgtgggaaaggaggctgtgcttctcctcatgcactggggcctgcggtgtttgtctcgagcgtccaacacactaggatccgggagtccgtcgtcacgctccttggcctcgcggtcgcttgtttgctcggcctgctgggagcgatccggcgctgacagccccgctcagactccgggagccgcttgtgggtctttcggaagataactgaagttcacagttaccagccaagaaaacttgaaaatgagcagccgacggaaacgtgctcctccagtgagggtagatgaggaaaagaggcagcagcttcattggaatatgcatgaggacagaaggaatgaacctatcatcataagtgatgatgacgagcagccctgcccaggttcagatacctcttctgctcattatatcattctaagtgatagtctaaaggaagaagtggctcacagagataagaagaggtgttcaaaagtggtgagcttctcaaaaccaattgaaaaagaagagactgttggtattttttcccctttgtctgtaaagttaaatattgtgatttctccctatcattttgataattcctggaaagcatttctaggagaattaactcttcagcttcttcctgcacagagtttaattgaaaatttttccgaaaggagtattacattgatgagttcagagtcaagcaatcagttcctgatttatgttcattcaaaaggtgaagatgtagagaaacaaaaaaaagaaccgatgagtatttgtgacaagggtattctggtggagtcatccttcagtggtgaaatgttagaagatttggggtggctacaaaagaagagaagaataaaactctatcagaaaccagaaggaaatcacattatcaaggttggaatttatcttttggaagctggcctagcaaaactagacttcttgagtgatgcaaattcaagaatgaaaaagttcaatcagctcatgaagaaagtaatggaaaagttacacaattctattattccagatgtgttggaagaggatgaagatgatccggagagtgagccagagggacaagacattgacgagctgtatcactttgtgaaacaaacacatcagcaagaaacgcagtccatccaagtggatgtccagcatcctgcattgatccctgtgttgagaccctaccaaagagaggctgtcaattggatgctacaacaagagtgtttcagaagcagtcctgctactgaaagtgccctgcacttcttatggcgagagattgttacatctgagggtctgaaactctactataatccatatacaggctgcatcattcgtgagtacccaaattctgggccgcagttgcttggtggaattttagcagatgagatgggtcttggaaagacagtggaggttttggctctgattctgacacatactcgacaagatgtcaagcaagatgctctcactcttcccgagggaaaagtggtgaattattttattccgtcacattattttggaggaaaactgaaaaagacagaaatccagaatatcgaatttgaaccaaaagaaaaagttcaatgccctcctacacgtgtgatgatactgacagctgtgaaagaaatgaatggaaaaaaaggagtgtccatcctttccatctataagtatgtcagttctatatatagatacgatgttcaacggaacaggagtcttttgaaacggatgctgaaatgtttaatttttgaaggtctcgtgaaacagatcaaaggccatggtttttctgggacttttacattgggaaagaattacaaggaagaggatatatgtgataaaacaaaaaagcaggcagtagggagtccaaggaaaattcagaaagaaactagaaaatcagggaacaaggacacagattctgaatacttgccatcagacacctctgatgatgatgatgatccttactattattattataagtccaggagaaatcgcagtaaattgaggaaaaagcttgttccatccacaaaaaaaggaaaaagtcaaccatttatcaatcccgattcacaaggtcactgtccagctactagcgactctggaataactgatgttgctatgtctaaaagtacatgtatctctgaattcaaccaagaacatgaaacagaggactgtgctgaatctctaaatcatgctgatagtgatgtaccaccttctaataccatgagtccctttaacacctctgattaccgctttgagtgtatatgtggtgaacttgatcagatagatcgtaagcctcgtgttcaatgcctgaagtgtcacctgtggcaacatgcaaagtgtgtgaattatgatgagaaaaatctgaagatcaagcctttttactgcccccactgccttgttgcaatggaaccagtgtcaacaagagcaactctgatcatctctccaagttccatctgtcaccagtgggtggatgagatcaacaggcatgtgaggtcgtcatctcttcgagtcttggtatatcaaggagtgaagaaagatggctttttacaacctcattttttggcagaacaggatatagttatcattacctatgatgtactgcgttcagaattaaattatgtcgatatcccacatagcaatagtgaggatgggcgtcgcctacggaaccagaagcgctatatggctatcccgagccccctggtagctgtggagtggtggaggatctgccttgatgaagctcagatggttgagtgtcccacagtaaaagctgcagaaatggcccagcgtttgagtgggattaatcgatggtgtatcagtggcactccagtacagagaggattagaggatctttttgggttagtggtctttcttggtattgaaccttactgtgtcaaacactggtgggttcgacttctctatcggccttactgcaagaagaatcctcagcatctctacagctttattgccaagatactgtggaggtctgcaaagaaagatgtgattgaccaaatccaaataccaccacaaaccgaagaaatacactggctccacttttctccagtggaaaggcatttctatcaccgtcagcatgaggtgtgctgccaggatgtggtggtaaaactcaggaagatttctgactgggctctgaagctcagcagcctagacagaaggactgtcacctctatcctgtatccattgctgaggctcagacaggcctgctgtcacccacaggctgttcgtggagagttcttgccactccaaaaaagttttgaacagtctaccttttcttttagcaccatgacaatggaagagctgctgacatctttgcagaagaaatgtggaactgaatgtgaagaagcacatcgacagctagtttgtgctctcaatggcttagcaggcattcatattattaaaggtgagtatgccttggcagcagaattgtacagagaagtgttgcgctcctcggaggaacacaaaggaaaactcaaaactgattcacttcaaagacttcatgctacccataacttgatggaattgttgatagccaggcacccagggataccacctaccttgcgtgatggccgacttgaggaagaggccaaacagctgcgagagcactacatgagcaagtgtaatacagaagttgctgaagcccagcaagctttatatcctgtgcagcagaccatccatgagcttcaaagaaagattcattctaattctccttggtggctaaatgtgatccacagagcaatagaatttactattgatgaggagctagttcagcgagtgcgaaatgaaataaccagcaactacaagcaacaaactggcaagctttctatgtcagagaaaggtcttcagttcttacttacaacacaaatggaagagctaaataaatgccagaagctagtaagagaggctgtaaaaaacctggagggacctccatctcgtaatgttattgagtctgcaacagtctgtcacctccgaccagccagacttcctctcaactgctgtgtcttttgtaaagctgatgaattgttcacagagtatgaatcaaagctattttccaacacagtcaaaggccagactgcaatatttgaggagatgatagaagatgaagaaggactggtggatgatcgagcacctaccaccacccggggtctctgggcaataagtgagacagagcgatctatgaaagcaatactatcatttgcaaaatcacataggtttgatgttgaatttgttgatgaaggaagcacttcaatggatctctttgaagcatggaagaaggaatataagttgcttcatgaatattggatggctctgaggaatcgtgtgtctgctgttgatgaacttgcaatggctacagaacgactaagagtgcgtgatcctagggagccaaagcctaatccgcctgttcttcatatcattgaaccacatgaggtagaacaaaaccgaataaaactactaaatgataaagctgttgctacatcacagcttcagaaaaaacttgggcagcttctttacctaactaatttggagaagtctcaagataaaacatcgggaggtgttaatccagaaccttgtccaatctgtgctcgacagctaggaaaacagtgggcggtactgacctgtggtcactgtttctgtaatgaatgcatttctataattattgaacaatacagcgtgggatctcacagaagctccattaagtgtgcaatctgccgccagaccacatctcacaaagaaatctcgtatgtctttacctcagagaaagcaaaccaggaggaggacatccctgtgaagggcagccattctacaaaagtggaagctgtggtcagaactctgatgaaaatacagcttagagatccaggggccaaagcactcgttttctcaacgtggcaagatgtattagatattatttcaaaagctcttactgacaacaacatggaatttgcacaaatcagtcgtgttaagacatttcaggagaacctttcagcatttaaacgtgatccccaaatcaatattttgctgctgcccctgcacacaggttctaatggattaactatcattgaagcaactcatgttctcttggtggagcccatattgaaccctgcccatgagcttcaggccatagggagggtgcaccgaattggacagacaaaacctactattgtacacagattcttaattaaagcaacaatagaagaaagaatgcaggcaatgctgaaaactgctgagagaagtatctatatctgatgatgcaagggaattaagagaggtaatgtgtacttttcttatgataagatcactcataaaacagttggaataagaaagtaaactagtctagttttatatgacctggtatattgaacaaacatagatctcagttttggaagggccttcagtatctttagcacatgattcaccaatatcttgttagtaatattttaagtagatggtgaattatattaacccattttttgagtaggcttataccataactttacacctagtaattttgcagtaatacaactccttacaataagttaatgttagacagttatttgtttcttctgcatcttgctactgaaaacaaaaacaatgaaaatattcatatttctattatgtgtaaagtggtgttagtgtaaacagttaactccaaatagattttttaatgtattaatgattaccttaaaattatctgctttccctactcttaatttttcttattgttaaagtttttatatgttgtaagattgatgtatctgtaaatattgcagtttttatgattttgttttattataacatggaaatatggcagggttttttttttaatcattattatactgatgtcttggattctttttctttcccatgttcttgtgtaactagactttttagccagtgatatctgaattcatggtagagttgttatttcactccagttgttcctcccttaagcacgagtctttgaccttttgaacaagagaatgccatgttcacataagcaaatcgttgcaagtgataataacgaagtgtttcttcttctgtgaggaattaatggactttgaaattgctgaataaggagtagcttgttacatcctagccatttgatgtaatacaaatgttcttatttggcttccttttctttgagccttcagagttttaaaggaccctctttgaccctcaggacttattagctcccagttagctgcctggaaaactcatagaaccattccctagatcccatttgtccgagaggctttggtgcttagttaaggtgcattttcttactctaggtttatagagtgatgtaattcaactgaagaaaacacacacatgcttttggtgcttattcttcagttaaaaggaggtatccattgattcttttatatgaaattaaatcaaactgttatttttatagctcttcacatattaaaaagagctttcatgtacatttacgtgtttaatttacccaacaatcttgtgaagttgatataattaatatctttactgttttaaaggtagagaactgaagttcagatatattgaaactttcttaggacatgtagcaagtaaacagtggagcccaggtcccctgactccatatcttacattcttttactaataacatgtcatgctgagattcagaaggcccatgcttataatttaaaaatgagactatttcagtatttctttgtgtttgttttctactattcctttctgagctatgttttagagaaaacaatttgatatgcttcaattttgtaaaatcaaattacatatatataaaaaaacctatctgtattagacaaaaactgtttttatttatttctgtagatatccattaaataaatattttagtggaaaaaaaaaaaaaaaaaaaaaa

SEQ ID NO: 24901 - DNA, 3487 bp, Homo Sapiens
ggccgggggttgggcaggggcctggggggcttccctggggggcttgtcgccggggccgcctgggctttcaggtcttccgaggctgacattcacgtttcattctgccacactcgggaacggtgatcggggaagcatggggatccgggagaagcacccacaaaactagcatcctcctggaggagctcgggaataggatgagtgataatccacccagaatggaagtgtgtccttactgtaagaagccatttaaacgattaaaatcccacttgccatactgtaagatgataggaccaaccatacctactgatcaaaaagtttatcagtccaagccagctacactcccacgtgctaaaaagatgaaaggaccaatcaaagatttaattaaagctaaagggaaagagttagagacagagaatgaagaaagaaattctaagttggtggtggacaaaccagaacagacagtgaagacctttccactgccagctgttggtttggaaagagcagctactacaaaggcagataaagacatcaagaatccaatccaaccatccttcaaaatgttaaaaaatactaaaccaatgactactttccaagaagaaaccaaggctcagttttacgcatcagagaaaacctctcctaaaagagaacttgccaaagatttgcctaaatcaggagaaagtcgatgtaatccttcagaagctggagcgtctttactggttggctcaatagaaccttctttgtcaaatcaagatagaaaatattcctcaactctacctaatgatgtacaaactacctctggtgatctcaaattggacaaaattgatccccaaagacaggaacttctagtaaaattactagatgtgcctactggtgattgtcatatttctccaaagaatgtcagtgatggggttaaaagggtaagaacattattaagcaatgagagagattccaaaggcagggatcacctctcaggagtccctactgatgttacagttactgagactccagaaaagaacacagaatccctcattttaagccttaaaatgagctcattaggtaaaatccaagtcatggagaaacaagagaaaggacttaccctgggagtagagacgtgtgggagcaaaggaaatgcagagaaaagtatgtctgcaacagaaaagcaggaacggactgtcatgagccatggctgtgagaacttcaacaccagggattcagtcacaggaaaggagtctcaaggggaaagaccacatttaagtttgctcattccgagggagacgacttaccagtttcattctgtatcgcagtcaagtagtcaaagtcttgcctctctagctacaacatttcttcaagaaaagaaagcagaagcccagaatcataatcgtgtccctgatgtaaaggcattaatggagagtcccgagggacagttatctctggagcccaaatctgatagtcacttccaagcatcacacactgggtgccagagccctttatgttcagcccagcgtcacactcctcagagccccttcaccaatcatgctgcagctgctggcaggaagactcttcgcagctgcatggggctggagtggtttccagagctctatcctggttaccttggactaggggtgttgccagggaagcctcagtgttggaatgcaatgacccagaagccacaacttatcagtccccagggggaaagactctcgcaaggctggatcaggtgcaacaccaccataaggaagagtggattcggtggcatcacgatgctcttcacaggatacttcgtcctgtgttgtagctggagtttcagacgtctgaaaaaattgtgccgacccctgccctggaagagcacagtacctccatgcattggtgtggcgaagacgactggggattgccgctctaaaacatgtttggattaggaagcacgtttaagtaggagaagccttcgtgacttctctctagtgccttcgtgccctgtgttgcccactgaattgccctgtaacacctaagtgtagtggtagcattaagggatagcttttcagccctcaaggttatcaggagcatttgtatcactgctataaataaagtagtatcacttgtcataatcagggtgctgaaacataatgaaaaggtttaacttagtcacagtaaatattttatatccctgaaaataagttatttaatgagaatagaactatttaatgatccatgagtcctaaaaggatatctgccttgtattgccaagtttaaggcaaaggtgagatcctgtattaataagaagacagcttttttgtttgacattggtaagtaccaagaattctaactcacatatagtaggaaacaacaaaaagtctccactgacttctttgaattagatactgagaatccacaatacagtagtgtggataactttcaagaagccattggaaacatctccacattctgggatgacttgtaaatgtctacagagtaatggaaggaaaggcttccttgtctgctcattgctgccacctgggttgggaaaataattgaagatgttttctcaagtccttcaagaatctcttcttaatgttcagaatagtttaagagcgttgttgaggtaaagtgatagctgattattttctgagatttagatctaaacaaactcagcatgacgaggaagcacacttcacagctccagggtgcaatactgatgtaaagttgcctcgtgaggatacatttttcgctcatgtatgcaaaattcctatcagttcatttgcacagccagttccaatcatgtatgtgatcaccagattaaaagcttcatccagaaagacaagactcctcagaacgaatagtagacaagtaagactgctacccacagaagccagtatgcttcaggtgtgaggcggggtaactactcatctcttcacagagccaaggaaagaaaaagaacgtctctaacatgatttaccattttaaacagccttataagttttgtctcttaaaatcatgctgcagaaggagggggtaaaagtcgtgttctgccctgtctgtggcattggagtgccccgctaggtaagaagcaatgcttagatcttgcttccaggcagcagcttgaattcccgaatcttcctgcaaggtgcatacaaatgcagcgtgagaatccatacacgtaatccatattcaccttcccatccatcccgcagaagaggcatggtgacacccaggctactgtccatgcttgagaggacgtatttgaaggttctgttactacaagttgggaatattcacggacatgcctgaataccccggctgtaactcacacgtggtctgtgtaagtggattaacctcggggcggccttgtttaatcctgaataatatctgaaagactgagtttacttgggaatgtgtagtttttttaatgcacattaaaatttattttagctgttaaaaataaaatcattttattaaaaaaaaaaaaaaaaaaaaaaaaaaaaaaaaaaaaaaa

SEQ ID NO: 24902 - DNA, 6786 bp, Homo Sapiens
ctctttctccccaggccgaagcctcgggacggccctggaagccgaccatggcagccgtgaccatgtcggtgcccgggcggaaggcgccccccaggccgggcccagtgcccgaggcggcccagccgttcctgttcacgccccgcgggcccagcgcgggtggcgggcctggctcgggcacctccccgcaggtggagtggacggcccggcgtctcgtgtgggtgccttcggagcttcacgggttcgaggcggcggcgctgcgggacgaaggcgaggaggaggcggaggtggagctggcggagagcgggaggcggctgcgactgccgcgggaccagatccagcgcatgaacccgcccaagttcagcaaggccgaggacatggccgagctgacctgcctcaacgaggcctcggtcctgcacaacctccgggagcggtactactccggcctcatctacacgtactccggccttttctgtgtggtcatcaacccgtacaagcagcttcccatctacacagaagccattgtggagatgtaccggggcaagaagcgccacgaggtgccaccccacgtgtacgcagtgaccgagggggcctatcggagcatgctgcaggatcgtgaggaccagtccattctctgcactggagagtctggagctgggaagacggaaaacaccaagaaggtcatccagtacctcgcccacgtggcatcgtctccaaagggcaggaaggagccgggtgtccccggtgagctggagcggcagctgcttcaggccaaccccatcctagaggcctttggcaatgccaagacagtgaagaatgacaactcctcccgattcggcaaattcatccgcatcaactttgatgttgccgggtacatcgtgggcgccaacattgagacctacctgctggagaagtcgcgggccatccgccaggccaaggacgagtgcagcttccacatcttctaccagctgctggggggcgctggagagcagctcaaagccgacctcctcctcgagccctgctcccactaccggttcctgaccaacgggccgtcatcctctcccggccaggagcgggaactcttccaggagacgctggagtcgctgcgggtcctgggattcagccacgaggaaatcatctccatgctgcggatggtctcagcagttctccagtttggcaacattgccttgaagagagaacggaacaccgatcaagccaccatgcctgacaacacagctgcacagaagctctgccgcctcttgggactgggggtgacggatttctcccgagccttgctcacccctcgcatcaaagttggccgagactatgtgcagaaagcccagactaaggaacaggctgacttcgcgctggaggccctggccaaggccacctacgagcgcctcttccgctggctggttctgcgcctcaaccgggccttggaccgcagcccccgccaaggcgcctccttcctgggcatcctggacatcgcgggctttgagatcttccagctgaactccttcgagcagctctgcatcaactacaccaacgagaagctgcagcagctcttcaaccacaccatgttcgtgctggagcaggaggagtaccagcgtgagggcatcccctggaccttcctcgactttggcctcgacctgcagccctgcatcgacctcatcgagcggccggccaacccccctggactcctggccctgctggatgaggagtgctggttcccgaaggccacagacaagtcgtttgtggagaaggtagcccaggagcagggcggccaccccaagttccagcggccgaggcacctgcgggatcaggccgacttcagtgttctccactacgcgggcaaggtcgactacaaggccaacgagtggctgatgaaaaacatggaccctctgaatgacaacgtcgcagccttgctccaccagagcacagaccggctgacggcagagatctggaaagacgtggagggcatcgtggggctggaacaggtgagcagcctgggcgacggcccaccaggtggccgcccccgtcggggtatgttccggacagtgggacagctctacaaggagtccctgagccgcctcatggccacactcagcaacaccaaccccagttttgtccggtgcattgtccccaaccacgagaagagggccgggaagctggagccacggctggtgctggaccagcttcgctgcaacggggtcctggagggcatccgcatctgtcgccagggcttccccaaccgcatcctcttccaggagttccggcagcgatacgagatcctgacacccaatgccatccccaagggcttcatggatgggaagcaggcctgtgaaaagatgatccaggcgctggaactggaccccaacctctaccgcgtgggacagagcaagatcttcttccgggctggggtcctggcccagctggaagaggagcgagacctgaaggtcaccgacatcatcgtctccttccaggcagctgcccggggatacctggctcgcagggccttccagaagcgccagcagcagcagagcgccctgagggtgatgcagcggaactgcgcggcctacctcaagctgagacactggcagtggtggcggctgtttaccaaggtgaagccactgctgcaggtgacgcggcaggatgaggtgctgcaggcacgggcccaggagctgcagaaagtgcaggagctacagcagcagagcgcccgcgaagttggggagctccagggccgagtggcacagctggaagaggagcgcgcccgcctggcagagcaattgcgagcagaggcagaactgtgtgcagaggccgaggagacgcgggggaggctggcagcccgcaagcaggagctggagctggtggtgtcagagctggaggctcgcgtgggcgaggaggaggagtgcagccgtcaaatgcaaaccgagaagaagaggctacagcagcacatacaggagctagaggcccaccttgaggctgaggagggtgcgcggcagaagctgcagctggagaaggtgacgacagaggcaaaaatgaagaaatttgaagaggacctgctgctcctggaagaccagaattccaagctgagcaagagcggaagctgctggaagatcgtctggccgagttctcatcccaggcagctgaggaggaggagaaggtcaagagcctcaataagctacggctcaaatatgaggccacaatcgcagacatggagggaccgcctacggaaggaggagaagggtcgccaggagctggagaagctgaagcggaggctggatggggagagctcagagctgcaggagcagatggtggagcagcaacagcgggcagaggagctgcgggcccagctgggccggaaggaggaggagctgcaggctgccctggccagggcagaagacgagggtggggcccgggcccagctgctgaaatccctgcgggaggctcaagcagccctggccgaggcccaggaggacctggagtctgagcgtgtggccaggaccaaggcggagaagcagcgccgggacctgggcgaggagctggaggcgctgcggggcgagctggaggacacgctggactccaccaacgcacagcaggagctccggtccaagagggaacaggaggtgacggagctgaagaagactctggaggaggagactcgcatccacgaggcggcagtgcaggagctgaggcagcgccacggccaggccctgggggagctggcggagcagctggagcaggcccggaggggcaaaggtgcatgggagaagacccggctggccctggaggccgaggtgtccgagctgcgggcagaactgagcagcctgcagactgcacgtcaggagggtgagcagcggaggcgccgcctggagttacagctgcaggaggtgcagggccgggctggtgatggggagagggcacgagcggaggctgctgagaagctgcagcgagcccaggctgaactggagaatgtgtctggggcgctgaacgaggctgagtccaaaaccatccgtcttagcaaggagctgagcagcacagaagcccagctgcacgatgcccaggagctgctgcaggaggagaccagggcgaaattggccttggggtcccgggtgcgagccatggaggctgaggcagccgggctgcgtgagcagctggaggaggaggcagctgccagggaacgggcgggccgtgaactgcagactgcccaggcccagctttccgagtggcggcggcgccaggaggaggaggcaggggcactggaggcaggggaggaggcacggcgccgggcagcccgggaggccgaggccctgacccagcgcctggcagaaaagacagagaccgtggatcggctggagcggggccgccgccggctgcagcaggagctggacgacgccaccatggacctggagcagcagcggcagcttgtgagcaccctggagaagaagcagcgcaagtttgaccagcttctggcagaggagaaggcagctgtacttcgggcagtggaggaacgtgagcgggccgaggcagagggccgggagcgtgaggctcgggccctgtcactgacacgggcactggaggaggagcaggaggcacgtgaggagctggagcggcagaaccgggccctgcgggctgagctggaggcactgctgagcagcaaggatgacgtcggcaagagcgtgcatgagctggaacgagcctgccgggtagcagaacaggcagccaatgatctgcgagcacaggtgacagaactggaggatgagctgacagcggccgaggatgccaagctgcgtctggaggtgactgtgcaggctctcaagactcagcatgagcgtgacctgcagggccgtgatgaggctggtgaagagaggcggaggcagctggccaagcagctgagagatgcagaggtggagcgggatgaggagcggaagcagcgcactctggccgtggctgcccgcaagaagctggagggagagctggaggagctgaaggctcagatggcctctgccggccagggcaaggaggaggcggtgaagcagcttcgcaagatgcaggcccagatgaaggagctatggcgggaggtggaggagacacgcacctcccgggaggagatcttctcccagaatcgggaaagtgaaaagcgcctcaagggcctggaggctgaggtgctgcggctgcaggaggaactggccgcctcggaccgtgctcggcggcaggcccagcaggaccgggatgagatggcagatgaggtggccaatggtaaccttagcaaggcagccattctggaggagaagcgtcagctggaggggcgcctggggcagttggaggaagagctggaggaggagcagagcaactcagagctgctcaatgaccgctaccgcaagctgctcctgcaggtagagtcactgaccacagagctgtcagctgagcgcagtttctcagccaaggcagagagcgggcggcagcagctggaacggcagatccaggagctacggggacgcctgggtgaggaggatgctggggcccgtgcccgccacaagatgaccattgctgcccttgagtctaagttggcccaggctgaggagcagctagagcaagagaccagagagcgcatcctctctggaaagctggtgcgcagagctgagaagcggcttaaagaggtggtgctccaggtggaggaggagcggagggtggctgaccagctccgggaccagctggagaagggaaaccttcgagtcaagcagctgaagcggcagctggaggaggccgaggaggaggcatcccgggctcaggctggccgccggaggctgcagcgtgagctggaagatgtcacagagtcggccgagtccatgaaccgtgaagtgaccacactgaggaaccggcttcgacgcggccccctcaccttcaccacccgcacggtgcgccaggtcttccgactagaggagggcgtggcatccgacgaggaggcagaggaagcacagcctgggtctgggccatccccggagcctgaggggtccccaccagcccacccccagtgaccctaccctgtccccagatgcactaacagatggggcccagcccccttcctccctggaccccacgggcccctgtcccaggaaccccgccctctgacttcttgccctttggaaatggtgcagcactctggcatttatcacccccacctgggtcccctgcaacctcccatcaaaggatgacccctaaacacagaggagcggggcaggcagggaggcaaggactggagctaccttgcttgttgggggactgggtacagttggcaagctgtgtttccatcagctccctgtcctcctttcttccctcgttattgatctatagacattaggaagggagtgagacggctcctccaccatcctcagccagtgcaacccattccctctgcttctctctctctctctctctctccctccctctccttccctaccctctcaccatctttcttggcctctctgagggtctctctgtgcatctttttaggaatctcgctctcactctctacgtagccactctccttcccccatttctgcgtccacccctgaactcctgagcgacagaagccccaggcctccaccagccttgaacccttgcaaaggggcaggacaaggggacccctctcactcctgctgctgcccatgctctgccctcccttctggttgctctgagggttcggagcttccctctgggactaaaggagtgtcctttaccctcccagcctccaggctctggcagaaataaactccaacccgactggac

SEQ ID NO: 24903 - DNA, 49525 bp, Homo Sapiens
tattccaggtgcattactcaacatctctgtacttcagttttctatctgtaaacggactttctactaatagctaactgcttacagactgtttatcatgattttacatacaatattcaacttccccctccaataatcaatgagtgacattattattctcattctactgctgaggatccagaagcacattcacccattccacaaatatttaccgtgcacctgcaatgtgccaggcatgttcatgggtgaacacagcaaaatctttgcctctgtgcagcttcagtctggggttcacaggaaaaggagaaagatgataaacaagagatacgtacattacagggtaattataaagggatacccgctatacaagaaaacagagcaggataacagagataggaagttgggattttaagtaaggcagccagaacagacctcaccaagaaggcaatatctgagcaaggatgttaagggagccgggggcaacctagaatccaccagtggggagagtaaggcgactcggagaaaggcgaggggctaatgcatccgttctaataactctgactttaactcggggctagatggggaaacactggacagttctaccccgaggtgtgacagaacttgaccttcattttaaatcggtccatctgtttaggctagtgagaaaaaacaatatttgaactcgggcagtccagctcaggagtctgtgctgtcgggattaaagaatcagtcgacacccccagggctgagccccgcagcaagcgccccgcgggtgctggcccccagactgtggttaccgccatcctttcacttaaactccgccccgattactcccccgctccagggctccgcatccactctgccgggtctccacgtagcgcttcccgggctacacattgcgtaacttcggcagccgggcggagcctgcacagaggcggagccgcggcagccggagagaacgccccagcaatagtcgctaggaggaagccccaggagcccttgccgcccacggaacgcgcctgcgtaatccgggtccaggccgccgacattccaggaccgccttccgccccgcccccaattctggggcggagtcctcggccgcgccggcgcaaagcgtcgccgcaccccacgcctgcgcgcttcgcccgcccggccccatccccccaggtttttcgcgtgggggagggggcacgtctcggcgagtcacgatgatggcggccaccatcctgtggtgagctagcggattccctgcttgtctcgccgaccccctcgcgccttctgcagactccgtggctggcgctcggcgcgtgaggaagcacggcggcccgagttcgcggggaaggccgcagtcgcggaggcagcggcgcggtccggggcacgggctgggggagaggccgctccgctgggcgaatgtgacaagcccccacccccaccgccttcctccccagagcgcgaggagcgcgggcgaccccggggccccgccaggccacagaccccgcccagcggccagcacccggcgcaggcccggcagccgagctgcgcggcggcaccatgcaggtcaccctgaagaccctccagcagcagaccttcaagatagacattgaccccgaggagacggtatgcgcgcgggccgggggcaggggcaggggcagccgcgtgcgggccgcggggagcgccaggagctcgtggggccgggcggcgcgctccagcgggggaagccccggagggcgcgatgagggccctgggtcctggtgccggccctggcggcgtacagcggagccgatcctcctgtcttggccgtgggctttgtggcaggagaatggggaagcagtggccggacgccgaaggcctggtggcagatggcgtggagcgcacgcccgcgggcctgggcctaggagctcgtgctagcggggccggagggggatgggaaggtccaggccgtctcagccgtagagcctggctttctggtatgggtgcacaggtgggggagggagacgtaggcgtcgccactacccctgtgtggacctggttagccgcttagttcccagagttggtaacccgagaagatgagccttaagaaaaaaaaaagtatcaggttccgtttgccgccgagaggtgagtggtggtgaaaatgaatttgcccctttcccctcagaattgtttacccttttatttgcaaatgaatcgttctgctgccttcctcccgccaccaaacccacacccttgcgtagattgcactttgaggcctctttggtgatggttttagctgttagagctcttcacagccatccaggctcaaactaaacttcagatttaacgggttttctgtgttagaaatcttggaattgtaggagttggaacgctgcagccaccctcccccgatgccccaaacagtagcagttcaagggggaaaaaagaaaaaaaaaacaaaaaacaacaactttgaatcctttctgcagttaaagccttaaacatttcagaagtccacattatacatttttctgtatttgtgactgcataaagagacactgttgaggtcagtacaactttatgccaagaatctaaaaacgctgtgagtgtaaatttactgcttatgttcggaaatacaccgccaagattgtcataatactaagtttaaaccagcagctttctgcccaactctatttttaaaagtagttgattctattttgggtggagatcaggggctttggtgttaagtagacctgagttccatttgtggttttgtaacttatttgctatgaccttgggcaaattacgcttagtttcattctctgtataatagggataatacctgccttgcagagatgtgaagattagatggtatgtatttacttggtggtcagtaaatggaatcgattatttaaacaatggattcctttgagtggagatacagtgttacgttttacttatctcatttaatcttaagttttgtacatctttaattttttaagaaacagcctttttgggattttggtacaaaattatttgatttcagaatatttatatgtgggtgtatgctgtgtgattaacttcttaaaagtacaggagatctcagttatacatgagaaacttttcagtgtcctcagaagtaattgacaataccctgtggactgacagtactaatagaatctaatttctcttgaatatttctttactgcttaatgtgcattaataagttgaagggtgaaagttaaaatggagtttgtttgatgatttcagacaaactacgtaaaatgcctatttgactttggttctttgtggtaacaaatgttggtgccccagtaacttaatcggcttataatactcagttaatttcagaattattgaaagctaaagaaatattgtggctttttggtaaatatgtgtgggtgtattgaagttatgcagtgactctgtcaacagctccactgaagtatttacgttctgtaagatttgtttagcgttttaggcactttacgcatactgttaactgagagtcaatgctgtacctgtgtttgtgtgaattcttaactatttttgctgttttccagtttatttccaaggaaaagtaatatgttatacgtctggaagtatatttttgaaaagcccattgttagggagcggtttctacagctttcgctgctatttatataaatataattttgttgctgttagtataaaaaaactaatactgttagtccggggcaagaaattaaagcatttcctctgggatatatggaacgtttgcatttaatgacttgtcagtttttattttaatgactttaggaaatatttttcatgacaactgtttcaattctatgtttgtagtgggttttaattagtatgtgtttttgatacgacaccttagaattccagtaagaaaataaacaatgaaaattatgttttctagggcaacgctaagtgtcctgtttctaagttgttgtgagaacgaggtaaccaaggatattagaaatagatctaaaataagataggatcttattgagacctgtttttggtctggtcacagatttgtccttgtttaatttttacctagaaggaaccaaggaaattaagtaacttacgtagccagtatagcaactcttgtgagcttgagatgagcatgagcaaaaatggaagaaaggactgtgagataagtggaatcatgggaatgattcatttgttgaacaagtaaatgtttagtgagctttgctggcaggactggaggagtacagggacctgtagaacgtggtctggggcttctgggagccttattgacttagtcaaagctcattggctatagagtagggggatatacaaaatggaaagagcaagataatttgttttaaggtgtttttatttgccctagttttaacaaaactttcttagacttattaggcattttgtaccatttacttgactattactgtgatacattacatgaccactgcctttagtgttaatctttgcaaagatctttttgtttctacaattgtaatgcaagccttcttataaaatattcaaacaatatagaaacaaaatgagaaggtggtatgtgtggggtagggagaccattgctaggagattttcttcattatgtgctttttttgttttttactgtaaaaattgtgggagacttttaagtagcctacatattaaagcattttgagatgtgtgatagagcactgcttctctgaaattcttaaaaattctgaagtttaggctgggtgtggtggctcatgcctgtaatcccagcactttgggaggccgaggtgggcggatcacaaggtcaggagatcgagaccatcctggttaacacggtgaaaccccgtctctactaaaaaaaatacaaaaaattagacggacgtggtggcatgcacctgtagtcccagctacttgggaggctgaggcaggagaatcgcttgaacccaggaggcagaggttgcagtgagctgagatcactccattgcactccagcctgggcgacaaagcgagactccgtctcaaaaaaaaaaaaaaaaaattctgaagtttaatggtgtgatggacatttagagggaaatggaatacagtttttaagctcagttttatagtcaattagtgttttatattactgttgcttaaaaacattaagaaaggtagatttaggaataaaccttttgagataaaaaaaatacagtgcagtattttattgcatcactgaaatggtgacaagaaaaagtatgtgatatacaaattaatcctgcagtctaactcttgacactgtttgccttgaacaactaaaaacaaaactcagtaaatttgagatgagactttaaatgcaaaagctgaaatgtgattggattagtatataagtgacattaaaattctacatatacattggatgtttttgctaagagaattgcaaagacatcagttttaatatctataaatagcatattagtgtgctgtgaagaattacctaatttcgtggtttacctctataatgtgattgttataaaatactgctttacccagcaccttgggaagccgaggcgggtggatcacctgaggtcaggagttccagaccagcctgaccaacatggtgaaacctggtctctactaaaaatagaaaattagctgggcatggtggtgcatgcctgtaatcccagccacttaggaggctgaggcaggagagtcgcttgaacctgggaggaggaggttgcagtgagctgagatcgcaccattgcactccagcctgggtaacaagagcgaaactccatctcaaaaaaaaaaaaaaaacaaaaaaactgtgtgtgtatattgctttagtacttgctctgtattatacagtatttactagccatcatttattagtgaagtattcctgtggtggtttattgtattttcaatatagtcatgctagatacaatttcatattatacaagcttcctagattaaggtaatgagtagtaaatgtattaaaaatactatatcacagaggtgaaattaagagttcttggcatattggcagaacaagatacaggaagaaactgagaaatctggtacatttttgccagacttttgctgttttgatgccgtgcacacagtaggcatttagtaaagatctttgaatgaactgaatatattcttttggtgaactggcaaagcagtgatcccccaacgtagtgtgtttgcatgttgatttatttatttaataaatatttgctgtgtacttactagatgtcaggccctgctgtgatggtatgtgcattctagtgggataaaactgtcaaaaaatacattttaaaaaccaggtaatggtaagtgctatgcagaaagttgaaataggataaagtatttgataatacttcactgggtggctacatttttgttgttgttttgttttgtttttgagacgcagtcttactctgtagcccaagctggagtgcagtggcgccatcttggctcactgcagccttcgcctctggggctcaagcgattctcctgcctcagcctcccaagtagctgggactagaggtgtgccccaccacacctggttaatttttttgtatttttagtagagacagggtttcatcatgttgccctgggtggtcttgaactcctgagctcaggagatctgggtggctacttttaaatttactagtcactgaaggcctttctgaataaggtgacatttaagctgagagctgagtaaaaatgagcactcgagaatgaagagaatgttttctatagggaactgctagagcaaagacctttaagaatgtgttttgggtactgaaaaaaagcctgcattgctaaggtgatgggtaagagataagggtgagttgggtaagagataagagagtgagttaggcaagtgagttaggctaggggttttcagggtaaacttggaaacatttacaagcaggacagaaatctttgtttctttgtctctgtctctcttttctctttttccctcccttcctctctcccttcctccctcccttcttcccttcctccctcccttcctccctcctttcctcccttcttccctccctccctcccttcccccttccctctcctttcctctccttccctcctttcctcccttccttccccactcctttcccttccttccttcccttcctttttcaacaaggtcttgctctgtcacccaggatagagtacagtggcatgatcatagctcactgcagccccaaactcctgggctcaagtgatcctccaccctaagcctccccagtagctgggactacgggggcatgccaccacgcccagctaattttagtttttttttgtagggatggggtcttgatgttttatccaggctggtctccaacttctagcctcaagtgatcctcctgcctcagcctcctaaagtgctgggatgacaggcatgagccagcacacctagccaagaaatatttcttgtaggatttttaaaggttactttgatgctgtggggtgggcaagagtgaaaagcagagacatcagttagggggcttgtgcagtagttttaagtaattgcagcttgaaccagggcagtaggagtggagatgtagagaagtagatggaattaggatatgttttgagaggtacagttggctgtaccacttgctgtgtcacctcaggcaagttactcagtatgtgccttttggtcctctgctgtaaaatgagaatactagtatgaaagtactaacttattggtatatgggttttgaaataatattaacagtgcttggcaatgtggtaccactctccctccattgttcttgcttagaaagcctcaaatgtgattaaattcaactcagtgtttgtacttgcacctgagtggccagagatgcaccttgtagccacattgacttgtcttgcttaaatttatgaacattaaggaacttaagttcatgagcactaaggaacattaaggcacactaaggaaccttaattgggtccttagtatgcagcacctgacagtcttacagtttactagtccagtcactcttccactgccacaggatgctttcatatcatctagcctgcttattttcacttgatgaccctagtctttatttgattgagaatttggaaataatcgagacagaatgtctacaaggtcctaccgtagctacctacctgctagcctcttcttactgtagatagttctgaattgtgggcggtgctatctaaggcaggtccttccacttttccactgtacctcatcccctgtcatgtgtgaaggacatcactccatcagatcttttctcttcatcactgatttttcccatttctagggtatacaaacatttttccccatcttaatgatacactcccttgtgtccacatccctctttagctgctgccctatttccctgcttctcaagaaaattcaggagtatctcttaattctgtttacttttttccacatcttgctcttttcacatccaccatactgttcctaaaagggagtcctcacaactttgtacttgtgctttgtccttaagcacaatacttttaaaaaagtctttctcctctttattaaaatgagagtaataataattgaactgctttcctaacagttgtgaaaatcaggtgagatcatgggcatggaaatatttagtgaattgtgaaattagaaataaattttgcagtttttaaacaaatcctgctttcatcagtttttatttcgatcatttcactattctttctttaaaaggtttgtatgaatgagatattctcattttcttagattgacataatcagcaattttgaacagtgtgtaaaatcaatgaacaaggtcctgccgcgatagatgccgtataggattccagttaatttctgaaagaaatttgctaaatttaaccctactgtggcacagtgaatcgtacgaaggacactacaccatctgttccctgtaagtttagataaataaatgttttttatagtgtcacgaaagctaattttacaactgaatgagctttataaaacttgtaaacattgtataaacttatttcgaggaggtagaccagctacaaatgactgacaatacatgaacagattctggaggcttaaacaggtagataaagttgttctcaccaattattccccacacacttctggttgaattaggtaggcaccttgtttttgctagtgcactggagagatccattctttgcctatatagaaacttacaggtatcttgggaattctgcttactcagttttcaaattcctgtgtttcttttggtcttgttgaaatcatactgttaggaatatattttataatagattaaattggcatgaattggttggcttaatttctgtgggacaaatgggttttggatttcaaatcatatatttaaaataatagccttttggatcataaccccagtttgaggattgcctttgttatagtgcctgcctcttctcacataattaatgttatgctatcagttattgtttcaattgtaaaaatctcctgtactaaattattttattccttgggtccagtgaggagatttttcctatttgtactgaagtcagctgacatttttaaaatcaaatttgtatttgtagaaatatcaggaacctaccttgggacagaaattccccaggaaatactctggtgcctgtaccagtttctcaagtggaaggagaagaaccgaagaaccaaaaaagaaaaagcattacctgtagtgtaaacataagaaatcctttagtacacatttggctttgggaatctcctttattttgctaattgttgattgccaaaatttaattgctgctattattttttaattaggccgtgtagtattagaactgccttagacctttttcttttaaatgaaatctctttttctctttgaaagtccagttttccctaaattactcaagtaattcaggctcattatagtaaataaagtatagtaaaatgagaatggcttttgccatcggtctaaggaaccactgtagactctgtatatccctctagtcttttcaaaaaatacatttacacataatacatgaacacaactacactatttgtttaaaaaaattaattagcaactagctttttttcctcaaacatagttataaatattcatttatattgcataatgttcaaatgaatttatgtacattaatttattttaccatttctcctttgtggatgtttagggtggttttcagtttttagtattgcaaaaagcaatgtagtgcacatactttgtacctttgtctttgaagtagttacatgagcacctctagcattgatttctagatgcgaaattatttggtcaaagtgtggcagattgcctttaaaaatgcctggtcaggctgagcgccgtggcttatgcctgtaatcccagcactttgggaggctgaggtgggcggatcacgaggtcaggagttcgagaccctcctggccaatgtgatgaaaccctgtctctactaaaaatacaaaaaattagctaggtgtggtggcgtgcacctgtagtctcagctacttgggaggctgaggcaggagaatcgcttgaactcgtgaggtggaggttgcagtgagccaagatcgtgccactacactccagcctggtgacagagcgagactctgtcaaaaaaaaaaaaaaaaaaaaaagcctggtcagtacttacacacattaacaatacttgttatttacaaataccatctcccatatgagtagccaggattcaaatttagagactctgcctctagagcctgtatgtttaacctttttatttcatctgccttagtgtccccattagaaaaagaggataatagtatctacctgtgtactagttaacctattactgcataacaaattaccccaaaacttaattagaacagtaaacacttactatttcataatttctgtgagtcagaaattcagggatattttagctgtgtggttcttactcaagagtctcaggaagttggatttaaggacttcattctatgcattaaaggcttgactggctggagggttcccactgaaagtgacttcctcacatggctaacagcttggtgatggttattgactggaggcctcagatcctccccatatgtcctcatgacattgtggctggcttctcccagtgttagtgatccaagagagcaaaatagaaacgatggcttttatatataaaccagcctcagaagtcacacttttacttcagcagtatcttactgttcttgtggactagccataatttagtatgtgaagggtatgtaccaaaggcttgaataccaagagatgggagtcattgggggccatcttgggtgttggctactacaacctcatagagatgtagtacagattaaaagagttaattattgtgaggctcttagtacactgcctggcatatggcaagtacatagcctgcattagcttttattcagatgttatatttcagggctacccattaaaactttacacaattatttatactgtatatagttacaacagtaataaggaacaacatagttacaaaagtaagaagaaaaaataatactgtaacagtgagcacgctgttatatggaatatgcaattgctgacctaattaacaagcagtagcctagaaatcttatgcaaagtgctgtgtaagaagattgacatggcagctcattatactatcataggaatatgatttacaagatgttattttgatgtctcatgcatgacctaaatttgtcgaatgaaaaatgactgcttttttaaagagacagagtcttgctctgttgctcaggctggagtacgctgacaagattatagctcactccaaccttgaactcctgggctcagtcaatcctttcacgtcagcctcctgaggtaactgggactacaagcgggcaccacagcacccgtctaattaaaaaaatttttttggagatggtggctcactgtgttgaccaggctgacctcaaactattgggataacaggggaaatgactacttttaatggttgttggcctgaactagaatagtgccagtgccacagagatgcacggtagtgctcacattagggaataattagatggtaagtttagctttgtggcggcacttttaaatacactttatgattgtcttcctttggaggaaaaaagaaaaaccatgcccatcatgtttaatattatgttgagtacgtttttatttttaaatgcacgattttttaagagagaattaagtagctagaaaaaatgtttgatttcttgaatgttaaccatgtctttgtctctagtggaattgatgataaaccaccattatttatgtagtgggaaatgcagcacaatgaaagttctagccttggttatgtactgggactgtggtgctcaggtttatattcactctgttgagatggcttactggaatgggagcgttggtgtggggctcagcgcagttaaaggagtcataattgcatctgttggtgggccatatcctttccaagagaaaccttgtgctgagttcatacctcttcctttgaagcatccagaaagaaggcagtctttcttgctaatctgttttgaagtatgctcaattaggttggattagggatgatttaaacaaagtaatttagacacagttcttctacagatacattatggtttaaatacctctaggacatcccgtgaaggtgttcagtagagagttaagtgtgcataaatgaaggtcagggagagagagctgggctagaaatacagatgacatctgcatggttattgaaactaggagtagacacgatggattatcctggaagtctaagtagcacttaaagggctggccagggaggaggatttcgtgaagcagtgaatggagagataggaaaaccaaaagtgtggcatcctggaagccaagagatggcagtatgtaaaggagggacaggtcagtactgtcacacgtgacaagaggaagataggagaggattaagaagtgtggtatcattatggtgttgcagaattcagtgatgttggtaaagagcagtgttaatggaatggccagcggtgggtggggggggactaccagagaaaataagcagcagaatgagaataaatttcatgtttttgtttatcagcacagtattgctctcttttgagtagttggtttgggattatgaataagtgaggacagtggtgtgtatttaagtttttgaagaattagattgtggggggagagagagtctaggaggagacgtgattgttaagtgtttgtttttaaaatgatgaagtattaggtctaagtgtgaatgaaagtgaactgagtgagagagaggctgaaaaagctgggggagataggaaatataatgaatttagtaagatactgaaaaatacttggaggcgaaccagaggacaggtggaaataattaggtttgaaagaaagggatacttttttcatttaataggtgagaaggagatgtaggtgggtctggatgcaacaaagttagacaaagttgaaaataagttcctctgtcttctgtttttaataaggtagaaagtggtcacctgcggacagtacgagaggatgctgtgaatcagatttagagtagaatgcagatttgagatattcttttggaggatggagaagagggctaactagggggaacagaagatttagtgtatccttttctccactagcatttagaaaacggtataaatgtagataggcagtctcttaggtaaaagttgagatttgttagctaagcaaggttaggacaatgagacaccacagagtggttggagtaaattttagaggttgagtactgacaaataaatggtgttggtccaaatacagaattttgtgtgttaggagcagcagaaagacaaggaagtttttgatattagaaagaaggtgataggagcaatgatagtgaagattgaaatgaaagtagagactctagggaccaagtcttaaggagattcaagagcaagtatagtgaacagttaactaagagctggtaggaacaggagattggtcacttataattttaaacatggagtggtttttagatgacaaaattcagcctgtagggttctgtaagtatagattggattgtaagtaaagatcactgttttgttcaaggtaaggaacaatgccagaattttagacaggtcagtgcacctggttccaaagtctggttcagttattttctttgaagtgatactgttgggtcaaatccccgtgccttcccccaccaccttaaaaatgttgaagcatcttggcatgttgccctcaaaaattttgatcatttgatactttaattcttattctgagaatgtatttcttcactttcaatgccaagaattattcaaaacaatctttccagtgtgatagtctattggattaataacatgaggcatcaaaatttatgtctttggttactaatgaggttgagcttttctgtgctgtgactgtgtaattgtgaattgcctgcccaatcatttgtccaatttttttattagtgcaaaaacagttttgtgccttgtctctctctctttttttttttctttttcttgagacagtctcattctgtcacccaggctagagtgcagtggcatgatcttgactcactgcagcctcagcctcccgagtagctgggattacaggcgtgcaccaccatgcccagttaatttttgtatttttagtagagatggagttttgccatgttgaccaggctggccttgagctcctggcctcaaatgatccgcccacttcggccttccagggtgttgggattacaggcgtgagccatggcacccagctgccttttctctttttttaattgcttttttttttttttttgagatgcagtattgctctgtcgccaggctggagtgcagtggcacaatttcggctcactgcaacctccagctccctggttcatttggttcccctgcctcagcctcccgagtagctgggactacaagtgtgcaccaccatgcccggctaatttttttatttcagtagagacggggtttcaccatgttggccaggatgatcgtgatctcttaaccttgtgatctgcccgccttggcctcccaaagtgctgggattacaggcatgagccactgcgcctggcctcttaatttcttttttttttaatttttatttgtcctttttttctgtttgagttgcatgtttagcctgttaatttttcttctttattgaataaacatttttagtgtttagtctacaattacttctttagccaaatcatataggtatcttgtgttgagctcccattgttatgttcttaatattctgtgtttgttttgttttgtttttgagacagaatcttgctcttgtcatccaggctggagtgcaatggtatgatcttggctcactgcaacctctgcctcctgggattcaagcagttctcctgcctcagcctccgaagtagctgggattacaggtgccagccaccatgcccggctaatttttgtatttttagtagagatggggtttcaccatgttggccaggctggtctcgaatccaaccttaggtgatccgtctgccttggcctcccaaagtatgggattacaggcgtgaaccactgtgcccagccttaatattttttaatcaattttgatttctttgaagcaaaagttatttagtagtaaattactaaagggccttttttttttttttggtccagcttttcttaatttatggggcttttttttcctttggtcctccctcatttttgatataaagctagagagtcccgttacttatttaagcgttttgaaatatgaaatatttaagtctgtcttatacttcattgtaacctgtcaagaatgagatattcctgcatgtttattttcttttatttgttgcttcatatgtgtctttttttcttcacatatgtctatgctctgttcatttattcatccagcacaggataatggagcacccactccatgccaagccactatgtattgttctgagaactgggtttatgcatagagatacacttggtctgtaatttatttgtagttttcctaaataatcacacttgcaaatattgtatccttttgtccctctacaaacaaagtttgagaagaaatttaccatacaccactgagtgctccacccatgctctgccatcagttggttgacttggcaagtctcttagcatgtaggatagcagtcttcaaatgacttggtttcaagacttgtttacatttaaataagttattgagggctccaaaataacttttgtcgatatgcttacgttttattttatttatttattttttaaggcagattctcactctgtcacccaggctggagtgcagtggtatgatcttggcccactgcaacctccacttttcaaatgattcttgtacctcgtcctcccaagtagctgggattacaggcatttaccgccatgcttggctaattttttttttttttttttttttttttttgcatttttagtagagacagggttttaccatgttagccaggctgacctcgaactcctggcctcaggtgatcctcccactgcagcctcccaaagtgctgggattacaggcatcagccactgcgcctgacccaatgtacttacatttattaatgtttaccacattagaaattaaaacaaactttattaatgttcatttaaaaataaatataaacttattataataaatattatacttactttttttgcaaaaaataactatctgccaaaacaacagtaacaccaaagcactgaaaagactgacactgttttacttttttttttgcaaatctgatgtttggctttaaaaaaattttacttgtgttttacctttgaaatggggaacagtggaaaatagtggattgagatttttgtgatggatttctactttggggaacatcagaatagcagtgatgctactgacccatttcaggaagatcagtgcagcaaggaaggtttatatggtatttgcaaaatactctgcttggagtcataaggggtggtaacctctttatttccgtctcctcatctataaaattgagtgggtgacatttccttttgtcccagagttttgaggattgtgtgaaattgtatgttaacatctgaagctaaataagctttttttatctttgaagtacacaccatcactttttaattgtacaaaagaaacctttatttgtatccctttctgtctaaaactcaagagaactgtcaacttagataattttcaagaagtattgaatttttctccttggtttttgtgcctttaaagtaatgaaagtagttctataaaggcaaatgggaaagccatctctgccttttttactcctgtacctccctacttaacaagttaagaagttcattagactcatttttgtaaatactgtataatgagcctaattgtcacacaattttaggaaatgaagagactataaaggtcatggattccagctcctcttacagatgaatgaagctgatgctgagagaagctaagctgcttgtttaagagcattgaagttgtctggaggttttcagcctgggctgaactttggaaacacctgtaaaactttttaaaaatactgatgtcaaggtcccactctcagagattatgttttaattggtgtttgtaaagtccccctggtgattgtaatgaaacataacacttaaaatgaatcatttgccttttaacattcacaatttaacctttaacattgaagtattcttattgttgatgagactgttttatttcttagattttttaggtgatcaagctttactttcttgctccgtgggaaataaacccatgaacagtatataaaccaaaactttgatgttgaaaactttattttaaattatcagttcaactagtaaatttttaaaaatctgtgtgtatcagatggtgttaaagtttatggctatcataactagtaatatgagttaatgttgaatcttttttgatataaattggaaaaacataatatttgaggttttggaaacattaataattatgtatataatttttgtcttccattatttattcagattctggattgtcattttttatttagactttttccaaaacaaatctttatttttcctataggtgaaagcactgaaagagaagattgaatctgaaaaggggaaagatgcctttccagtagcaggtcaaaaattaatttatgcaggtatgaattaaatattaaaattaacatgccatgtcttgatattcttttagttttagaaatgttatcttatatattgtagtatattcaaattgtcagaaaaatgattgtacaaataaaagcagtgaaagagcagtcatttgaatctaatattaatattcaatcttctctttattcacatttgccctgtgtatttttccatcaaatggtattagttttgttttatcttttgtaagcatcgtgtaactggcttttgtttttttaatcaaacggagcttttttttttaaattgaattgaaaccatttatactgattgtgttattattagtatgcttggaatcattcctgtaaaattattttaaccaaaactaactgaagagtacagaaaaaacacatcacacagacacctacaggaagaaaaaaaattaatattcagattatgtaaagaattcttagaaatcagtaaggaaaggatgaccaataaagcaacaaaggataagagtaggaattatacatttgactagcctcactaataaccaggaaaatgtatattaaaaatacatttgatatccaaatttttagagaaaatgctttcattgtagatgttagtaaggtgggtgtttgatcacccatggattcttctctttttctgaatagtgtttcctaaagtgagacagcctggaggaaatgctaacctggtgattcagtcccattatttttataggtcagaattcagaagcctaaagaagcggacataaaattcaaatttccagtttcttgttttggcctgttttctcattcctatccatattcctttctgacttaatgttagcagcttttgattcaatagctttttaaaggtggaaaactaaattcatgtagcaagaaacactagagagtcctagctacctaatagtgaccttcagcacgaccacagttttgtgtacttcgtgcatttctaagttctgtagcatcttgccctttcttgtgtatcatgtcgttttctgaagtacttttagtatcttgctttgatagtgttagaacatttctgatttatcagatatcagtattttggggagcaggaaatttgtttctctccctttcttcatatcataaaagaatataggttattttccagaggacccctgtgcaatcggagtattgaattttctttatcttcatgatctcctccttttcagggcctctttcatatttccttgcccagtaagtcttttatataatcaatacatttgtaaaaattgattgtcattctatatacactatataagtttgacatcttttagtcaaatgcttatgctttttagttttatttgtttgagagagggtcttgctctgtcacccaagctggagtgcagtggtgtgattatactcgctgtatccttgaactcctgagctcaggtgatcctcctgcctcagcctcccaagtagctaggaccataggcatgtgccacaatgcctggctaattttgaatttttttttttcataaacagggtcttgctatgttggccatgctggtttcaaactcctggcctcaagctatatttcctcctcagcctaccaaagtgttgggattacaggtgtgagccaccatgccctgccacttaggagttgttttatttttatcttgattgattggtttttctttgggaaaagtattaactgatagaatttatgttggtgattcatattttaatatttctgaaatattcatatttcgagtagaaagttgttttaactgaagtgtaagagaaagattatgccttaaatgatttttttttctcttaatgtattaggcaaaatcctcaatgatgatactgctctcaaagaatataaaattgatgagaaaaactttgtggtggttatggtgaccaaagtaagtttcaacctcattctgtatatctttatgcatgtaggtctttttaaaaatgatgatcacaagtccacacaatggacacagtttatacacatccatagtggtgtacacttaactactatgaaaggtttttaagaatttaccttaagtgaaacataaagttattaatgttttacattaattacacattaaactataatatagttttaataaaattttatgtaaattaaaacaattgaaaaataaaatgtcatgttaaaattatttttgctacagtagtgaaatcattatataattcttttaaaatgtctttataagtggaataaatgtttattctgtagtttttgtaagcttgccttaaatagacctgctaaattacgtactagtcctaacagattcctcaagacagaaaaggcatgaaagcttattattacagtgatagttcttagtgaaagaatatgtttttagaaactaaaaaaagggaaaagataactaaagaaatgatggaatgatttttatgaggaagttttttttgtttttgttttgtttttttttttttgagacggagtctcgctctgttgcccaggctggagcgcagtgacgctgtcttggctcactacaagctctgtctcccgggttcatgccattctcctgcctcagcctccctagtagctgggactacaggcgcatgccaccacgcccggctaatttttttgtatttttagtagagacagggtttcaccgtgttagccaggatggtctcgatttcctgacctcgtgatccgcccgcctcggcctcccaaagtgctgggattacaggcgtgagccaccgcgcccagcctggaagttttaaacagatacttttttgtgatttagtaggctggaatgtatttggaacaatttataaaattaaattttttttaaagcagagaatgaacatggatttttttaagagactatttatatacttgtttatttaaagatatataatgcagtgtagaattaagagacaaatggagaagtggtactcatgacattcatttttaggattggattgtcataatctgagaaagaacagtgttacttgtagcactgaaaatgagtttaaatcactaattgaaaccacttcatcaaaggccaaaagtggattaaatgtgggttttttctcaaagtcacaaaatagttaatagtaatagaaaatagagtcgaagaaataaattctaattaccacatgcttttgtactgggagcaagcagctaaatagtttacaagtgttgaacattttttaattcattaagaaccatgttgattttgctatacttaagaacttaagtcattatatgttaagtttaaaaacaagcagaatcgtgaggaaaccttgtatcatctaggtttttttattcaactgtggtaaaatataacaaacttccagtttaatcattttaagtgtacagttcaataacattatagttacattgttttgcagctatcaccatcatataagtggaatcctatggtatttgtctttttgtgactggcttatttcacttagcataatgtcattgaggttcatctgtctatgttatagcttgtgccagaatttgctgaacttttaagactgaatactatcctattttcctatctagttttagcatacatagtacataatgggaaatgtgatagccacacatttaaatatgttttgttactggtcttagtttcttttaatattacagtgatcctgactgtttagaacacaagaattaagcagaaaaagtctcaataggtgcgtgtgtttgaggaatagatacttgaagcctatcattatattgcatacagtccttttgtttttccttaaagtcttttattcctaatattacataggattctaatgatatttatgattgttttatttgaagttaatagaggacaactatgaaaagggagggaatgctgctacagtaaggcattatggaagcactgagaaatgaccttattaatacaaagaagggaaaggaaaaagctattaagatcaaaagcaagaataaaaactaaaaagcagagaagggcttggtactgtttagaataaagtataagtagctgttcttggcagtaggaaccttgaagggaagttacattgcaatattattttgataacaattaaggaaaatattaaatgagtataccacttttaaaaatacatttttatctagattggttattataaagttttggtgcttaagactctaaattttcacctttgtgaagctccagtttatccagaataactgaagatccagaatgatctcaggatttcagctcattttagttttagaacagtaataatctgcagaatattatattggctgttaagaaagttaagctaaataggaaaagaagggagtaatgctactagtattttttaaaaacctatcacctttcactaacctttttcctagtgtcttctttattagttcaaatcaaaaagacaaggcagctcattggttttagagtttgtttatgcctgtggcaaattatgttgaatttaagccttgtcttccactaaaacagctaccttttgtccttgggaaagttatgaactaaacaggtagcgagcattgagaggccttaggagaagactaaaaatcatgtatgatttttacacatgtacagttgacccttgaacaccactgagcttaggagtgctggcctctcccctacagtcagaaatctgcatataccttttgacttgcccaaaacttacctactaatagcctactcttgaccagaagccttactgataacgtaaacagtggattaatacatgttttatatgttacatgtatgatatactgtattaaagtaagctagagaaactattaagaaaatcatggccaggtgtggtggctgatgcctgtaatcccatcgccttgggaggccaaggtgggcggatcgcttgagctcaggtgttggagacctgtctgggtaacatggcgaaaccttgtctctacaaaaaaaaaaaatacaaaaatttagcagggagtggtagtgtgagcccgtagtcccagctacctggtgttgggggcgggggcagtggctgaggcaggagccttgggaggttgaggctgcagtgagctgtgatcataccactgcactccagtctgggcgatagagtgagaacctctctcaaaaagaaacaaaagaaaatcacgagagagaatatttttagtgttcattaagtgtaagtggatcatcataaaggtcttcatccttgtcttcacactgaataggctgagaaagagaaagggttggtattgcggtctcaaggtggcagagatggaggaggtagaaggagaggcaggcacactcagtgtaacttatattgaaaaaaattatcatgtaagtggacccagtgcagttcaaacccttgttgttcaagggtcaactaattgtttttttgctctgtgggaagctttatggctctatttccagttcagaaagtgctgagcgtgtggaggtaacttaatttggcctttatttttctgcttaattacatatatgtctgaaagtattgtgaacctttttgtacttggatctgttgatttgtagtcaattttgggattttcctccctcttctaaaaatacagtacaacagaatatttgacatgtttataaataaacatttatactgccatttcaagaacattattttgggctggatgtagtagtttatgcctgtaatcctagcgctttgggagcccgtggtgggaggattgcttcaggcccggagttcaagaccagcctgggcaaggtagcaagaccctgtctttaaaattaaagaaaattattttattaatgcttttaagtggtattaggtaccttaaagttacaacttaggtacataaagtttttttgggaaaatgatacggtttatatctatatatatatatatatatatctatatatctatatatatttcaaattttttattttatattaacttgatatgaagatggaaattgttgggtaaaattaattgtggttgatagttaagattaacatacgctgtcatgagctttgaaagagtaaccatgagtcagattgttaatattgatcatttattgtgtcattttacaaaattattttcaagttataggttgttattagtgctatgtttgtggcatcctgtaacggtacagtctaattagagatcaggcagtatgtagtattttattgtaattattttgtcttttaatgtgtttagcccaaagcagtgtccacaccagcaccagctacaactcagcagtcagctcctgccagcactacagcagttacttcctccaccaccacaactgtggctcaggctccaacccctgtccctgccttggcccccacttccacacctgcatccatcactccagcatcagcgacagcatcttctgaacctgcacctgctagtgcagctaaacaagagaagcctgcagaaaagccagcagagacaccagtggctactagcccaacagcaactgacaggtaggaactggattctaggacattctatctcaaaatccgtgtttaacaggaacttcatgcatttattttgattattgttttgatcaaaccgactatatctattacgttaagctttttttaaatgtttgactaaaacatatgctgcgtctgttttgatagcttactaaggagaatataagtacaaattttcataatcagatttctgtactctgttgatttgggcagggtggggggcagtggaaaggagaaagcaggtgaaagtcatttttttttttttgagtagaaacgttaggaaatacaaataaccaaaatgaataaggattacatcatgacattgccaccctgatcatcatttgtacttgatctgtattctttgtggtcattgtcatatatatcataagcatccttccatgttagtaaatctttcccgtagttatatagcattgtgtttggttctgacatttgttagctcttgtaacctgaacctatggactatttcagtttttcactgttgtatctgtatctttgtgaacttgtgagaaattcaggcttctgcctgtgtggatctttaggggaaaaaaaaggaaaagagtgttgagatatttgaggagcaagaaataatttcttgtgggaagttgacagcagagacacctcaactaagtggctgcttaggcagttaggattattgagcagtttaagacaagacttttgtttttctccccagacgatcaggtaaaatgaccaaagcaaatgcttaagtcagagttctcttggttggaaatcatacagcacaattccttgatctaagagcatgagttatattatgaccagccttcactggcactacagctgtttgtattttgtgacttagtgcaactcaggacctcagaggcagtagttatatgatctttggagtcagaatcagacacagtggaaaactatgcagtgactggaagggtttacagacatggaaaggggttaagatatatatgacaatgatcagaaagatatagttgtgatccttcattttagtgttctgcctttgagtgtggtttctgtgtctgacttagtcaaccatgtttggaggagtctgagccacctggttcattgcttacttgggggtctctttctaaataattgattccctaagaagacaacatgggtttaggcaatagaatatttgccctgttacttgcctagaacactgctttaagcattctatgacaccattgcctaacttgatccatctttcccatgtacaactagaaatgcattcaaccatcttatcctagtggataccacctagagtcaggttaagctgttacatcaaagggctgttgatcaggtctgtatatgagagggaacttacgcatttaaaaaattggtttactaaagcacttaaatattacaaacttaatatgtcttaagtcagcacaatacatcttattctcttaattgctttaagctcctttttaaaaaaaaaaagcttacagtgtgagaattttagagttgatcaatacattttaatgtgctaatgccatcaatttaaatttctttcttcattaactccatttttttttttttttttggagacagagtcttgctctgccacccaggcaggagtgcagtggcgtgacctcggctcactacaacctccacctcccgggttcaagcgattctcctgtctcagcctcctgagtagctgggattacaggcgcatggcaccatgcccagcttatttttgtatttttagtagagaaggggtttcaccatgttagccaggctggtctcgaactcctgacctcaggtgatctgcccacctcggcctcccaaagtgctgggattataggcatgagccaccatgcccagcccattaactctagttttattttcttcctggagttgcagttttacttacctattctaaaaagagccagggttatcttttcagaccttttcagacctacagaagttgcataagtaacttgatggtcagtgatccaggaaagcagacactagagtttgttacttagttggactttgtacaccaactgcttactcttatttctcaaaattttacctcagaaatacaacacaggaagagaggaatgagggaaactcagaaaacaagctgcttaaatgtgtcttagttcctttgtctttgctggaaaatatctagtgtcttgtgaagcacaaaacctagtgaataattatcaggagataagctgttaagactttgtggagtgactttgtgggaagtctgtttaggaccactgacctgacgttttgttattagggatttgtttctttaggtcaattttgttcttttaaaaattgtctgttacagtgcaaattccacttgatatctacctgagagaaactgcacttgtgcacatgactgtattgtttgtagtaaaggacaaattggaatcctaaattgacctgtggtttattcgtagtagagaacaggactactcaaagtgtggtagtcaataggctgcatcagcatcactgggagtgtgtttgacatgaattcttgggccaccctggacctgtaaatcagaattatctgggagtggatcccagaaatcaacaagccctcctggtgaatacttgggattctcggactttgtaaaatttgagaaaccctgatagctgatactacaagacagttaaagtatgtaatgtataagcatgttaaatgagtgtggttttgaggctttgttattgagtgaaaaaagcaggttgcagaagagtataggcaataaccataaaccagacaaaacccataaacaacattgttcattttctgtgggtatgcatgttaatgtgtagaagaaaagaaggcaagcgttgacatataactaatgagtggtttcctctgtggttggagaggggagaagtagtgagacagaatcaagattaaagaataatggttaaagtctatgtacatccagtcttatctgtggtgtttaaagagaactttttaaaaacaatgtgtgggccgggcgtggtggctcacgcctgtaatcccagcactttgggaggcagaggcaggcggatcacaaggtcaggagattgagaccatcctggctaacacagtgaaaccccgtctctactaaaaatacaaaaaattagctgggcgtggtggcgggcgcctgtagtcccaggtactcaggaggctgaggcaggagaatggcgtgaacccgggaggtggagcttgcagtgagccgagattgcgccgctgcactccagcctgggcgacagagtgagactccatctcaaaaaaaaaaaaaaaaaaaaccaatgtgtgataatagtgtaaattattctaagggagatgtgtcttaccggattttaaaatgtattatacagtaatgattaaaacagtttggaatggctcatattagaaagattggtcagcgaaatcaacaatagctttgaaatagacccagatagatacaggaacttaatataaaggtacagtttcagaacaatgtggggaaaatgctattgagatctcaccatctagaatgaaaaaagaatgacccctcatactgtacacctgcaaaaataaattatagatggatacggatttaatgtaaaagcaaagccataagctaatggagaacaaggaaacaaaagaatagtcttcactgtgagaagtcattcctaagcaagacaaccaaaaaaaaaattataacaggaaagattgataaatttgactatagaaagaatttaaatgcaggaaaccaaactacacattgcttaataagagcttgatttggtcttttaaatggaatactgtgcacatttgggaagaaattgaagtagatttgattgtgccgacatagaatgattgttaagttaaaaaaacaccaaagcaagacacaagttgttattcttttaaatagaaattggtgtcatagtggttgtctctgggttaggggtaggaaaaatttagtttttatgtattgtgcgttttgaaattttattttctctgcattagttttacattatatttaatgaagaacttaaattataccaagggattatattaatcataatattcttattgggtgttacgatgccagacactttgctaagcactgtactagtgtagccctacccacaacactttggagtatatgatacggtcgttgacattgtactgatgaagaaacaggcttagaaaggttaagtaatttatgaatccaaacttgagttttctgctcttattatgtactaccaagggctttctcagaactgaaatataatgtgtgtgttgtttttaattgagatacaggtctaagtgtgtatgtgtgtctgctttaatttaaacttctaactactacctttaccactgttgtaaacttaagtttatatttctttggcttgctcttggtctttcataattttctgtcttttattgcagacttctctgtagtttcccaacagaaacttaatctctttaaactgattttcattacattcaaacttggatttaacccatatctaccttttttgcatatgctatatttctttatttgaatatcttctttcagtgtcctcattcagaacttacctataagacttcattatgtaaagactttatagcctaatttggtttctccatgtgctattttgtatactgcttttgatatttcttctggtgtgacttgatttataaattatttaacttctcatgtaaattatttcaggtaaataattgtgcattatcttttttgtattcaatagatagctgttaggatattattttatatattttgatatttaaagtgatggagtctcagaatagaaggagtaccaagattgaaaatttttcccaaaccacaaatgttgtagataaagcttttggatttaatctagaagagacagtttaaatactgtagtcagacttttatatttaattaaaatcaaagaatctgtttaccaattggatagttactaaactaatgtaaattaaattttatatactttttaaaatgtgatttttctaaaatccttttgtagtacatcgggtgattcttctcggtcaaacctttttgaagatgcaacgagtgcacttggtaagtatctgcttttccttataaataacctataaagagataggaaagaggtttcacttttctagatcatgataaaagtgttaataatttgcatggttgtttataatcaagctgtaagatgattgatttaggtaattattcaattaatagtgttactaaagacttttaatgtttatgtattgagttctttaaaacttgctctgagttgagcctacttggttaaagcaaataaatttccattttccggatgtgaattttaaatgtgatcctaacatggttgatctgtgtatggatttattacaaagggtctttgaaatgggtatgaaatttttctaagatctgcctcacacttcatgtgtattcaccattagacttaattcaacttgatggcactatacattcccatctacatcttgttgcttgcattggcttgcagcaaaaatgcctttttatcccaacttttaattttacctactgaataatgcctttccatctcccatcaccccaatctgtcaaaatgaagcagcattttttttctcccattgtagcatctctgatacagttcctgctaattactggtttattggctggcaactccattcctagtttgttactcttaaatggcagggagggagaaagcgaggaataggtagaaacagcagctttggtgcagtacaggcttctggattcctgcttagcttctacagcagcagggttccagcagcagtaccacctcctagcatctgagttggttctctgagctagttggactggaactccgtgatgcccttgttgctgtggaaaatggcatgtacatttagtggcaaaacggcagtttaaattatcttaagatcgcctgggtgtgacaaccccagattttcatctttgaggagcagtgtcctaaaaccactctgctatcaaatacagtgtgagttagtctctagccaggaaaacagaaaccactctatttcaaagagggaaaggcttaatcttaggaaattgttaggaattggaagggctggaaaataggattacccagagaggcagtaaactgtctgtggcctcggctccagctggagccagctagcacttgcccctgatggtgttgaaggctctggctgtggtcactgctgctgcagctggaatgcattgatgctcctgagttcccgggagcctgggaggccatgctgtagctgctgctactcaagcctctgtgacgatgtcttcccattctcagctttatggtctcgggatccctctacattttcatctttaatttacccaagtctctatgttgattccctgcttttttattttattttatttttctgatttatcttgttgctgtacaaattaaccttgcttctttaaactttccttctttggctgctgtgacaccactcttttcctgatccatacctcaggctcttccttctcaagctttctagttaattcttttcttttttcctttattttcttttctcttttctttcttcctttccttttcctttcgtagtctcactctgtcgcccaggctggagtgcagtggcatgatctcagctcactgcaacctccacctcccaggtttaagcgattctcccgcctcagcctcctgagtagctgggattacaggcacgtgccaccacgcccgactaattttgtgtatttttagtagagatggggtttcaccctgctagccaggatggtctcaatctcctgaccttgtgatctgcccgcctcggcctccaaagtgctggggttacaggcgtgaaccacagtgcccggccagttaattcgttttattttacctgactattaaatgtatgagttttctatggttccattctaggtcatagttcaaagtttaaattatgggaatgaccaataccatccatatactatatagattccccaaattacagctgcagtacagatctccctctgaactcccaaactcgtatcttcacattgtcaactagaaaactttagaacctccatgacttcaggtttcaaactgactcattttttattccccagtctgattcttttcttgttcacttcttacttgtaccatcattcattcatccaccctctgcctcttttggcccagtaagtctgtttcttttcttttcctttctcctctctcctctgtcctctctcctttctcctttcctttctccttccttcctccttccttcctttctccttccttcctccttccctttcttcccctcattccacagttactaatgactctgtttcttaaagtctctggaatatttgttttcactgtcatttagttgccttagttcaggtccttatttcacttgtactcttgcattatccttatccacctggtctgcctcttccttaccagagtggaaagcaactctcatggggtctttgttaattcttttaatagttcctcatgacctggaagataagtccaaagcttattctttttaatttttaaaatttgtatatagggagtacaagtgcagatttcttacatgcatatattatgtggtggtgaagtttgggcttttagtgtagccatcacctgaataatgaacattgtaccaaacaggaagtttttgaacccacactccactccccaccttttttgtagtttccagtgtctgttattccactctatatgatgtgtgcctattgttcagctcccacttgtgaggacatggggtatttgactgttactgagttatttcatttaggatagtggcctctgtagttctatccatgttgctgtaaaaaagacatggttttattctttttgatgggtgagtattattacacacacacaccacattttctttatctcatcctccattgatgattccatatctttactattgtgaataatgttgtgattaacatacaagtgcaggtatctttttgatataatgatttatttccctttgggtatatatacatagtagtgggatttctggattaaatgatagttctgtttttaagttctttcagaaatttccgtactgttttccataaaggatgtactaatggacatttccgccagcagtgtataagcattctattttctccacatccttgcccaacatctggtataagatggggcatctcattgtggttttaatttgcatttctctgatgattggtgatgttgagcattttttcatgtttgttggccacttgtctgtcttcttttgaagaatgttttttgccagtcatgttttttgcccactttttaatggggttatttgtttttttcttgatgttttaaagttctggataatagcactttgttagattgcctaagccagtgtccagaagagtttttctaggttttcttctaggtttttttgtagtttcaggtcttaatatttaggctttaatctgttttgagttgacttttgtgtttgatgagaagtctgggtctagtttcgttcttctaaatatggctatccaatttcccagcaccatttgttgaatagggtgtcctttccccggtgtatgtttttgttgactttgttgaagatcattttggttgtaggtatgcagctttatttctgggttctctattctgttccattgattgatgtgtctgtttttataccagtaccatgctgttttggttacaatagcctggtagtattatttgaagtcaggcaatattgatcaaagcttattctgaatgacatatataaggttcttcatcaccacctcttttgcctcattactctgtttcttggccagtctctctcgtttttgttttttttgttttgttttgttttgtttttgagactctctctctttgtcacccaggctggagtgcagtggcacagtctcagctcactgcaacctccgcctcttaggttcaagaaattctcctgcctcagccttccaagtagctgggattacaggcgcctgccaccatgcccagataatttttgtatttttagtagatacggggtttcaccatgttggccaggctggtctcgaactcctgatcttaggtgatccgcctgcctcggcctcccagagtgctgggattacaggtgcgagccactgtgctggcctctctagttctttttacaagtcatttgcctttggacttttaagatctaaaaagtatcacattgcttatgggtatttttttgagattgtataatttaactaggaaacatgattttaggagtcatagtgtaatgattaggtgtggagactcttgactgtcagcctgtgtttgtatctctgcaccatgacttaatacttttacgaattttttttttttttggagacagtcttgctctgtcgccagactggagtgcagtggcgtgatcttggctcactgcaatctccgcctccggggttcaagcaattctcctgcctcagcctcctgagtaggtgggactacaggcacgtgccaccatgcccagctaattttttttgtatttttagtagaggcggggtttcaccatgttggccaggatggtctcgatctcctgatctcgtgatctgcccgcctcggcctcccaagtgctgggattacaggcgtgagccaccatacctagtctttaccaaattattaatctctccaagctgtaccctcctcatcttttaaaggagttgaaattaaacctttcttatgaagtagtgagagagaactaaatgagaaacaccatgttaaaatagtgcagttctgattttttgtagctcgtaatttcgtttgtattgatactgatttctgtatctgggaattaggttactgaacatgtattgctacttgagttgctttgtgctcgaattatatcagtagataagaaaataaataattaaaatttattgttttatgggatgggaaaaggaaagtcattattttaagcaagatatcaaatgcttaatctgtttgtgatatttgggggtttttagctattaaacacctttatttttgaaaattctgcagaaaaaaattattcaacagatactcggtttcagctgtgtatcagggaaacatgcagaatgacatggtttcctgcacagtcaaacttgcattcagttggggcaagaaaaaaataatgaaacattaaaaaaaaaaaaagataagtgatattaacacaaagggcttccctaaagaaaaaacagaaggctacctaggatgactaggcaatgccttttaaatatggaactgaagcatgttgaaggaactggccatctaagatggctggtgttgtgtaaaggccctggggcaggaaaaggtgtggcctgctgaagtaacaccgggaagatgagtgtggtgggtggaggattgttgagggctgggagccagaaataaaatgaggggttttgcgcacacgcgtgcgtgtgtgtgtgtgtgtgtgtgtgtgtttacttgacttttgcaactggctgaagaacagattatagatatggagacaagagttggaaacagggtgtaatcccatctagagactgttgtgggcttgtcttcagtgatgacagtagagaatgaagagatgggtttggggtgtaatttagagataggacctaccaggtatgctggtaagtgaggtgtggaaggaagaggaaaaggaactgaaatcaccagggtttttgtccaagtgcttaggtaaatagaggtgccatttgtttaaagagagcagacagacaatggtgggacacatttgagagggaaatctgaattgcaattagttgaggaatgagtggaatgtgagaaagtggacacatgttcaatagctatggctgtgatgagaagacagcagatggttcctcaaagaggaattaggatgaagtcaaaggtgggaggtgtgtttttgttttagagtgaaatataggacatagttaactactgacccaggataattacacagaggggtaaagatgttggtggagaagagggaggataaccaaatccagtttggtttgagtgtgaggcaacaataaaggtaatggtccccagaacacaagcagaagaaaggatagttttaagtgaggtaagtttatgaggaaaataggtttcatttattcagagtgttgtctgtattgagaggagggagcataggagtctgtaagaagtgacttggaatattagcgctttgggcattttaccaactttgtatagtgtacaagattttaactttctagctcctaacctctctttcccccgtttcagttatataaggtatcaaagggaaactgtgaacttgttccatcggagttgatggtttgaaataccatcccttccccagcatgttttcagaatttggtgtctcttcttaccagttgccttccctgacctcctgctaattctcccttaccttcatacctcatttttctattgtactctgaaacatattatatgagtttcctgttgctactgtagtaagttaccacaaacttattggtgtagaacaacacagattaactgtcttctagtactgtaggttagaagtgtgacacagggctcactgtactaaaatcagggagccggcattcctttttggagactccggggaagaatttttttcctgatcctgtcctaccataccttggctggtagcccctttctgcatcttcaaaggcaacagcataacatctctcatcctggttttgtctcctcctcctcacacctgtttctctgaccctctcatctgcctcctcctactactattaaggattcatgtcattacactggacccacctggataatccagaatgaggtctctgtcttaaagtcagctgattagcaaccttaattttatctataaccgcaatttccctttgccttgtaacctatttataggttccagggatcaaaccagagggcatctttgggggaccattacctactacatatatgttgtaatttatactgttactcatctttgtattcccagcatagtagttcctgaaatgttgtatacatgaatcagtaaatgtatagagaatgcttatttattaaatgttcctttttttcccctccgccctccctttttagtgacgggtcagtcttacgagaatatggtaactgagatcatgtcaatgggctatgaacgagagcaagtaattgcagccctgagagccagtttcaacaaccctgacagagcagtggagtatcttttaatggtgagaaatatgttttactttactccattctgttgtttaagattaaaatctcaaagaaacagattttaaaggaccagttcacttgtcactgatatatgctagatgatatacataatgcttttttttttctagtatgtttgtattttgtgttaataaaatgtaaccttttttaatctaatggtccaacattgtagtagctttttaggtgccactatgcgtgaattattcagaacaaaaatttcttttttcttttttttttttttttttttgagacggagtctcgctctgtcgcccagactggagtgcagtggcatgatctctgctcaccacaagctccacctcccaggttcacgcctttctcctgcctcagcctcctaagtagctgggaccacaggcgcctgccaccatgctcggctaatttttttgtatttttagtaagatgggatttcaccatgttagccaggatggtcttgatctcctgacctcgtgatccgcccgcctcagcctcccaaagtgctgggattacaggtgtgagccaccgtgcctggccaaaatttcaagcttgagaatccgggccaaattcttttgcttatactgtgtatatttctgtaataagttgccagctttttaaaaactgggaaatttcacataaaagtacagatttctggtttaactggacaactttgatcccagatttttgcaagggattaaggaaaatattttagatcgtggaatctaattcattatcctctgattcactctgttaccaacgtaacatcatgcatttaatgaatgatgttactacctggttccgttggcatttgaatttgtttttatagtcagtaggagttgagggactttttgaataaagtattcttttttttactggtaatgggagtttttgagaaataggttgttgtggacatcaactgaaacccttggtattaagatgaaagtctgctagttttacagatgtgacacaggctaaagtaattgaattaagttttttaaaatctcagacttctataattgtctggtgttttggagtattatcaaagtctgaattgccctaaatatcatcttaaagttgcctgattctaacccttttgggaattacatccacagtttaacccattcctttgtgtctaggttgtacttctgttaaaaactcctttcaggtagctagctagtttcagaagagtcagttataagcctcataactgtactctgcctccaccatttatttgcctatgcctttgcatgtgaagttcacaaaacctttttcttagcatattattttatctttttaaattcactttttcattatcttcttgagtagtgtctttaaatgctggcagtttatccagtttgtttggaattgtggaattaataattgttgtgaatttgtttggtgaggagtgtgtaccctaaacagattgtataaaagtattagcttttatggagtggctttcatttacacctgatttagaattctgtataagttcaacagtatcagttattttgatctaatagatgtggagttttgaggtataaaaatacagaatcattgttaccaaatgctaaaactgctgtagagcatcaaatgcaaataaatagatgatacatgagttcatcaaaaacaatttataactaaaatgttttttatatatttgctctttgtttcatagactgaaggggaaaagttgcttttaactgttactagttaagagataggttaaggtgaacggatggaaagaagaaatgttgagcatttatataagaggctatgtaatgtgtgagaatagaggtcgatctatagcaataaagatgaactttttagtttaataaaagagaatttgatggacgccctggatcctaaatttgtatgtagtttgttagcacttaaataactgcccatctgagttaagggtttgcgttggttaactcattcaaaaacattggttttaatgcctggagtgacatctaatccatgcagccattttcctgctgtgttactcttcatcctttatatgttgttgcttttggcttctggtttattagggaatggaagcatttatcatcttattcaattgtaatacttggttctttattctcttcaaaatctataagaacttgataaagactttttaaaaattttaaatgacaagtctatcaatcatgtgcatcaaaataggtgtcccaaaagagtttagtgcatgcagttttaagctcttaataactttaaaagataagtactataaacttacaaaaggcatcacctaaaaactaaatggtttcaatttcttttatatcgattttatgaattttgaaaaattaaattttttgagatactttatctcattttttgagatactttaagtatctcatttatgagatactttaagtatctcatttatgagatactttgacactttaagaaacacttcactgaaaagtacctcaaatttatgagatactttctgagtgacactttctcagtaccatggatcagtaggggagatcctcctgcctggccactgtgtacctggtctgtatccattagatattttttcccccaggagtcatttcagaactgtcaagtgtgcatcaaaacctctttttggattatcttaagctagagttgcaaactcaatcctttttatcactgagtaacagctgataaagatttctaagaagttaaaaagtcaactgaactaataggtagcacaaaaacctttggttgtgttcagttttaagaaggtacatgtatcaatatttttcaaatttgatgctaattacgtgtgcctggtaggtgtcttattgaacaacacagagaatatttccatcatcatggtaagttctgttggacagtgctgctttgcattattatagcaatgtgggtttttctataatgcacccaggtcatttctaatctaatttgaatccatgcagcttaataatcctttacttttaattgaagcagacatctgtttgatgcttttgaaaatcaaacaagatgttaaatagactataaatcttttactctgtataatatttaattttgcatgatgggatatcttaaagcttggaaattctattacagggaatccctggagatagagaaagtcaggctgtggttgacccccctcaagcagctagtactggggctcctcagtcttcagcagtggctgcagctgcagcaactacgacagcaacaactacaacaacaagttctggaggtaaagcggaatcttctggatggggagggaatggccctgaatttttagtgtaaaataatttaacctgaaatacttcagaaatgacgttcattcccagagcagtcgaataattcgttaagttctctcttcactaatgtttgagaaaggcccaaaagaaactttcccaagtggatgtaaaaggtatccttgctgatattaaacatcagtgttgcagttttgccgaagggcatattctgttttatttgttttaaggaaaagatgctttccagtttgtatttagtgttactttctgatgccattcagaatggtttgctcactttgtctcttactctctccataaatgttacaaagtgtatgtaatttcaaagccagcaggattttagtaattatacagccaaggaaatgaaaccgtgagaggtttaaaaccttgtatctagaggagaaagcaaagcttgaattgaagtctctttactggggtgctgaccataccccacacattgctataggtctgactacagagcaaagcctggaacctgcggtcagcttaggaattacgcagtgttctccttcgttcgttcttctgtatattaataaagtaatttaaactgttgatcttgaaaaggccattcttccatgcatttcctagctctgataatgatagtcacctctggttgacaaaggtcactcagtgctttgtgtacagtctcccaaggacaggccctttgtttgttgtgattcagcatatgggagtggaaagagatgaccacagctctgctttggatttggggtcctgttcctttcagcacttattaggtgacatagtctctaagtctcgttgccttcacctgtaaagctggtattatatatggaagaacaaaaaacccatgtgctgtggtcatttcaattggaatgattgtcttcctgaataggaaattacaacatacatctaaaaattctcttttattcattagtaacctcaaaaacaattcctgtatgtacgatttttggtttcctatagcataaccagacaagtaccagcaccctgaaaaagccagaagttctgtattttatattttatttggcattattaacatttattattgtgaatggattttagactgaagagtttagatatattagtactagattgccatacagcttatttatccgagtttttgtagttcacaaatgtttgaaaattaatggtaataaccggaagtcttccttaatgtaagtttggattaaagtttctcctgatttgcaaaacctgacctcagactttaaatatctttttcttctttggtttcttgaattcctaggaattcaagctcagattgtgttcttttaggggttttcattgtttataaagtaagtgagtttttgtttttgttgtggtgtatatttttcttaggaacttttaagcaacaggaacaacttttagtactttttattttgatagaacacacacaggagacaagtttctagtattattttataacgttgagtgccaagggcaattataggaaagtttggttcatattacagtcagcgttctgcactccctgcctttgctaataggagtaatttttgccctataaaacttgcaagttggtacagttggaagatttcatcattatttacttcattttattacatctgagaactcaaatcattttttctttgatagtgtttgctgtctaaatgtattatttaaccactgtttgtgtatgtatttactgcttttgtttaaaaatgtttatgtgtattttaggacatccccttgaatttttacggaatcagcctcagtttcaacagatgagacaaattattcagcagaatccttccttgcttccagcgttactacagcagataggtcgagagaatcctcaattacttcaggtgactaatcagtgtcagtttcacaagtgatttagagtgtgtcacaatttgaaaaagtccatgaacggtccttcccctcctcaaatacaactctgtatttgagaatgtgaatgttttcttccaagctacacttagatattgtaatctagataggtgtactaaaaaaacagttgggatatggaggttgggttaaattaagttgaccaaatagtagtaagtttgggaaacattttatatttcctttttggagattcccactacacattaatatgttaaagaatttgggaagctgtttaacagagaaactgcctaactttaaatcacttttcacaagcttattactcagttcctttttcttaggaacttttaagcaacaggaacaacttactcttagaaaaaatagctgtggggcttctttagtgatcagatcaccaagtatttgaattttatacagcattttaatgcccactagtgtggaaggtaaaaaatatatgcaagtattaagaataagttctattcttatagtcccacagtagttttttttgtttgttttttgtttgttttgtttttttaagcacaggaggctcagagcacttaagaatttgaatttcttcactgtttactttgcccaaaagtactgaatttctttactattgtataagaaatcacatccttccaaagactgaataatccagaatcactaaattacgtttgcaaaagtgtagccttttctcttagtaatatttagaatttctctgttcctgcagatacttaatatcagtgtattatttttctctgtccttcatatcaccacagcaaattagccaacaccaggagcattttattcagatgttaaatgaaccagttcaagaagctggtggtcaaggaggaggaggtggaggtggcagtggaggaattgcagaagctggaagtggtcatatgaactacattcaagtaacacctcaggaaaaagaagctatagaaagggtgagtttaagtaaaactttaaaaaaattagttcttggctgggctcatgcctgtaattccagcactttgggaggccaaggcaggtggatcacctgaggtcaggagttcaagaccagcctggccaacgtggtgaaaccccatctctactaaaaatacaaaaattagctggcgtggtggcacatacctgtaatctcagctacttgggaggctgaggcaggagaattgcttggacctgggaggtggaggttgctgtgagccgagattgtgccactgcactccagcctgggcaacagagtgagactctgtctcaaaaaaaaaaaaaaaaaaaaaaaaaaaattccttagtcacactagccccatttcaaatgctcagaagtcacatattaataataaggtttttctataatttctttcaatagtgtcctgtagttttcagtgtagaagttgtgtaatacttttgttaaaattatttcgaagtatttttattctttttgatgctgttataaatggatttttctcttaatttcattttcagactgttcattgctaactatataaaaatacaatttaattgtgtatattgatcttttatcataaaaccttcttgaactgttatttattcattaagtagtttgtgcatgtgttcattaggattttccatatacaaggtcatgtcatctgcacatggagacagttttacttcttttccaatatggataccttttatttctttgtcttatttaactgccctatctggagcctccagtatattattagactagcaagaaccaacaacatccttgtctggttcttgatcttaagggaaagcattcagtctttcatcactaagtatgatattatctatgggttttttgtggatgccctttatcagattgaagaaattctcttctgttactagtttgttcatcacgaaaaggtgttggattttgtcaaattttttttctttctttattaagatgatcatgtgatttttgtcctttagtatgctttattacattgattgattttgtatgttgaaccaaccttgcatttctgagataaattttactggttacagcatatgatcttttttatatgttgctggatttagcctgcttgtattttgttgaggatttttgcatctgttcataagtcatattggtctgtagtttttttgtgatgtttttgtctgaatttggtgtctgggtaatactggcctcttagggtgagttgggaattattctctcctgttgtctggaagtatttattaagaattggtgtgggctaacacggtgaaaccccgtctctactaaaaatacaaaaaaaattagccaggcgtgatggtgggcgcctgtagtcccagctactcgggagactgaggcaggagaatggcgtgaacccgggaggcggagcttgcagtgagccgagattgcgccactgcactcccgcctgggccacagagcgagactctgtctcaaaaaaaaaaaaaaaaaagaattggtgtgaattttttgaatagttgatagaattcaccagtagtctggtcctgggctttttttggggggaagttttgtgattattgattcagtctcttgttacttgtctattcaacttttgtatttcttttttttttttttttttttttttgagacagagtctcgctctgttgcccaggctggattgcagtggcgtgatctccgctcattgcaagctccacctcctgggttcacaccattctcctgcctcagcctcccgagtagctgggaccacaggcacccgccaccatgcccggctaattttgttttgtatttttttagtagagacggggtttcaacatgttagccagggatggtctcgatctcatgacttcgtgatccacccgcctcggcctcctaaagtgctgggattacaggcgtgagccactgcacccggccaacttttctatttcttttagagtcagttttggtggtttttgacttggaatttgtctattttatctaagctgtctaatttgttggcgtgcaattgtacatatttccttataatcattttatttcctcttttgataaagtaataatgttcctgcatttattcctgatttcagtcatttgagtcctaagatatttttgttttttcccttcagtttagctaaaggttttaattttgttcattttgtggtggttgttgttaatgacaaaaataactttgggttttgttgattctccctattgtttttctagtcttttgttttgttttgttttaagtctctctaatgtttatttccctcttgcttgcttctagtttgttcttccttttttaggttaggtttagtttagttctttgtttagttttagtttaagattaaattattatctatctttgttagcatagatgtttatagctataatattccttctgcgtttatgctatagtagcatcccataagttttagtatgttgtatttttgctttctttcatctcaaaatgttttttaatttcccatttggtttctaatttaattcattcgttatttaggattgtgttaatttccacaagtttatgaatttcccacattttctcctttcgatttctaaattcattccattataatcagagaatatactttcaatacttttcaacttattgaggttcgttttgtggcctaacatggtatttctgaagaatgttctatgtatactgaagaagaatatagtgtagttcttattaagtggtctataaatatctgatagatctagtttgtagtcaagtcttcttccttagctgttttatctattattgaaggtggagctgtagttgtctctattattgttaattgccaatttctacctttaattctcagtttttattttatgtattttgtggctctgttatatataattgttgtgtcttcctgaaccctttttatcataaaatgccttttgtctatagtaacaatttttatcttaaatctgtttcctctgatatagccattctagctcttttttggttaccatttgcatagtatatacctttttctatcattttactttcaacctacttgtgtctttgaatctaaattgtgtgttttgtagaagcaggcagttggattgtaccctttacttcacctatcctagctttaatctggataaaacccagataacaaactgattttttagtttcttctgctttcatagatgaatagttattcgtgatgaattgggatttttgcccaaattttaagggttatttccaaatataatctgacacagcagtctttaacctttttggcaccagggaccagttacgtagaagacctttttttctaccaacataggtggggtgggcgcagtgattttgggatgaaactgttccacctccgatcatcaggcgttagttaggttaggaagtggggtggggcggtggttttgggatgaaactgtttcatctcacatcatcaggcatttgttaggctatcatacggagcacagaccctagatccctctcatgcacagttcacagtagggttcatgctcatatgagaatctaatgccgccactgatacaacaggagacggagctcaggtggtaattcgagtgatggggagtggctgtaaatacagatgaagcttcacttgttcgcccactgctcacctcctcccgtgcggcccagttccttgctcacccactgctcacctgctcctgggcagcccagttcctaacaggccaatggctggtgccagttcacggtcttggggtttgggacctgtgatctaactcaaggtgattgagacaattgaggagggtgacatttggctgagtttttaaaggcttttaaaaggagtgagtattgtcacaagtgatttttaatataatagactaggaaaatgaaattaagtagctggtattaccatttaaaatgctgtaactgttaagcagataaaaatagaacattatcttcaaaatgtaccatgtattactaataattggtcacctgtttttctagtatggagtgttgaataaagcaaggagattgagagtgatgtttgatccaaatgaaagacatgagttgacattaataaataaaacataatttgcttttaatttagaaataggtgaggtggttaaactatactgcaggtactctcatccttatcttcactcttaatatactaaaagccatttgatttacatatttctgtagagtcatttatttttaaaccatagcagttagcagctaatttttaattaggccaaagagtatttgcatagtatctattaagctttaactagaaacaaagacttttttaggtgattagtaaaggaaagggtctagattccatctaatcccttgggttgggcagtaaatccatattgatagagatgaattcatgtaaaattctcaagagcttttttgggttgcagtatgtttttgagtaatgatttatctttagtgctatgctggaatctataatatgtaaataaaattaaatgtgccataattggtgtgttggatttatatttttttcctttttcttccagttaaaggcattaggatttcctgaaggacttgtgatacaagcgtattttgcttgtgagaagaatgagaatttggctgccaattttcttctacagcagaactttgatgaagattgaaagggacttttttatatctcacacttcacaccagtgcattacactaacttgttcactggattgtctgggatgacttgggctcatatccacaatacttggtataaggtagtagattgttgggggtggggagggagggatctaggatacagggcagggataaatacagtgcatgtctgcttcaattagcagatgccgcaactccacacagtgtgtaaaatatatacaaccaaaaatcagcttttgcaggtctttatttcttctgtaaaacagtaggtaacttttcctaggtttcactctttttagtgtactagatccagaaacttagtgtaatgccctgctttatatttctttgacttaacattggtttcagaaagaatcttagctacctagaatttacagtctctgtttcatggcaacactggataatggctttgtgaaatttaaaaaatttttgtagcgactgtaaacagaaatgccaaattgatggttaattgttgctgcttcaaaaataagtataaaattaatatgtaaggaagcccattctttcatgttaaatacttggggtgggaggggagaaagggaaccttttcttaaaatgaaaataattactgctattttaaaatttcttgatcattgaatgtgagacccttctaacatgatttgagaagctgtacaagtataggcagagttattttcctgtttacattttttttttgttttggggaaaaaattggtaggtgtctaattactgtttacttcattgttatattgcagtaaaagttttaaaacaaccattgcatgtttgcttttgatgtatccctttgtgaaattagcacttttggggccaatggagaaatgcagcattcactctccctgtcttttccccttccctcagcagaaacgtgtttatcagcaagtcgtgagtcaaactgctgccttttaaaaaacccacaaaatgctgattcagttcaaaattaatgcaaatgtttcaaaactgggtttctgatatttgtaaatgtgtttctttattagataagagtgtattaccattaaagtcattagtataatattgctttcaaaaagaaatggtagacaaaactataatccagcatcttttattgcattggaaagactggcaaagtcttttggatgggttgggagatgtggctggaaagtactttggaaaatatacaatcaagatatctcatggcatattaaaagaaaaatcttaatagcagtgttggcttttatttggattttttcatctcagttttttctgtggaatctccttcattggcattgttatttaatcataaacggggcagatgtctacttgttcagtttttcaaatctgttttcctgagtataaataagagtatttaaagaaataatttggattgcttttgttttttgtttcctttttttttaaccatctgatactaagaagatgaatttgcacagatttctctgcataatttctcaatatctttagcacagtatggtgatgatgacttttaagcatttacatcacgtactcataacctattatgaaaataaatgaaactggctgggtatggtggctcatgcctataatcccagcactttgggaggccgaggtgggcagatcacttgaggccaggagattgagaccagcctgaccgtcatggcgaaaccccgtctatactaaaaatacaaaaaatagccaggcatggtggcgcacgcctgtggtcccagctacttgggaggctgaggcatgagaattgcttgaacccgggaagtgaaggttgccgtgagctgagatcacaccactgccataaacatgacaggcttttggactttgtattacctgtatgttttataatggatcatgcataatttctcaggagaataaaatgagaattcatatatacgttcatctttcaagtcagagcaatgagttgg

SEQ ID NO: 24904 - DNA, 6004 bp, Homo Sapiens
attctttggaatactactgctagaagtctgacttaagacccagcttatgggccacatggcacccagctgcttctgcagagaaggcaggccactgatgggtacagcaaagtgtggtgctgctggccaagccaaagacccgtgtaggatgactgggcctctgccccttgtgggtgttgccactgtgcttgagtgcctggtgaagaatgtgatgggatcactagcatgtctgcggagagcggccctgggacgagattgagaaatctgccagtaatgggggatggactagaaacttcccaaatgtctacaacacaggcccaggcccaaccccagccagccaacgcagccagcaccaaccccccgcccccagagacctccaaccctaacaagcccaagaggcagaccaaccaactgcaatacctgctcagagtggtgctcaagacactatggaaacaccagtttgcatggcctttccagcagcctgtggatgccgtcaagctgaacctccctgattactataagatcattaaaacgcctatggatatgggaacaataaagaagcgcttggaaaacaactattactggaatgctcaggaatgtatccaggacttcaacactatgtttacaaattgttacatctacaacaagcctggagatgacatagtcttaatggcagaagctctggaaaagctcttcttgcaaaaaataaatgagctacccacagaagaaaccgagatcatgatagtccaggcaaaaggaagaggacgtgggaggaaagaaacagggacagcaaaacctggcgtttccacggtaccaaacacaactcaagcatcgactcctccgcagacccagacccctcagccgaatcctcctcctgtgcaggccacgcctcaccccttccctgccgtcaccccggacctcatcgtccagacccctgtcatgacagtggtgcctccccagccactgcagacgcccccgccagtgcccccccagccacaacccccacccgctccagctccccagcccgtacagagccacccacccatcatcgcggccaccccacagcctgtgaagacaaagaagggagtgaagaggaaagcagacaccaccacccccaccaccattgaccccattcacgagccaccctcgctgcccccggagcccaagaccaccaagctgggccagcggcgggagagcagccggcctgtgaaacctccaaagaaggacgtgcccgactctcagcagcacccagcaccagagaagagcagcaaggtctcggagcagctcaagtgctgcagcggcatcctcaaggagatgtttgccaagaagcacgccgcctacgcctggcccttctacaagcctgtggacgtggaggcactgggcctacacgactactgtgacatcatcaagcaccccatggacatgagcacaatcaagtctaaactggaggcccgtgagtaccgtgatgctcaggagtttggtgctgacgtccgattgatgttctccaactgctataagtacaaccctcctgaccatgaggtggtggccatggcccgcaagctccaggatgtgttcgaaatgcgctttgccaagatgccggacgagcctgaggagccagtggtggccgtgtcctccccggcagtgccccctcccaccaaggttgtggccccgccctcatccagcgacagcagcagcgatagctcctcggacagtgacagttcgactgatgactctgaggaggagcgagcccagcggctggctgagctccaggagcagctcaaagccgtgcacgagcagcttgcagccctctctcagccccagcagaacaaaccaaagaaaaaggagaaagacaagaaggaaaagaaaaaagaaaagcacaaaagaaaagaggaagtggaagagaataaaaaaagcaaagccaaggaacctcctcctaaaaagacgaagaaaaataatagcagcaacagcaatgtgagcaagaaggagccagcgcccatgaagagcaagccccctcccacgtatgagtcggaggaagaggacaagtgcaagcctatgtcctatgaggagaagcggcagctcagcttggacatcaacaagctccccggcgagaagctgggccgcgtggtgcacatcatccagtcacgggagccctccctgaagaattccaaccccgacgagattgaaatcgactttgagaccctgaagccgtccacactgcgtgagctggagcgctatgtcacctcctgtttgcggaagaaaaggaaacctcaagctgagaaagttgatgtgattgccggctcctccaagatgaagggcttctcgtcctcagagtcggagagctccagtgagtccagctcctctgacagcgaagactccgaaacagcatctgcattgccgggaccggatatgagcatgaaacctagtgccgccctgtctccatcccctgcacttccctttctcccaccaacttctgacccaccagaccacccacccagggagccacctccacagcccatcatgccttcagtattctctccagacaaccctctgatgctctctgctttccccagctcactgttggtgacaggggacgggggcccttgcctcagtggggctggggctggcaaggtcattgtcaaagtcaagacagaaggggggtcagctgagccctctcaaactcagaactttatccttactcagactgccctcaattcgactgccccgggcactccctgtggaggccttgagggtcctgcacctccatttgtgacagcatctaatgtgaagaccattctgccctctaaggctgttggtgtcagccaggagggtcctccaggccttccgcctcagcctccaccaccagttgctcaactggtccccattgtgcccctggaaaaagcttggccagggccacatgggacaaccggggaaggaggtcctgtggccactctatccaagccttccctaggtgaccgctccaaaatttccaaggacgtttatgagaacttccgtcagtggcagcgttacaaagccttggcccggaggcacctatcccagagtcctgacacagaagctctttcctgttttcttatcccagtgcttcgttccctggcccggctgaagcccactatgaccctggaggagggactgccattggctgtgcaggagtgggagcacaccagcaactttgaccggatgatcttttatgagatggcagaaaggttcatggagtttgaggctgaggagatgcagattcagaacacacagctgatgaatgggtctcagggcctgtctcctgcaacccctttgaaacttgatcctctagggcccctggcctctgaggtttgccagcagccagtgtacattccgaagaaggcagcctccaagacacgggccccccgccggcgtcagcgtaaagcccagagacctcctgctcctgaggcacccaaggagatcccaccagaagctgtgaaggagtatgttgacatcatggaatggctggtggggactcacttggccactggggagtcagatggaaaacaagaggaagaagggcagcagcaggaggaggaagggatgtatccagatccaggtctcctgagctacatcaatgagctgtgttctcagaaggtctttgtctccaaggtggaggctgtcattcaccctcaatttctggcagatctgctgtccccagaaaaacagagagatcccttggccttaattgaggagctagagcaagaagaaggactcactcttgcccagctggtccagaagcgactcatggccttggaagaggaggaagatgcagaggcgcctccaagtttcagtggcgctcagttggactcaagtccttctggttctgttgaggatgaagatggggatgggcggcttcggccctcacctgggcttcagggggctgggggcgccgcttgccttggaaaggtttcttcttcaggaaaacgggcaagagaagtgcatggtgggcaggagcaagccctagatagccccagagggatgcacagggatgggaacactctgccatcccccagcagctgggacctgcagccagaacttgcagctccacagggaactccgggacccttgggtgtggagaggagagggtctgggaaggttataaaccaggtatctctacatcaggatggccatctaggaggcgctgggcctcctgggcactgcctggtggctgataggacttcagaggctctgcccctttgttggcagggaggcttccagcctgagagcactcccagtttggatgctggacttgcagagctggctcctctgcaaggacaagggttagaaaagcaagtcctgggattgcagaaaggacaacaaacagggggtcgtggagtgcttcctcaagggaaggagcctttagcagtgccctgggaaggctcttcaggagccatgtggggagatgacagaggtacccccatggctcagagttatgatcagaatccttcccctagagcagctggggagagggacgatgtctgtctcagcccaggagtttggctgagcagtgagatggatgctgtaggcttggagctgcctgtacaaatagaggaggtcatagagagcttccaagttgagaagtgtgtaactgagtatcaggaaggctgccagggactgggctccaggggcaacatttccctgggtcctggagaaaccctagtacctggggatacggagagcagtgtgattccctgtggaggcacagttgcggcagctgccctagaaaagagaaactattgcagcttgccaggacctttgagggccaacagcccacccttgaggtccaaagaaaatcaagaacagagctgtgaaaccgtagggcatcccagtgatctgtgggcagaaggttgcttcccattgctagaaagtggtgattccacactggggtcttccaaagaaacccttccacccacatgccaaggcaatctccttatcatggggactgaggatgcctcctccttgcctgaagccagtcaagaggcagggagcagaggcaattccttttctcctctgttggaaaccatagaacctgtcaacatactagatgttaaagatgactgtggcctccaactaagggtcagcgaggacacctgcccactgaatgttcattcttatgacccccaaggagaaggcagggtggatcctgatctgtccaagcctaaaaaccttgctcctttacaagagagtcaggagtcttacacaactgggactcccaaagcaacatcttctcaccagggccttggaagcactttgcctagaaggggaaccaggaatgccatagttccgagagaaacttctgttagtaaaacacacaggtcagcagacagggccaaaggaaaggagaaaaagaaaaaggaagcagaggaagaggatgaggaactctccaactttgcttacctcttggcctctaaacttagcctctcaccaagggagcatcccctcagtcctcaccatgcctcaggaggtcagggcagccagagagcatcccacctgctccctgctggagcaaaaggccccagcaaacttccatatcctgttgccaagtctgggaagcgagctctagctggaggtccagcccctactgaaaagacaccccactcaggagctcaacttggggtccccagggagaaacccctagctctgggagtagttcgaccctcacagcctcgtaaaaggcggtgtgacagttttgtcacgggcagaaggaagaaacgacgtcgtagccagtagggagcagcgggaccatctgaccccacttgccagtccctaaaggtgggtgccccagagtagattccacccctgctgcccaccaatggagaatcccaatgttgaatctcatcccaatgttgttttgttgttctgcaaaagtggcaagcatggagagagaggtcagactggctaggctgcagggggaattacctttggaaggagctatatagaaaaaaaatgaataaagtgttttgttggaaaa

SEQ ID NO: 24905 - DNA, 13251 bp, Homo Sapiens
gaggttgcagtgagctgagatcacgccattgcactccagcctgggcaacaagagcaaaactctgtctcaaaaaaaaaaaaaagtaggatgtaactccagtaacatttgaagagtgccaaggagtcctctctttaaagggatcctacagtatatcagttttttgaagcaaagaagcctttagcaatgccacaatcgcctctgatttatttgattaatttttgtaatacttggttttcttaaagcatggcacacttaaaccagttatttattggaatagtttttgttttcaaagtcactaccaattgaatgtgcagccttcactggtgtcattaccccatgcttccgtctcattttgcaagatagtgttagaactaaagtgggggtgaccccaaggcgccttgagccttggctccatgttagggatcccatagaggtactaccacctgatcctctccacagcctcgtgaggtgcacctcacagcatttgctgttcagaggagggaactgaggtctgagaaggaaattcacttgctgaagttaacttgctgcctccagtgagaggcaggattgatatttgagcccacgtctgtctgactccaatgctaatgatttttacatcccggctgaaggatgatattgccaagcccttaaagaagaaggcatatttggacacctcattagcaatttgggcgctaaatcataccctgttggccaggaagaattaaagttgctgcccagggctcccacctcaggtccagggagtagcctcaatactgagggaatctgaattaaggagcttggaagttccccccacctagctgtagtgggcagtttcagagtgggctgatccaggagtcctgaccaggtcagtagggtgatgtctagactccagtaccactgagaatgttgctatgttggctttctctgccacacagaaaagtcttttctttccttttcttttctttctttctttcttttttttttttttttttgagacggaccctccctctgttgaccaggctggagtgcagtggcacaatctcggctcaccacaacctccgcctcctgggttcaagtgattctcctgccttagcctcccgagtagctgggactatgggtgcgcactaccatgcctggctaatttttgtatttttagtagagacaaagtttcactacgttggcaaggctggtctcaaactcctgacctcgtgatctgcccacctcggcctcccaaagtgctgggattataggcgtgagccaccacgcctggcctaagactgtctttccaaatgacttcaaattccttcaaatgggtaacttcatttaaccaggtgggggcacctcccaaaacacaagttacccagctttcaagttgtggctctcatataaggaagtaactttctttgagagtatttacttgtgaaattataaaagtagtaaatttctggaaaatgtctaacatgtattgctagcgtaggccgcagggcattgagaaacgtataccgctgcactgctggcccagctaaccaagggtctccttcacttctttgtcattaatagcctgagtaactaactccactttagttccctcaactgtgaaatggcaagtgatgctagattatctctaatgatctttgctaaaattttatgatccagatatccttatctgattctttctcagaatcactttaacagtttaataaaaacggcctgacatcaagagtttttttttttttaaagaaaagatactcaagcattgattataaatttcaacttgacccttaagtttttgcaaatctttcctactcttcctttaggatccagcccaccatcccatccagaaccacagtgccctttggaagacagagctatgccaaaagacagcaggagcaggcagggacacaaggaggcagggactggagtgtgctgagccagtgagaatcagtgtttgacagacctgggtcctgtacccaaaaaaacttccagagttccccattaaggagcactctcatccctgttttgttaccaagagctaagaaagcacttcatcctggaactcattgttttctgcccattttcccctatgtaatcctcttggattttgcagacgttttaggcctgttgtctctggacacgacaaccaccttcagagctggcaccgagttctgccttgtgagtggtttgccccatcagccactgcatcccttcttccaactaaacctgagcgttctcctctttaggaagaaatgataccaatcggcatttgggtcccaaaattctcatctctcacctcctcttcacagtccctttccccttagggcagtctgtgggcatctctctaaaatccatttcccaatctagatgtagcgctcagagtcctgttgaatttatttggacatcaaaagagccacaatacttgtgcttttttatagttttctttcaaagaacatttcagtccatgagacagaaaaaaaatggctttgctgtatccaacttgtcacaggcttgtatttggcattgttctgagaaagacctcaaccactcgtgaaacccagacgtcatttcccgtcgtgttctttcatgttaaatgcttctagctgctcgctggtgcttggtcactctataactaaatattgctttagcactggctacacaaagagcttcctgaaagcagcaggggggacatgctaggggcttaacaataggggcactgtttccattgagcgggtttgctgcccaacgctgtgtcaaatgaaagtgacccaggagcaccactgctccacttctgagcttccacttgtgactttttcctcactggggaaagaagctggctgtgatttagatgtggctagcaaaaggtttagttctggcataaaatcaggcatcagaacgactttgaaagaaagtaattcaccttcaaaaatacatggggaaaaaacttcatgagcaccagagaagcatttggaagagttaaccttggacatggcttacgagggtgtatttttaaggccagactcagttttcattatattgttgctatgcaagtaaataaatgagctcactgctacacccaagctgggcagaatgaatttacagagaattaataaatccagggtaggcaacatgtggcttttcttctggtcatagagaagcaactagtactcttggattttaagcaggcaaacctctgtagctttacagtttctgaaaattggatcccagttctaatgggcaggcagtgataatggtaatgtttcttttcctaaggttttctttaaagggaagggatcaaatagttcatttaagacaaagaggttattataaagtctaataaatactgtggtagctctgttaatgcttttcaagggcatttaagtgaaagaagccctttccaacaggcagttttggaaagctaaacactcttgttaattcatgaaacgcaaagagagataatataaataaatcaggggctggggaggaattagagatagacaggaagcagtcaaattttacttcccacatatgccaagaaaagtgcaaatacatggctgttacttagtaaaacctacttttaaattcagagaatcgtaggtactatgaatggtgaggttataaatctgtaatcattacagcacggggacactttttaacttctcatcaattacccattgttatttcctgagcacatcctgggttacctagctcctgactaggcattagggaaggacacaagaagctgactccacacattagtactctactaaattcatgggtaaactccactggtcaataatcaagtcactatctctatattggaggcaaaggattgcacaattcaggctatttgtaatgttgctttggattgtagagacttagactcagaggaatcacgggacatagaatctagaacaggtctgtgtcccatcattctcttaaaagaaaacctttcaagtaatatttcttattatcttttaaaatcttgttaaaatgacaaaatatatatatatttgtaatttttaaaattttgatgcatacaaagatagacatagatagatagataatgtagaagtataaataataataagtcactagagcatgactaactagtgaagttacccagtctcctctccatcccatctctctgtctcccatccactctacccaactcttcctttcaaagagtaggatttttctgcttcgtttttttactgctttgttcttacttagggttgctggaagcacatggaaggagggaagtagtcaaaacaagacagtgttgtgaggggagagatgagaagtcatgataagtaggtgggtgggtgacccacagggctggcatcagaaggaaacatagcaaaacatgatggatatgaggcttgctgtggggagggggattggcctttgtgagtggcagccgtctgctcccttcccgcttcccttagtgctccattgagctagcagcatgcagctgagaagttgaagttctgaccacatggcctctgctgccgctgctctgccccatcccaggcacctagccagctctgcattaaggaggtgaagtggatgcccaaggaaagaagtgcccccaaggagacttgctgagaccttgaacaagtgacacaatgtgagcagaacttgtcttgacagaaaatgctttgtctctaggtgttccagagagatgggcaagtgtcctatttcttagtgagagcctctaaacaaaccagcttgtgaacctccactgaaaagatctcatctgatgagcattttaataaagtgtcctgagtttggaggcttgccgtctttctcttggataaatatcttcatctcctagacttggaaaaacacattttctcctggggtttcccattggcgtgtcttgagctgctctggtgataaccgtaataatgccaatactgatacgaacagcagaaaacagtaaccccaagaactctacagatgatcatcaaggaccactgtctcttaccatttgctgctttggtttgaaattctcactgcctcgtagatctcattttgagcactatacattcctaaagattgatttctttctatctgacttaaatttaggaatgattaaatcttcatttctcccatgatttgatcctaaaacattttgaaaggaaacagccttgagatctgtgattactaagacatacataacattcttatcacattagaaagcaagaattgactgttgcttgtcttgttcctgttgtcttgtcccctgaattcctgtttatctttgattgtatgtgggacattgtattttcagtacatttgtagaaataatgtgaagcctataaagatgttctctgcctccagagagaattttgtttccttctgccagcctcataggcaagcatacatctgattccatgctttgagctgttctggcaaccctgatgtcttcagcctgtgcaagggtgggtttacttccagttaatccttattttggatacagtccttagggttccaacccaaagtcgggggtggtttggggtccctgccttggtgagccctatagtccaatgttcccccttacccaaagaagctgtagaaaacccagcacagcctcccaggcaccagtttcagatcagcaaaaaatagcaaatgcccccaggcttgaaaagcaatctcacctctattaactcttctcccaaagtttgacctagtaattctttattatccttgaactcttgacactattaagaagatcttttcggctgggcgcagtggctcacgcctgtaatcccagcactttcggaggccgaggcgggcggatcacgaggtcaggagatcgagatcgtcctggctaacacggtaaaaccccgtctctactaaaaatacaaaaaattagctgggcacggtggcgggcgcagtgggcgggtgcctgtagtcccagctactcggaaggctgaggcaggagaatggcgtgaactcaggaggcggagcttgcggtgagccgagatctcaccactgcactccagcctgggcgacagagtaagactctgtctcaaaaaaaaaaaaaaaaaaaaaaaaaaaaaaaaaaaaaaaaagatctttcctagcttttcttcatttttttaagttgtcttcagcaagatggttaatctcaattacctagtccatgatttctggaagtcaaagtcaaaaggtaaaatctatatagcctaggtgacaattacaataacaataacaatagctaaggcttattatggctttatgccaggtactttatgcacttgatctcatttaatactcatatagcctatgagggaagtataatttccattttacctatgagaaaacaggcttagaatggaacctttgttctcatagcttgtgagtggtagaaccgggatttagatccagctctgcctgagtccagcttctgtttgtcaattacttccctcttcagacctaattcttccaataagcaacagaaaaagacccagtggggccatggcctctggcacacagcttctcataaacgagcctatcacacatccccagaactaaagcaatcgtatgttccttctgatgttgaggtaaaaagcagggtttgttttggtttcccttttccaaaacactcccccacatgtttctggcttgtggttaagaagaacccaggtgttcatgtcacatacgagctcaactggggaaaaggaaaccatccagcagccctccttgcctgccaatagtggcttcacccaacttggggtgcattcttctacagtttctgatttctcaacttcacctaacattcccttgccttcttggatccctctcttgcccaacactaccatgcatggctgatagggcactgttctgccccatatcccatgggttctacttaacccagagctggcttacctggaaaccaagcttattctgtagtggcagacctcacgccatcttgcttaatagccttcagttttcctttagttgattaatgtatcactcaatagattatgcaagacctactctgctaggcactgtactaggccctgtggtttatatttaaatgaagagggaatgatctctgactttaaaatgctggaagaagagatgagatgcatcaagaccgtcaaaccacaagtgataagtgctgtcagagatgtgtggatcactggctcagggagttccaaggatagagacatattatctgtttgggaagggcttggtgggggaaaggcattcagccgggccttgaaaatcaattaaagtttgaatatgaggaaagaaagaagagcatctcagacaaggacatggcatggatgaaggcacagaggtatgggcgtgcagggcatctgtggaaatggacagctcagttctcgccgagggagggagttggtgcagagcctgggggccctgccttcagaagatttccaagaggaaggagggcaaaaatacacagatgaaggcaaagactggcagcccggaggccaaagacgcgtttagtttggccaagacactgtttttaaaatttaagtcaattttgaaaaccaggtttcacataaaattccaaatttctggcttctgaaaacgtgaaagatctggcaacacagggcgcaatgtcttccctctttcggtagaaggagttctgtctccccggcaccaaagcctggcttgtttcttccctacaccctgcttgctcggtccgtgagcatctgagtataggacccttgctctgctatgggtaccagctcagggaacacagatgcagaaacatcagaaagagtcccaagggcctctcatccaacttgctgactgtcatcatgctggttctcagacctccctatctctctctgctatccaaacacagaccctcctctttaaaatttcagcatacatggctttcaaaattatgaggcatgaaagtgtcaaaagcatctccagaaactcatgccgccaggatctgagactcaaaacagtgtggatcaaacaccatcaaagtgtggggtggggcaattcgagtttgtttccttgtttttatgtaagcagattaattagagaactaacataacgccagtctttgggcttttgatcctatcctgccaggacccagacttggagatgtattaaatggattcttccttttctaaatggaagaatctgcccttctcggcttcatagctcttctcaaagtctctgtcttggaccctcccgttagttactgagaatggtatactaacatctgagaaaggttggattcctcctagggacagaaaatccacatatggaaagtgcaaatcctgtgccgggtaatcacgaaagcagttgcagtagcattggatcatagagccccaggagacctcacaattcagcccccttcctggcaacactaatgaattaagaggtcagtttggtaattccaaaggctaagcctttgtaactataaataaatgcacagaatgaaaggaatgtagaaaaaaaaaaaagcaaacagagggggaaaggaaatgaaaaacctgacttgatttcattgagaaaattagtttaaaaatgtcctttgtgtagcaattcctttaatgcctcaccgaacaaatgcctaggagaattcttccaaacttgaggtccccttaaccagaccttggtgtgcgtcttcagctgaaattcagcagttctgggaggtggaatgaggagagatcgttggaaggtttttgtgtacttatgtcacgcagcaagaaaaagccttaatgaaccacaaaactggagactttgtaaggtacagctcagtcagcacttttcctccgaggagaggacacacaattggcatgaaagtgacccaagcaacaggtcgaggcagagaatgtccaaaagtagaagacttcgagctccctgatcttccacacgtcacaatgcggattgctgcactggacttggcatttaaatgggaccagcattttgcatcctggtcccatttaaatgccatttgtggaccaacgtgaattagatggtaatgtcaggaaggctggaatcggtggtggcgggcggggggtgctgtattcggttggcgtttcccccctgtggttttcaccatctgtttctttgaatgcataaacaaggaaaatgactggtttggaatgcagagttttaaaaaaccagaagaccacaggcatcctctaaatgagaaagagagagcaagttggggttctgtgacatttgtcaggaagtgaaatgttaaataccgggaagcattagcgctttctgccagggaagatccacaaaggcaaggaaacactttagcggtgaacctgccttccttttctgaggtcgtgctatgtgtttatatgtcacctagtgctattttcagacaccaacgccacccactctagctcccaatccccttctgggttttttgtttgtttgtttgttttgttttgttttgagacagagtctctctctgtcacccaggctggagtgcagtggaacgatcttggctcactgcaagctcctcctcccaggttcacgccattctcctgcctcagcctcccaagtagctgggactacaggcgcccaccaccacacctggctaattttgtgtatttttagtagagatggggtttcactgtgttagccaggatggtctcgatctcctgacctcgtgatccgcgatccttgccctcccaaagcgctgggattacaagcgtgagccaccacgcccagcctgtttgtttgattgtttgtttgttttttgagacggagtttcactctttttgcctaggctggagtgcagtggcaagatctcagcccactgcaacctccgcctctcgaattcaagtgattctcctgcctcagcctcccgagtagctgggattacaggcacatgtcaccacacccggctaattttatatttttagtaaagacggagtttcaccatgttggccaggctggtctccaactcctgaccttaggtgattctcccgccttggcctcccaaagtgctgggattacaggcatgagccactgcgcccgacatgcccgcttctgttttttaaacgaaagatgaacagttaagctggacttagccttggttttccattagcattattgctaagttggcaaccttggataaaatccactcttggaaacttttaagctgaacaaaagctgcactatgagcaggtgctatgataaagccaagacagcgctctaagtagaggggctgatgaaatagactaaggggagatcttcatttctctcctggacaatagcgagtaaaaaaaaaaaaacaatcatataagggcattaggaacacattgtgtttttctttagcaaagggcatcctgctttgaaaaggaaggtttgctatgcacaatacagtggccattctataaagtggttccgtatgctccatgccaacagacctcaaagcaataggttccttttttaaacccaagacagtggagagacttgatggaaattttgagtgcatactaatctcttttacttcgttgcaagaaacaatcagttgtaagcactagggattaaaagccaaattgaactcaggcattttgagagcgcctggggagaaggcattggtgcatttggctgagttccacccatttcagcataagatggacgtggagcatttttcacatagttctgtaggcagcctgacgccagagttttcacttcagagaaaggataaaagttgacggtttcttagggaacaaccaactcttcctcatttgcaatgtctgttctcctcaaagatgtcgtgggcaacgcttgagatgggcactcaatgactcaaagggtgggggttaggcagaaacaagaccctgggcatttagaagcccttggacgattacatatatttcaaaatgagttaagttcaaataattttttgctggtgcttagcacaccaatgaagtatgtagatatgaaaacaggaggctgctaggtaagattcattttattggcactggttccagatgccagcatcgtgatgaacgctatttgacttctgatatcccttgacgtaggtactgttggggatgttttctttcctggtggaaatgggaaaatgattagagaccagaggtcaggagacctgaattctgttcctggtgcctccctgactcagtattttgtttgtttgatacgttagaatgaaagctcccagaggtttctaaggacagcacagtttgagcattggctttgtaaaagtactctggtgacctgtggaattacagttataatcatcataataatgtccaatgaagaggcatactgaggaaggcatgagaggaattttaagtggctaaactctatttgcattattcattttacaaattgtttcagagccttaaagcaaatttcagtatgcggtactttagatgcaaaatgctcctctaggactttcataagttacacacaagtatcccttaaagtatatttcagaaatatgcttgcagtgcatcaactctatctgatgaactttgagatgatcacaattaagggtgatagagatattttagggattttttttctcattgggattcaagagggatttaaaagtttactaacctgggccagatgcagtggctcacacctgtaatccctgcacttttgggggctgaggtgggtggatcacctgaggtcaggagtttgagaccagccaacatgatgaaaccctgtctctactaaaaatacaaaaaattagctgggcatggtggcgtgcacctgtaatctcaactactcaggaggctgaggcaggaaaatcacttgaacccgggaggcagaggttgctgtaagctgagattgtgccactgtactccagcctggggagcaagagcaaaactccatttcaaaaaaaaaaaaaaaagtttactaacgtggtgtctacttgtctccttcctgttatgtcttctttctttggtttctttctatctttttatgagggagagttgagggatgagtgcttagttaggaggcaaggagattcaaggactcaggcttggaaatttacacctctgtgccttctctcccacaggtgataacccccgtgaggacaggccatggctacgtatacgagtacccatccagataccaaaaggacgtctatgatatccctccttctcataccactcaaggggtgcgtaccagaacatggtcacaagaggagaagcgcttctaagggtagcattccttcagggctgtagagaaaagggagttcacaaattatgcattaatatatgtcatatgaagctttgtttaggttgtctacccagtagccactttagccaatgctatttaaattatgttttctggatttgctttatcaggaaatcctagtatttcacccaagagagcttatgttcttctacaattttgcttcagaaagtagatttttcttttttcttttttttttttttaagacagaatctcactttgttgcccaggctggagtgcagtggctctatctcagctcactgcaacctccacctcccaggctcaagcaactctcctgcccctgcctcagcttcccaagtagctgggactacaggcacacacaccaccatacctgactaatttttgtattttgtagggacaggcttttgccatggtggccaggctggttttgaactcctaactgcaagtggtctgcccacctcggccttccaaagtgctgggattacaggtgtgagccacggcccccagctggaaagtagaaaatttaaactacactttaaagtacagacagcgtagatatttcacataagatctttttttttttttttttttttttttttgagacagagtcttgttctgtcaccaggctgggagtgcagtggcacgatctcagctcactgcaacctctgcctcccgggttcaggcgattctcctgtctcagcctcccaagtagctgggactacaggtgtgcaccaccacacccagctaatttttgtatttttagtagagatggggttttaccatgttggccaggatggtctcgatttcttgaccttgtgatctgcccacctcagcctcccaaagtgctgggattacaggcgtgagccaccgtgcctggccaaaatcatttttatattaaatgtaagttaaaaaccataaaatgtattaaaaaaaaaggcaataaatctgttataacatggagcactgccaaagatcaagcttgtacataacctggtaaataaatccataattaagtgcttaggagcataaaaaatgaccaagtataagacatttccattctgggtaactcac

SEQ ID NO: 24906 - DNA, 5282 bp, Homo Sapiens
gcaggtggggccgccgcggaactccaggtccggccgggagcagaggggcgggggcgagagggaagtgggcgggagccgcgatctgagtagccagcgtcgccggcgaccgcggagttctgggctagtgggaccccgcgcgggctggttcgggatgagcgatggcatcggtcaaggtggccgtgagggtccggcccatgaatcgcagggaaaaggacttggaggccaagttcattattcagatggagaaaagcaaaacgacaatcacaaacttaaagataccagaaggaggcactggggactcaggaagagaacggaccaagaccttcacctatgacttttctttttattctgctgatacaaaaagcccagattacgtttcacaagaaatggttttcaaaaccctcggcacagatgtcgtgaagtctgcatttgaaggttataatgcttgtgtctttgcatatgggcaaactggatctggaaagtcatacactatgatgggaaattcaggagattctggcttaatacctcggatctgtgaaggactcttcagtcggataaatgaaaccaccagatgggatgaagcttcttttcgaactgaagtcagctacttagaaatttataacgaacgtgtgagagatctacttcggcggaagtcatctaaaaccttcaatttgagagtccgtgagcatcccaaagaaggcccttatgttgaggatttatccaaacatttagtacagaattatggtgacgtagaagaacttatggatgcgggcaatatcaaccggaccaccgcagcgactgggatgaacgacgtcagtagcaggtctcatgccatcttcaccatcaagttcactcaggctaaatttgattctgaaatgccatgtgaaaccgtcagtaagatccacttggttgatcttgccggaagtgagcgtgcagatgccaccggagccaccggggttaggctaaaggaagggggaaatattaacaagtcccttgtgactctggggaacgtcatttctgccttagctgatttatctcaggatgctgcaaatactcttgcaaagaagaagcaagttttcgtgccttacagggattctgtgttgacttggttgttaaaagatagccttggaggaaactctaaaactatcatgattgccaccatttcacctgctgatgtcaattatggagaaaccctaagtactcttcgctatgcaaatagagccaaaaacatcatcaacaagcctaccattaatgaggatgccaacgtcaaacttatccgtgagctgcgagctgaaatagccagactgaaaacgctgcttgctcaagggaatcagattgccctcttagactcccccacagctttaagtatggaggaaaaacttcagcagaatgaagcaagagttcaagaattgaccaaggaatggacaaataagtggaatgaaacccaaaatattttgaaagaacaaactctagccctcaggaaagaagggattggagttgttttggattctgaactgcctcatttgattggcatcgatgatgaccttttgagtactggaatcatcttatatcatttaaaggaaggtcagacatacgttggtagagacgatgcttccacggagcaagatattgttcttcatggccttgacttggagagtgagcattgcatctttgaaaatatcggggggacagtgactctgatacccctgagtgggtcccagtgctctgtgaatggtgttcagatcgtggaggccacacatctaaatcaaggtgctgtgattctcttgggaagaaccaatatgtttcgctttaaccatccaaaggaagccgccaagctcagggagaagaggaagagtggccttctgtcctccttcagcttgtccatgaccgacctctcgaagtcccgtgagaacctgtctgcagtcatgttgtataaccccggacttgaatttgagaggcaacagcgtgaagaacttgaaaaattagaaagtaaaaggaaactcatagaagaaatggaggaaaagcagaaatcagacaaggctgaactggagcggatgcagcaggaggtggagacccagcgcaaggagacagaaatcgtgcagctccagattcgcaagcaggaggagagcctcaaacgccgcagcttccacatcgagaacaagctaaaggatttacttgcggagaaggaaaaatttgaagaggagaggctgagggaacagcaggaaatcgagctgcagaagaagagacaagaagaagagacctttctccgcgtccaagaagaactccaacgactcaaagaactcaacaacaacgagaaggctgagaagtttcagatatttcaagaactggaccagctccaaaaggaaaaagatgaacagtatgccaagcttgaactggaaaaaaagagactagaggagcaggagaaggagcaggtcatgctcgtggcccatctggaagagcagctccgagagaagcaggagatgatccagctcctgcggcgtggggaggtacagtgggtggaagaggagaagagggacctggaaggcattcgggaatccctcctgcgggtgaaggaggctcgtgccggaggggatgaagatggcgaggagttagaaaaggctcaactgcgtttcttcgaattcaagagaaggcagcttgtcaagctagtgaacttggagaaggacctggttcagcagaaagacatcctgaaaaaagaagtccaagaagaacaggagatcctagagtgtttaaaatgtgaacatgacaaagaatctagattgttggaaaaacatgatgagagtgtcacagatgtcacggaagtgcctcaagatttcgagaaaataaagccagtggagtacaggctgcaatataaagaacgccagctacagtacctcctgcagaatcacttgccaactctgttggaagaaaagcagagagcatttgaaattcttgacagaggccctctcagcttagacaacactctttatcaagtagaaaaggaaatggaagaaaaagaagaacagcttgcacagtaccaggccaatgcaaaccagctgcaaaagctccaagccacctttgaattcactgccaacattgcacgtcaggaggaaaaagtgaggaaaaaggaaaaggagattttggagtccagagagaagcagcagagagaggcgctggagcgggccctggccaggctggagaggagacattctgcgctgcagaggcactccaccctgggcatggagattgaagagcagaggcagaaacttgccagtctgaacagtggcagcagagagcagtcagggctccaggctagcctggaggctgagcaggaagccctggagaaggaccaggagaggttagaatatgaaatccagcagctgaaacagaagatttatgaggtcgatggtgttcaaaaagatcatcatgggaccctggaagggaaggtggcttcttccagcttgccagtcagtgctgaaaaatcacacctggttcccctcatggatgccaggatcaatgcttacattgaagaagaagtccaaagacgccttcaggatttgcatcgtgtgattagtgaaggctgcagtacatctgcagacacgatgaaggataatgagaaacttcacaatggcaccattcaacgtaaactaaaatatgagcggatggtttctcgctctttgggcgcaaatccagatgacctgaaggacccaattaaaattagtatcccacgctacgtcctctgcgggcaaggaaaggatgcacacttcgagtttgaggtcaagattactgtcctagatgagacatggactgtattcaggcgttacagtcgttttcgagaaatgcataaaacattgaagttaaagtatgcagagcttgctgcccttgaatttgctccaaagaaactatttggaaataaggatgaacgtgtgattgctgagagacgaagtcacttagagaaatacctcagggactttttcagcgtgatgctccagtccgcaacatctcccctccacatcaacaaagtgggactgactctctcgaaacataccatttgtgagttttcaccattcttcaagaaaggagtctttgactacagcagccacgggacggggtagagccaggagtgatggaggaaccaccacagcagtgccttctcgtcgaagcgggctccgatgcagggcagctcccccatgcgaggatccgggtctgcctcctcctgctgaagacagacatgcagcagcgggcccgggccacctcacgtttccatacctagtgcctgagtttggggatgggatgctctgcctgctgatgtggccctgacaggcagccgttaccgttccattgcggttgaacgtggccttttcccacagtgcttccttctcactgcgcagcaaagttcgtcccctgtggcaagatagatgtggttgggccatcgtgggttccctgagcccagccagcctgggacctcccaaagtgggtggcttaccagaccacccttaaatgactttcatctggtttcctctttcaccaaaatatactcgtattttttatatttcttccatgtggctggctatattccaagaaaagcattttaaattatttcattgtatttttttctttttttccctcatttgaatcagaacttttatataaaacccaaacactgatgtttacacagaatttcatattctgcaaaagggattttttgatccaatcatgactgtagtcttccatgcttgacaaattggatgtagacaacattacttaaaacttctataaatccctacaattaggatatttatttaaccttgaatattcaagaacattctcccaaatctaaatggctactgtgcattcttgagctttttctgctaagcacaaaatgaacgcaaagctaaatgcatatttttaagtattattcacattttttgttacagaatctattggatctttggctggaaaactagaatttatagcagtttattaatgataccttaaattactcaggacttaatgtagcattgcacttctgtgtacagtaaaactgctttgttttactaaagagaaaaatgtgagtggaaaaaatatgtatgtgttatatactcaaatgtatataattctatctatagatttatatatgtatacattctgtacagtagttccatcaaaatatgtaataattcacaccaattttattaaatgtatttgctttttcaaaatttaaattgagctgctatcaatattaaatgaagttatggcatctaaaaaaaaaaaaaaaaaaaaaa

SEQ ID NO: 24907 - DNA, 1770 bp, Homo Sapiens
ggataggggggaaacagctgaggcaggaacagttctttagctgtcggcgtaaatgaccaagttcatgacctatcaaggtctcgctccccggctgcacgcagctcaacttccaacattcgggaaaggcgtgcccggatcgcgaggggccgctgggaccgagtcccggacgtcgcgacgcgcagggggctgctgcggccggcggtctcgggaaaagtgaggggacggaggcgcccaagcaacgtgggtttcgggaactgctcttcagcaaaagcccttgtcagtttaaaagaaggaagcttatctaacacgtggaatgaaaagtacagttctttacagaaaacacctgtttggaaaggcaggaatacaagctctgctgtggaaatgcctttcagaaattcaaaacgaagtcgacttttttctgatgaagatgataggcaaataaatacaaggtcacctaaaagaaaccagagggttgcaatggttccacagaaatttacagcaacaatgtcaacaccagataagaaagcttcacagaagattggttttcgattacgtaatctgctcaagcttcctaaagcacataaatggtgtatatacgagtggttctattcaaatatagataaaccactttttgaaggtgataatgacttttgtgtatgtctaaaggaatcttttcctaatttgaaaacaagaaagttaacaagagtagaatggggaaaaattcggcggcttatgggaaaaccacggagatgttcttctgcattttttgaggaagagagatcagcattaaaacagaaacggcagaaaataaggctcttacaacaaaggaaagttgcagatgtttcacaattcaaagatctcccagatgaaattcctttgcctctggttattggaacgaaagttacagcacgattacgtggtgttcatgatggtttgttcactggacaaatagatgctgtggatactcttaatgctacttatagagtaacttttgataggacagggcttggaacccataccatccctgactatgaagttctcagtaatgaacctcatgagacaatgccaattgctgccttgggacaaaaacagcggccttctcgattttttatgaccccaccacggttacattatactcctcctctccagtcaccaattatagataatgatcctttattaggacagtcgccgtggagaagtaaaatttctggctctgacactgaaacattaggtggttttccagtagaatttcttatccaagtgaccagattatcaaaaattctcatgattcaccaaggaacatatcaagaacatcagggacatgaacacagaagcagaaacactggcaatcatattgcatgccagtcagcattggattcacgcggagatttgcgacaatcggtctcggggacttgaacaggtgaacacagggcctaaacacagtttgggtaacggtcaccggattgctatgagattgtcccaacacgggggtccagctgagagatcagcgaaggtattaacccgtgtgtagcggcgaaacacccggcacagtgtccgcgcgacatcctcagcggagaacccgtctttacaggggcactgggcgacagcaattcagatcgcgactggtgaccaattgtgccagcggacgcccctgagcaaccaactcagagtaacgaaacatgatcacgagcactaacaaacgataagtgaagcgaacggcccacggctgcaacgactgcttcctcatcatacatctttcattatgagccc

SEQ ID NO: 24908 - DNA, 2138 bp, Homo Sapiens
gctgggaccgagtcccggacgtcgcgacgcgcagggggctgctgcggccggcggtctcgggaaaagtgaggggacggaggcgcccaagcaacgtgggtttcgggaactgtgagtatttcactttgcgtagagccccctcgggcaatgcgacccagaaccgagggcttctttccccccgccggggcctccctcccgttctccactcggaacaaacagcctgcagttcccgcagctgcagcgcgggccgcggaacatgcgccgggagcggggcccgggcgggactccggagctggtactgctccccccgcgctccggcgccgggcctcgccgtgcggcctccttcctcccttcctcccgcccggctcggccggaggcggcggcggaggggcgaggcgcggccccccttcggcggcacctcctccccgggcaggcgcgggcggagccgggcccgcctcagccagccgcggcgggagcagcgcagcgcggcgccgcgggcagcgagctccgcattcgaacctccctcgcaaagacagtctccgccccacaatgcaccgcggcgggcagcctttgaaaaagcggcgcggctcgtccaagatggcggagctcgaccagttgcctgacgagagctcttcagcaaaagcccttgtcagtttaaaagaaggaagcttatctaacacgtggaatgaaaagtacagttctttacagaaaacacctgtttggaaaggcaggaatacaagctctgctgtggaaatgcctttcagaaattcaaaacgaagtcgacttttttctgatgaagatgataggcaaataaatacaaggtcacctaaaagaaaccagagggttgcaatggttccacagaaatttacagcaacaatgtcaacaccagataagaaagcttcacagaagattggttttcgattacgtaatctgctcaagcttcctaaagcacataaatggtgtatatacgagtggttctattcaaatatagataaaccactttttgaaggtgataatgacttttgtgtatgtctaaaggaatcttttcctaatttgaaaacaagaaagttaacaagagtagaatggggaaaaattcggcggcttatgggaaaaccacggagatgttcttctgcattttttgaggaagagagatcagcattaaaacagaaacggcagaaaataaggctcttacaacaaaggaaagttgcagatgtttcacaattcaaagatctcccagatgaaattcctttgcctctggttattggaacgaaagttacagcacgattacgtggtgttcatgatggtttgttcactggacaaatagatgctgtggatactcttaatgctacttatagagtaacttttgataggacagggcttggaacccataccatccctgactatgaagttctcagtaatgaacctcatgagacaatgccaattgctgccttgggacaaaaacagcggccttctcgattttttatgaccccaccacggttacattatactcctcctctccagtcaccaattatagataatgatcctttattaggacagtcgccgtggagaagtaaaatttctggctctgacactgaaacattaggtggttttccagtagaatttcttatccaagtgaccagattatcaaaaattctcatgattcaccaaggaacatatcaagaacatcagggacatgaacacagaagcagaaacactggcaatcatattgcatgccagtcagcattggattcacgcggagatttgcgacaatcggtctcggggacttgaacaggtgaacacagggcctaaacacagtttgggtaacggtcaccggattgctatgagattgtcccaacacgggggtccagctgagagatcagcgaaggtattaacccgtgtgtagcggcgaaacacccggcacagtgtccgcgcgacatcctcagcggagaacccgtctttacaggggcactgggcgacagcaattcagatcgcgactggtgaccaattgtgccagcggacgcccctgagcaaccaactcagagtaacgaaacatgatcacgagcactaacaaacgataagtgaagcgaacggcccacggctgcaacgactgcttcctcatcatacatctttcattatgagcc

SEQ ID NO: 24909 - DNA, 5674 bp, Homo Sapiens
ccttcccctccccactcttctccttccctcccctcccctcccttcccctccggagcggctggggctgcggcgccgctgctgacacggatcggccgcggccgccaccgggcggaggctgcgcggcgcagacccagacgggcggccccggagggcgcgcggcgatggcggcggcgggcaggcggcgggcgcggcgggcgaggggtccgggctgagctgcgggccggcccggatggcgggcggcgcgggctggtcgggcgcccccgcggctctgctgcgctccgtgcgccgcctgcgcgaggtgttcgaggtgtgcggccgcgaccccgacggcttcctgcgcgtggagcgcgtcgcggcgctcggactgcgcttcggccagggcgaggaggtagaaaaacttgtgaaatatttggatcccaacgacctggggagaatcaacttcaaggacttttgccggggggtgttcgccatgaaagggtgcgaggagctgctgaaggatgtgctgtcggtggagagcgcggggacgctgccgtgcgcgccagagatcccagactgcgtggagcagggcagcgaggtcacaggccccacctttgctgatggcgagctcatccccagggaacccggcttttttcccgaggacgaggaggaggctatgacgctggcgccacctgagggcccccaggagttgtacacagacagccccatggagagcactcagagcctggaggggtctgtcgggagtcctgccgagaaggacgggggacttgggggcctgtttctgccagaagacaagtccctggtccacactccatccatgacgacctcagacctttctacacactccaccacctcgctcatcagcaatgaggagcagtttgaagactatggggagggtgacgatgtggactgtgcccccagcagcccttgccccgatgatgagaccaggaccaacgtctactcggacctggggtcttcggtgtcttccagtgcggggcagacgcctaggaaaatgcggcacgtgtacaacagcgaattgctagatgtttactgctctcaatgctgcaagaaaatcaacctgctcaatgacttggaagcccgactgaaaaacctgaaggccaacagccccaaccgaaagatctccagcacggcctttggacggcagctcatgcacagcagcaacttcagcagcagcaatggcagcaccgaagacctgttccgggacagcattgactcttgcgacaatgacatcacagagaaggtaagcttcctggaaaagaaggtgacagagctggagaatgacagcctgaccaatggggacctgaagagcaagctgaagcaagagaacacacagctggtgcacagggtgcatgagctggaggagatggtgaaggatcaggagaccacggccgagcaggctctggaggaggaggcgcggcgccaccgcgaggcctacggcaagctggagagggagaaggctaccgaggtggagctgctcaatgccagggtgcagcagttggaggaagaaaatacagagcttagaacaacagtgactcggctcaagtctcaaacagagaaactggatgaggagcggcagcgcatgtctgaccgtctggaggacaccagcctgcggctcaaagatgagatggacctgtacaagcgcatgatggacaagctgcgacagaaccgccttgagttccagaaggagcgggaggcgacgcaggagctcatcgaggacttgcggaaggagctggagcacctgcagatgtacaagctggactgcgagcggccaggcaggggccgcagtgcctcctctggcctaggcgagttcaatgccagggcccgcgaggtggagctcgagcacgaggtcaagcggctcaagcaggagaattataagctgcgggatcagaacgacgacttgaatgggcagattttgagcctcagcctctacgaagcaaaaaacctctttgctgcccagactaaagcccagtctctggctgcggagatagacaccgcctcgcgcgatgagctaatggaagccctgaaggagcaggaggagatcaacttccggctgaggcagtacatggacaagattatcctcgccatcctggaccacaatccctccatcctcgagatcaaacactaaggcacggggctggctgcagagcagccttaggaccctgggaccaagggcagaccctgcccaaggatgcaggcctaagccgggcctcacactcacactgtaaatgtctctctggccaccatgcgttacgtgtacccgtgtatatgtggggaggctgtgcacacgagcgaggggtgagtggccgtggctgtgggcagcatccacacggttagccgtgcatgcactttgtggcccctttgcaaggggcagagggtactggaagtgggaggaggcaaggtctgctatcaggagttactgtaaaaacaagaactggaagctcgtgtttccggtactgggtaaaatgattctacctctggggataaggattcacattcgctctagtacgatgggctctttcaccccactcctagtccccttgggagtgggagcaaaattgtgatctttcctaggagtttgaatgccccatatttgtgtcctcgccagctctttggccacctttcaagccccagtgttcaagctcagagaggatgaaggggcatctggagggtccatgagatggggccctcaccaaatgccttggccaccggccagcagccctctgtgatgtgtgtgcagagtgaacagaggactcaggtttcatagcagctagtgcggggcatcctcatcctgtacctatagagttcgtgcactcccccatccatgctacctacctccccgtttctgtttcagttttaagacaatgaagcagcattcactgcgtcattgtaacatgaagggataaaaatgaaggagaaggagggtttgggatgggtgtctaaggcaggagttgacatcgggcaaccaaagaaatgagttttggggaggaacacaactcccatcccagtcagtttccttcccatggctgcatcttaagatggatgcacggagaaaccgtctgcctggctccctgtcttcattctccacgcagcctggtgatggcaggcctgggtttggatttcagaatcctagctccgggctccactcgtgtggcagcaagactgcttcgttccagcgtttagaaacacacctgtatttgattctcagccaggggagcactcgctgcactggtgggaggcggttgggaaagttgcaggaaaaccttagtcttccatccttctgacccatggtggaaattcacaccatggatttttaatggatctttgttctaggcagctgggaatagacatggtacttaccttagagttttccaatttatctcaattttatatggcttgtgattcattttcttaatccaaatatatataaacgtgtgtggtcttattcttccccctgcagtttcttgctttcttcagcacatcttatagtatgagaaggaaggtttgggcatgttgggaagggcggtggagggcgagttgcagaaagagagggcagtgagggtgaggagaggggatctggggacttgggtgtgacacctgcttgacagaggcagggctgtggccaggaccaaccttcaattccattccaatcagcctttgcatttgttggatctcgtggcttctttttaatcttttgttggggattagtttcatgctgcacataatggggttgcactggtctgacccaggactttggagccacccacactgggaagactaggctaggcagtcggtcttctaggagtttctcagccccttaggacgcgggtctccttgggctcccccaagggttctgcgaagaggcagtggaagaaggcatgaggagagggtctcttgagaatttgccaataggaaggagtggccacggctgaaaggaacaagacagatcctgacatagctttggcctgggtgttaggtcagaaggagtactggtgcatgggggccttaccccagggttgagtattttatatgtaaaatgttatctgccctttggctgcattggaatttcagagaaggctgcagaggcctgggttacacagcctgagtcacaacgtgggaaggaatctctgccacgggaaaggtgggcggaagcagctggcagcctggggcgtgcttcaggctcctccctctaaggggcgccatgggaacaggctccggagggagccggcgtctgaaaggcccccgggacctgctgcagtgccagaggggcctctggagcaggcctggcttttaaatggggggctgaattccagctcacacacacctcaagtccaaccttactttcttcagccagaatacatttcttgtaaaacctggcttgttgcttggcttttaaagatggtgtatgtttgtaaaaatattcttctgggctcaaaagctagcttgagggggcagatgccccaggtgtcccagctccacagcccctggcagatcccagaccccttggtggcaggtcccagagcctaggtggtaggagcttgatctttgtttctgcccttacccctcagtagtggggctgcgaggtagtagacaggatgcccagttaagtttgaatttcagatagaaaataattttagaataaatatgttctatctaatacatgggacagatgttatttttagagataggatcttgctctgttgcccaggctggagtgtagtggtatgatcatagctcaccacaaccttgaactcccaggctcaagcgatcctcccgccttaactgcctgagtagctgggactacaggcatgcaccaccacgcccagctaatttttcttattttttgtagagacagggtctcactgtgttgcctcactcgagctgctgacctcaagtgatcctcccacctcagcctgccaaagcactgggattacaggcatgagccaccatgcctggccaggacatatttgaaatggggagattttaaaaattctgatgattagactgaatcctcagacgttctggtttgattgttgtgggtgtagcccaggcatgggattttttaaagagctgctcaggtaattccaatttaattgcgtgtcctacttgggttttttgtttgtttttattgtttttgctaaacctggcaaccctaccgagtagggattagcagtaacttatctgaaatttagaggtgttttgggggtggggcgagggtttctgtagtagactcagattttacatggccctgagctgcccttgcgttcagttggaagccacgcaaaatgaactgaaccaggagtgagcttcgtgtacattatctattagaaaatgaagtaccttctggttcagctagtccctgtgcgttgagaggctttaagaaacttctagtaaaaatgtttttttcttttagctttgaattggccagagtttatcctagattattttattttaaattggtagaattctttgcgaactgtcacagagaaattccttttcatgactttatttctgacctattaaaacatgaacaggccaggcatggtggctcacgcctgtaatcctagcacttgggaggcagtggcaggcggatcacttgagctcaggagtcctaaaccagcctgggcaacatagtgataccttgtctctaccaaaagtt

SEQ ID NO: 24910 - DNA, 2618 bp, Homo Sapiens
aaagagaaccggccgccgagacgccgcagggtgccaggcggggagggggcgagaggccccaggcccgagggcatggagcggttaggagagaaagccagtcgcctgctggagaagttcggccgcagaaagggtgaatctagccggtctgggtctgacgggacccccgggccgggcaaggggcgcctaagtgggttggggggacctaggaagtcagggccccgaggagctactgggggacctggggatgagccgttggagccggcccgggagcaaggttccctggacgctgagcgaaatcagcgcggctcctttgaggcgccgcgctacgaaggctcttttcccgcggggccgccgcccacccgggccttgcctctacctcagtcgttgccccccgattttcggctggagcccacggccccggccctcagcccccgctctagcttcgccagtagctcggccagcgacgcgagcaagccgtccagcccccggggcagcctgctgctggacggggcgggggctggcggagctggaggtagccggccctgcagcaatcgcaccagcggcatcagcatgggctacgaccagcgccacgggagccccttgccagcggggccgtgcctgtttggcccacccctggccggagcaccggcaggctattctcccggaggggtcccgtccgcctacccggagctccacgccgccctggaccgattgtacgctcagcggcccgcggggttcggctgccaggaaagccgccactcgtatcccccggccctgggcagccctggagctctagccggggccggagtgggagcggcggggcccttggagagacggggggcgcaacccggacgacactctgtgaccggctacggggactgcgccgtgggcgcccggtaccaggacgagctaacagctttgcttcgcctgacggtgggcaccggtgggcgagaagccggagcccgcggagaaccctcggggattgagccgtcgggtctggaggagccaccaggtcctttcgttccggaggccgcccgggcccggatgcgggagccagaggccagggaggactacttcggcacctgtatcaagtgcaacaaaggcatctatgggcagagcaatgcctgccaggccctggacagcctctaccacacccagtgctttgtttgctgctcttgtgggcgaactttgcgttgcaaggctttctacagtgtcaatggctctgtgtactgtgaggaagattatctgttttcagggtttcaggaggcagctgagaaatgctgtgtctgtggtcacttgattttggagaagatcctacaagcaatggggaagtcctatcatccaggctgtttccgatgcattgtttgcaacaagtgcctggatggcatccccttcacagtggacttctccaaccaagtatactgtgtcaccgactaccacaaaaattatgctcctaagtgtgcagcctgtggccaacccatcctcccctctgagggctgtgaggacatcgtgagggtgatatccatggaccgggattatcactttgagtgctaccactgtgaggactgccggatgcagctgagtgatgaggaaggctgctgctgtttccctctggatgggcacttgctctgccatggttgccacatgcagcggctcaatgcccgacaaccccctgccaactatatctgagctgcaatcactgctgctgctgtcaccctgcagacaaactgctgtggccagtgggcccctctgaggccagccaaggcaaagaatgcactctgcaggcctggcagaagagtcctctggggaggaccccaagggccggagacccaaagatcatgatattccaaatggattgtggaagagaaaccttatatttaccagggtgggggcgactggcctttttcccatgtgtgcagtctgagcttaggcacacacaggagggttccaggactttctgaacatctgattctgtatcttcagtatatatattttgtttgttttagagatgggatctcaccatgttgcccaggctagtcttgaactcctgggctcgaatgatcctcccaccttggcctcccaaggtgctgggattataggcgtaagccactgtgtctggcctagtgtatgattatgcatgagtcacgcaatgttctggtcctggattccaggagtagaggacctagctttaaatcaattagtttcagtttgcttgaaactagttcacctaaagctagatctcttaaaaccaatttactgaaaacttgtttgcttaaagttaatgacttaatgactaatttgccaaaagctcaattcctattttggtgtgtttatatccatttaggtgtcctattcttttttgtcatgctttggatatttcaaggatttatatctattcatccaagagtacttctgagctattatcagcaacataaatttatcaaatttgcagcactttgtaaatgatgagattgcttcctacctttatggatgtctttttctatgttatctaccattcaaaaacttttttaaaaagtttaaagtttctagcaataaatacaattggtacagaaaaaaaaaaaaaaaaaaaaaaaaaaaaaaaaaaaaaaaaaaaaaaa

SEQ ID NO: 24911 - DNA, 3163 bp, Homo Sapiens
tgttatcccataactttggtatcctgaaatctgaggattccaccaagataatatgataagaactttcagtgatttggggccatatcctacttagactaatgtggaatttccagatttcctgagagcttggtacagcagcacacactgcttgctaatcagcacaggcaataatgccatctctgcctcaagaaggagttattcagggatcctctcccctggatttgaatacagaattaccttatcaaagcacaatgaaaaggaaagtcagaaagaagaaaaagaagggaaccattacagcaaatgttgccgggacaaagtttgaaattgttcgtttagtaatagatgaaatgggatttatgaaaactccagatgaggatgaaacaagtaatcttatatggtgtgattctgctgttcagcaggagaaaatttcagagctgcaaaattatcagaggatcaaccattttccaggaatgggggagatctgtaggaaggatttcttagcaagaaatatgaccaaaatgatcaagtctcggcctctggattatacctttgttcctcgaacttggatctttcctgctgaatatactcaattccaaaattatgtgaaagaattgaagaaaaaacggaagcagaaaacttttatagtgaaaccagctaatggtgcaatgggtcatgggatttctttgataagaaatggtgacaaacttccatctcaggatcatttgattgttcaagaatacattgaaaagcctttcctaatggaaggttacaagtttgacttacgaatttatattctggttacatcgtgtgatccactaaaaatatttctctaccatgatgggcttgtgcgaatgggtacagagaagtacattccacctaatgagtccaatttgacccagttatacatgcatctgacaaactactccgtgaacaagcataatgagcattttgaacgggatgaaactgagaacaaaggcagcaaacgttccatcaaatggtttacagaattccttcaagcaaatcaacatgatgttgctaagttttggagtgatatttcagaattggtggtaaagaccctgattgtagcagaacctcatgtcctgcatgcctatcgaatgtgtagacctggtcaacctccaggaagcgaaagtgtctgctttgaagtcctgggatttgatattttgttggatagaaaactaaagccatggcttctggagattaaccgagccccaagctttggaactgatcagaaaatagactatgatgtaaaaaggggagtgctgctaaatgcgttgaagctactaaacataaggaccagtgacaaaagaagaaacttggccaaacaaaaagctgaggctcaaaggaggctctatggtcaaaattcaattaaaaggctcttaccaggctcctcagactgggaacagcagagacaccagttggagaggcggaaagaagagttgaaagagagactcgctcaagtacgaaagcagatctcacgagaagaacatgaaaatcgacatatggggaattatagacgaatttatcctcctgaagataaagcattacttgaaaagtatgaaaatttgttagctgttgcctttcagaccttcctttcaggaagagcagcttcattccagcgagagttgaataatcctttgaaaaggatgaaggaagaagatattttggatcttctggagcaatgtgaaattgatgatgaaaagttgatgggaaaaactaccaagactcgaggaccaaagcctctgtgttctatgcctgagagtactgagataatgaaaagaccaaagtactgcagcagtgacagcagttatgatagtagcagcagctcttcagaatctgacgaaaatgaaaaagaagagtaccaaaataagaaaagagaaaagcaagttacatataatcttaaaccctccaaccactacaaattaattcaacaacccagctccataagacgttcagtcagctgccctcggtccatctctgctcaatcaccttccagtggggacacccgcccattttctgctcaacaaatgatatctgtgtcacggccaacttctgcatctcggtcacattccttaaaccgtgcttcctcctacatgaggcatctgcctcacagtaatgatgcctgctctaccaactctcaagtgattatactggcacaatgaaataagaccccctccaaatatctgtattctttcaaatttaagagtgagtctttgcggcaactgaaaacaaaagaacaagaagatgatctaacaagtcagaccttatttgttctcaaagacatgaagatccggtttccaggaaagtcagatgcagaatcagaacttctgatagaagatatcattgataactggaagtatcataaaaccaaagtggcttcatattggctcataaaattggactctgtaaaacaacgaaaagttttggacatagtgaaaacaagtattcgtacagttcttccacgcatctggaaggtgcctgatgttgaagaagtaaatttatatcggattttcaaccgggtttttaatcgcttactctggagtcgtggccaagggctgtggaactgtttctgtgattcaggatcctcttgggagagtatattcaataaaagcccggaggtggtgactcctttgcagctccagtgttgccagcgcctagtggagctttgtaaacagtgcctgctagtggtttacaaatatgcaactgacaaaagaggatcactttcaggcattggtcctgactggggtaattccaggtatttactaccagggagcacccaattcttcttgagaacaccaacctacaacttgaagtacaattcacctggaatgactcgctccaatgttttgtttacatccagatatggccatctgtgaaacagaagggaagatcgccattggttatacataacagcaattcatttttttcctctgaagttgaacatgcaaagaacatgaccattaagtgctgttttatgtatataagacatatatatgtgtgaaaatatatgcacatatgcaccctaataacatatatttattatattaaatgatatatgaaagaagaattagcagaaaatggaatataagacttaacctttctggaaacgtaataaaccatgttaaaattgtttacgcaaaaaaaa

SEQ ID NO: 24912 - DNA, 7663 bp, Homo Sapiens
  misc_feature (61)..(61): n is a, c, g, or t
cccgcggacaccaggcaggcccggccgggtgcgcggccaaggcccgctccccgcgtccccngggcgccgcccccgcccgcggctgggctccgagagacgagtgggagagcgagtgcagcgagggcgagaggcgagccgagcaggccgccctgcccgcggccctagcgccggcgcgaggagggggcgccgcggcccaccctccttcctgcctggccgcgggccggccgggccgccgcgccccgacccccatggccacccaggcctccgggccgcgaagtcgcagcgccagacccaaggcccccgagtgagcgcgggcgccgaggatctcatctggccaccgcgttctggaagaggcgagagggagagcgtgcgcgagaggagagagacggcgggggaaagggagacggcgagacgcgcagcgccggcgcccgggagacccaggaggagcccgcagataaccagcccgagtcatgcagtcttttcgagaaaggtgtggtttccatggcaaacaacagaactaccagcagacctcgcaggaaacatcacgcctagagaattacaggcagccgagtcaggccgggctaagctgcgaccggcagcggctgctcgccaaggactattataacccgcagccttacccgagctatgagggtggcgctggcacgccctctggcactgcagccgcggtggccgccgacaagtaccaccgaggcagcaaggccctgcccacacagcaaggcctgcaggggaggccggctttccctggctacggcgtccaggacagcagcccctacccaggccgctatgctggtgaggagagccttcaggcttggggggccccacagccaccacccccacagccgcagccactacctgcaggggtggccaagtatgatgagaacttgatgaaaaagacagcagtgccccccagcaggcagtatgcagagcagggcgcccaggtgccctttcggactcactccctgcacgtccagcagccaccgccgccccagcagcccctggcataccccaagctccaaaggcagaagctgcagaacgacattgcctcccctctgcccttcccccagggtacccactttcctcagcattcccagtccttccccacctcctccacctactcctcctctgtccagggtggtgggcagggggcccactcctataagagttgcacagcaccgactgcccagccccatgacaggccgctgactgccagctccagcctggccccggggcagcgggtccagaatcttcatgcctaccagtcgggccgcctcagctatgaccagcagcagcagcagcagcagcagcagcagcagcagcagcaagcccttcagagccggcaccatgcccaggaaaccctccattaccaaaacctcgccaagtatcagcactacgggcagcaaggccagggctactgccagccggacgcagccgtccggaccccagagcagtactaccagaccttcagccccagctccagccactcacccgcccgctccgtgggccgctcaccttcctacagttccacaccgtcgccgctgatgccaaacctggagaactttccctacagccagcagccgctcagcaccggggccttccccgcagggatcactgaccacagccacttcatgcccctgctcaatccctccccaacggatgccaccagctctgtggacacccaggctggcaactgcaagccccttcagaaggacaagctccctgagaacctgctgtcggatctcagcctgcagagcctcacggcgctgaccttacaggtggagaacatctccaacaccgtccagcagctgctgctctccaaggctgctgtgccgcagaagaaaggtgtcaagaacctcgtgtccaggaccccagagcagcataaaagccagcactgcagccccgaagggagcggctactcagccgagcccgcaggcacaccgctgtcagagccgccgagcagcacgccacagtccacgcatgcggagccgcaggaggccgactacctgagcggctccgaggacccactggagcgcagcttcctctactgcaaccaggcccgtggcagccctgccagggtcaacagcaactcgaaggccaagcccgagtccgtgtccacctgttctgtgacctctcctgacgacatgtccaccaaatctgacgactccttccagagcctacacggcagtctgccgctcgacagcttctccaagttcgtggcgggtgagcgggactgtccgcggctgctgctcagcgccctggcacaggaggacctggcctccgagatcctggggctgcaggaagccatcggtgagaaggccgacaaagcttgggctgaagcacccagcctggtcaaggacagcagcaagccacccttctcgctggagaaccacagcgcctgcctggactctgtggccaagagtgcgtggccccggcctggggagccggaggccctgcccgactccttgcagctggacaagggcggcaatgccaaggacttcagcccagggctgtttgaagacccttccgtggccttcgctacgcctgaccccaaaaagacaactggtcctctctcctttggtaccaagcccacccttggggttcctgctccagaccccactacagcagcttttgactgtttcccggacacaaccgctgccagctcagcggacagcgccaacccctttgcctggccagaggaaaacctgggggatgcttgtcccaggtggggattgcaccctggcgagcttaccaagggcctggagcagggtgggaaggcctcagatggcatcagcaaaggggacacccatgaggcttcggcctgcctgggcttccaggaggaggacccccctggggagaaggtggcctcgttgcccggggacttcaagcaggaggaggtgggtggggtgaaggaggaggcaggtgggctgctgcagtgccccgaggtggccaaggctgaccggtggctggaggacagccggcactgctgttccaccgccgacttcggggacctcccactgctgccacccaccagcaggaaggaggacctggaagctgaggaggagtactcctccctatgtgagctcctgggcagccccgagcagaggcctggcatgcaggacccgctgtcacccaaggccccactcatctgcaccaaggaggaggtggaggaggtgctggactccaaggccggctggggctctccgtgccacctctcaggggagtccgtcatcctgctgggccctacagtgggcaccgagtcaaaggtccagagctggtttgagtcctctctgtcacacatgaagccaggtgaagaggggcctgatggggagcgagctccaggggattccaccacctcggacgcctctctggcccagaagcccaacaagcctgctgtgcccgaggcgcccatcgcaaagaaagagcctgtgccacggggcaaaagcttacggagccgtcgggtgcaccgggggctgcccgaggccgaggactccccatgcagggcaccagtgctgcccaaagacctcttgctccctgaatcctgcacagggcccccccagggacagatggaaggggctggagccccaggccggggggcctcggaagggctccccaggatgtgtactcgttctctcacggccctgagtgagccccgcacgcccggacccccaggcctgaccaccacccctgcacccccagacaaactggggggcaagcagcgagccgccttcaagtcgggcaagcgggtggggaagccctcacccaaggctgcctccagccccagcaacccggccgccctgcctgtggcctccgacagcagcccgatgggctccaagaccaaggagacagactcacccagcacgcctggcaaggaccagcgctccatgatccttcggtcacgcaccaaaacccaggagatcttccactccaagcggcggaggccctctgagggccggctccccaactgccgtgccaccaagaagctcctcgacaacagccacttgcccgccacattcaaggtctccagcagcccccagaaggagggcagggtgagccagcgggcaagggtccccaaacctggtgcaggcagcaagctctctgaccggcccctccatgcgctcaaaaggaagtcggccttcatggcgccggtccccaccaagaagcggaacctggtcttgcggagccgcagcagcagcagcagcaacgccagtggcaatgggggagatgggaaggaggagaggcctgagggttcccccaccctcttcaagaggatgtcttctcccaagaaagccaagcccaccaagggcaatggcgagcctgccacaaagctcccacccccggagacccccgatgcctgcttcaagctcgcctctcgggcagccttccagggggccatgaagaccaaggtgctgccaccccggaagggccggggcctaaagctggaagccatcgtgcagaagatcacctcgcccagcctcaagaagttcgcatgtaaagcgccaggggcctctcctggtaatcctctgagcccatccctttccgacaaagaccgtgggctcaagggtgctgggggcagcccagtgggggtggaagaaggcctggtaaatgtgggcaccgggcagaagctcccaacttctggggctgatccgttatgcagaaatccaaccaacagatccttaaaaggcaaactcatgaacagtaagaaactgtcttctactgactgtttcaaaaccgaggccttcacatccccggaggccctgcagcctggggggactgccctggcgcctaagaagaggagccggaaaggccgggcaggggcccatggactctccaaaggcccgctggagaagcggccctatcttggcccggctctgctcctgactccccgagacagggccagtggcacacaaggggccagtgaggacaactctggtggaggaggcaagaagccaaagatggaggagctgggcctggcctcccagcccccggaggcgaggccctgccagccccagacaagggcacagaaacagccaggccacaccaactacagcagctattccaagcggaagcgcctcactcggggccgggccaagaacaccacctcttcaccctgtaaggggcgtgccaagcgacgacgacagcagcaggtgctgcccctggatcccgcagagcctgaaatccgcctcaagtacatttcctcttgcaagcggctgaggtcagacagccggacccccgccttctcacccttcgtgcgggtggagaagcgagacgcgttcaccaccatatgcactgttgtcaactcccctggagatgcgcccaagccccacaggaagccttcctcctctgcctcctcttcctcatcctcgtcctcgttctccttggatgcagccggggcctccctggccacactccctggaggctccatcctgcagccgcggccctccttgcccctctcctccacgatgcacttggggcctgtggtttccaaggccctgagtacctcttgccttgtttgctgcctctgccaaaacccggccaacttcaaggaccttggggacctctgtgggccctactaccctgaacactgcctccccaaaaagaagccaaaactcaaggagaaggtgcggccagaaggcacctgtgaggaggcctcgctgccgcttgagagaacactcaaaggtcccgagtgtgcagctgccgccactgccgggaagccccccaggcctgacggcccagctgacccggccaagcagggcccactgcgcaccagtgcccggggcctgtcccggaggctgcagagctgctactgctgtgatggccgggaggatgggggcgaggaggcagccccagccgacaagggtcgcaaacatgagtgcagcaaggaggctccggcagagcccggcggggaggcccaggagcactgggtgcatgaggcctgtgccgtgtggaccggcggcgtctacctggtggccgggaagctctttgggctgcaggaggccatgaaggtggccgtggacatgatgtgttccagctgccaagaagccggggccaccattgggtgctgccacaaaggatgcctccacacctaccactacccgtgtgccagcgatgcaggttgcatattcatcgaagagaacttttctttgaaatgtcccaaacataagaggctgccgtagtaatccaccccaacggccggaggagccgccggagcccgcctgcccgcccgccgccgaaggagaggagccgcctgcgcagcccccgggcctttgagctgctcccagcgctggtccagagccgatccttgatccgggtcccggatcgtggatccggccgcctagggctcagacttgcggccccgggttgggaggaaaacccgttccggagccgcctgctcccggaaccggacggcacagggcgttcttgcccaccccaggggccaggcttgcggagggggagcccgcggagcggccagactccccggggcgctcagcctccggcgagggtgggagacggctttgtcctggggacactttccctctggaatctcaagacgacgtggcacacattccacgtgggtgctgccgccaccccagtcggtcgtggcgtgcagctgggagccctgggcttgggggtgggggtcgaaacagtactggaagaggcggagggcggctcctagctccgtggactaggcgggggagaaaggaagcctttctgagagcgggctaggccggcactggagaggccggagcctttggaacaaaccgtgcggaacgcgtccaggggccttcccgcccagcctttgccagatctctcgtgcggttcgggcaaagccggggtagacctgggctatgctcagttaggggttgcgggatccccgagtgtgggcgggactgggacaccctttggcctctgtttgtcccctttccagtcctccaccccacccctggagcccagcctgggagcgcaaaacccaagaagcggccagaacgcacctccggctccggcggacgcgcgaccgttgtgcaccaccagggaccgccgcgcctactctgcacgggagcagggacagcgctagatttcgtgtacaaaacctgtgtacccctctatatatatgttacatagaatgtatatatgttgggaacatgctcgcttctcccgtgtgtcgccgccgtgcgtcgtgcgcccgcaacagagccccaaccgggcctttgccgggtaaggggctaccgcgacgccacttgtccacgcagccaccaccggcccgggccagtccctgccagtccgtccgcctgtccgtccgtgtcctcagctctgtccacgcttcgataggcctgacgcagcccccagcccagggccgccctagcaacttcctgtacatatgactgtaaaatggtaaacgtgtgtattatatctggcctcgttatatagtgtatatatatgtatacatatacatatatataatatatatgaagactgtaaatgttaagacgactagtgttcttattagtatattgcttcacactgaagattgtgtgtatcgagctgtttctaaaagatgtttattttccttaagagtaaaaaacagtcattgcattcagaaaaaaaaaaaaaaaaaagtcaataaagatacaacgattgttttggaaaa

SEQ ID NO: 24913 - DNA, 5488 bp, Homo Sapiens
cctctgcctggggccccagggatgcgcctcctcctgaaagtcccctccatcctcccttagaggaacaggctgccgccgcgcccccatcagcctccattgccctgaccttatttccacctgatggtgccagaggctgcttcccagctggtatcctgagatcctcgttcccttggtggcttggttgtttaagcctccattattgattgggggcggtggtctgggtgtgattcctgtgggggaaaccagcccgaggtgccttggctcaggcttgcctgcctggagtccttgtcgtgtacccgtctgtggccctagagtcacctcctgctccttttcactgggtttctccccagaccaagcccctggatttgagcttctgagcagccaactgatttttttcatgagggaaagaattttgctcctagatttatttctaatccttttctccgtaactgaccttttctctgtaagctatttgtggctctagtgggtttttgtttgcttgcttgtttttgttttatctttgccctgaacgtccatcctggcctcggctgcctccctccccgagttcttcactacacctcctgtctcagcctcccagagagggtggcgagggtgctgatgcccagagacaccatccggcgaatggacctctcctgtcatgcggggcagggcagggctgccggcagagccatgtcctgaaccctccctcctcccccctgctctccttaagggtctttcccagatgtgaaggtccctcccaggctctactgaggtcagaccaattcccagtggcttgggtaccctcgttcactccagcaccagcccctgccctccttcttcccgggccaggctgccaggtgagccccgggccaagggtggttgccctgctgaggccgaaaggactcgagcttcccatctcctcgcctcccccaggtctttcaccgtctggactcatctctgggtaactcatggtgtgagtggccacgtggctggctcaggtgagtccttttagaccccaggtgacccaccagctagtccggggcccattgttgtgcccactaggatgtcccccatggtgtcctccctgcgctttaaagttctccttcgtgtgctgttcttcatggcccctgttcccccacaggtgtttggacagtgaacgccaggtcccctcctccccacccccggcctctcaaacacgcccagccccacgatggcagcagagacactcaactttgggcctgagtggctcagggccctgtccgggggcggcagcgtggcctccccacccccgtcccctgccatgcccaaatacaagctggctgactaccgttatgggcgagaggaaatgctggctctctacgtcaaggagaacaaggtcccggaagagctgcaggacaaggagttcgccgcggtgctgcaggacgagccactgcagcccctggctctggagccgctgactgaggaggaacagagaaacttctccctgtcagtgaacagcgtggctgtgctgaggctgatggggaaaggggctggcccccccctggctggcacctcccgaggcaggggcagcacgcggagccgaggccgcggccgtggtgacagctgcttttaccaaagaagcatcgaagaaggcgatggggcctttggacgaagcccccgggaaatccagcgcagccagagctgggatgacagaggcgagaggcggtttgagaagtcagcaaggcgggatggagcacgatgtggctttgaggagggaggggctggcccaaggaaggagcacgcccgctcagacagcgagaactggcgctccctacgggaggaacaggaggaggaggaggagggcagctggaggctcggagcagggccccggcgagacggcgaccgctggcgctccgccagccctgatggtggtccccgctctgctggctggcgggaacatggggaacggcggcgcaagtttgaatttgatttgcgaggggatcgaggagggtgtggtgaagaggaggggcggggagggggaggcagctctcacctgcggcggtgccgagcgcctgaaggctttgaggaggacaaggatgggctcccagagtggtgcctggacgatgaggatgaagaaatgggcacctttgatgcctctggggccttcttgcctctcaagaagggccccaaggagcccattcctgaggagcaggagctggacttccaagggttggaggaggaggaggaaccttccgaagggctagaggaggaagggcctgaggcaggtgggaaagagctgaccccactgcctcctcaggaggagaagtccagctccccatccccactgcccaccctgggcccactctgggggacaaacggggatggggacgaaactgcagagaaagagcccccagcggccgaagatgatattcgggggatccagctgagtcccggggtgggctcctctgctggcccacccggagatctggaggatgatgaaggcttgaagcacctgcagcaggaggcggagaagctggtggcctccctgcaggacagctccttggaggaggagcagttcacggctgccatgcagacccagggcctgcgccactctgcagccgccactgccctcccgctcagccatggggctgcccggaagtggttctacaaggacccacagggcgagatccaaggccccttcacgacacaggagatggcagagtggttccaggccggctacttttccatgtcactgctggtgaagcggggctgcgatgagggcttccagccgctgggcgaggtgatcaagatgtggggccgcgtgccctttgccccagggccctcacctcccccactgctgggaaacatggaccaggagcggctgaagaagcaacaggagctggccgcggcggccttgtaccagcagctgcagcaccagcagtttctccagctggtcagcagccgccagctcccacagtgcgcgctccgagaaaaggcagctctgggggacctgacaccgccaccaccgccgccgccacagcagcagcagcagcagctcacggcattcctgcagcagctccaggcgctcaaaccccccagaggcggggaccagaacctgctcccgacgatgagccggtccttgtcggtgccagattcgggccgcctctgggacgtacatacctcagcctcatcacagtcaggtggtgaggccagtctttgggacataccaattaactcttcgactcagggtccaattctagaacaactccagctgcaacataaattccaggagcgcagagaagtggagctcagggcgaagcgggaggaagaggaacgcaagcgtcgagaggagaagcgccgccagcagcagcaggaggagcagaagcggcggcaggaggaggaagagctgtttcggcgcaagcacgtgcggcagcaggagctattgctgaagttgctacagcagcagcaggcggtccctgtgccccccgcacccagctccccgcccccactctgggctggcctggccaagcaggggctgtccatgaagacgctcctggagttgcagctggagggcgagcggcagctgcacaaacagcccccacctcgggagccagctcgggcccaggcccccaaccaccgagtgcagcttgggggcctgggcactgcccccctgaaccagtgggtgtctgaggctgggccactgtggggcgggccagacaagagtgggggcggcagcagcggcctggggctctgggaggacacccccaagagcggcgggagcctggtccgtggcctcggcctgaagaacagccggagcagcccatctctcagtgactcatacagccacctatcgggtcggcccattcgcaaaaagacggaggaagaagagaagctgctgaagctgctgcagggcattcccaggccccaggacggcttcacccagtggtgcgagcagatgctgcacacgctgagcgccacgggcagcctggacgtgcccatggctgtagcgatcctcaaggaggtggaatccccctatgatgtccacgattatatccgttcctgcctgggggacacgctggaagccaaagaatttgccaaacaattcctggagcggagggccaagcagaaagccagccagcagcggcagcagcagcaggaggcatggctgagcagcgcctcgctgcagacggccttccaggccaaccacagcaccaaactcggccccggggagggcagcaaggccaagaggcgggcactgatgctgcactcagaccccagcatcctggggtactccctgcacggatcttctggtgagatcgagagcgtggatgactactgaccagcccggacccccagcccctgggctgtaggccagggcagccacagcggcgtggaccgagggtcccagcctgcaggctccccgcagagagcacaggaagaggcaggggcggggtccccagcacttgttacaaacacacgatgcaccttaactcacccaccacgaggcactttacagactgggggagggggtttttctttttatttttttttttaattttaaacgactgaagaaaacattaggagaggcaaaaatattgttaaaaactagactctaaacaccccttcctgctgtgaggatagtgggtgtgacaatggaaggtccacagaggtttttgttttttggttttttttttttttttaagaaaaaaagatgaaaaatgaaaaaaaaaatggttaggaggctgaaagaaaaaacacactgttattttggggcagtggggacacaggccccgtggacctgtcctgcctggcccccaaggccatacttaccccccagaaggcgggccatggggtaactggaagctgggggccagcagtttgcacaggaggcctgtctgagccccacccgccagacctgttgtgagcagctcctgtcactgaggctggctgaggtgtccggggtggggccaaagtagccccttggcttcgctgctttgggggacagttgcacaaattggacgagtggccccagctctctggctgccatcttgtgctggccgagtagacgggaggggccaagccgtgccaacctctctggctggcagggtggggcagcaggactctggttctggtgaggggcgtctcccactgctgccattttgggggacaccctgggtttgaacctgaaagccccagctctctgccttgccacgtgaatgtattctttgggccacaagcccccgcctcacccctgcctgagctgcctcacccctgtgagcggcgggggtggatgattgctccagaggctgcagagagaaggctgagctgtttctccagtgaagggggcaggaggaggggcctcaaaggcaaggagtgggtggctttgggcttagggttgcagtagaggggctgccgcccggggccccaacctgtagccagctcgtaagatgtggaccacccagctctgcacctgacccttccgctgaccaaatgggagaggagcaggtgg

SEQ ID NO: 24914 - DNA, 5959 bp, Homo Sapiens
atcttgtgttgttgaggctgaggactgactggggttctgagactccctgtcccggaccgcagattatagtgggaccagtctcattaggttgaatctacagcctatgttggtgttaacccaggtctcttagagcgttaaaaggatctgaacaaagtctgctcaaatctcctgctgtgaaccagcagaatttttgaacagagaccacgtctccacctcctgggctccaacgattctcccatcttggcctcccaaagcgctggatttacaggtttcttcacatataaaaatctattgtaaaaatacggaaaagaatggcagcggaaacgcagacactgaactttgggcctgaatggctccgagctctgtccagtggtgggagtattacatcccctcctctttctccagcattgccgaagtataaattagcagattatcgttacggcagagaagaaatgttagcacttttccttaaagacaacaagataccttcagaccttctggataaagaatttctgcctatcctccaggaggaaccccttccaccattggctctggtaccctttacagaagaagaacagagaaacttttccatgtctgtaaatagtgctgctgtcctgcgattgacaggacgaggaggaggaggaacagtggtgggggctcctagaggtcgaagttcttcaagagggcgaggcagaggcagaggtgaatgtggtttctaccaaagaagttttgatgaagtagagggtgtttttggtcgaggaggtggcagagaaatgcatagatcgcagagctgggaggaaaggggtgacagacgttttgaaaaaccaggacgaaaagatgtagggagaccaaattttgaggaaggtggaccaacatcagtagggagaaagcatgaatttatacgctcagaaagtgaaaattggcgcatctttagagaggaacaaaatggagaagatgaagatggaggttggcgactagctggatcaaggagggatggagagaggtggcgacctcacagtcctgatggccctcgttctgcaggctggcgggaacacatggaacgacgtcggaggtttgagtttgattttcgagatagagatgatgaacggggttaccgaagggttcgctctggcagtgggagcatagatgatgacagggatagcttgcccgaatggtgcttagaggatgctgaagaagaaatgggtacatttgactcatctggagcattcctttctctaaaaaaagtacagaaagagcctattccagaagagcaggagatggacttccggcctgtggacgaaggggaggagtgctctgactctgagggtagccataatgaagaggccaaagaacccgataagacaaataagaaagaaggagagaaaacagatagagtaggagttgaagctagtgaggaaactccccagacctcatcatcatctgctagaccaggtactccttcagaccatcagtctcaggaagcatcacagtttgagaggaaagatgaaccaaaaactgagcaaacggaaaaagctgaagaggagactcggatggaaaatagtctaccagccaaagtgcccagcagaggggatgaaatggttgctgatgtccagcagcccctgtcgcagattccttcagatacagcctctcctcttctcatacttccacctcctgttcccaatcctagtcctactctccggccagttgaaacaccagttgtaggtgctcctggtatgggcagtgtttccacagaacctgatgatgaagaaggtctcaaacatttggagcagcaagctgagaaaatggtggcttatctccaagacagtgcactagatgatgaaagattggcatcaaaactgcaagagcacagagctaaaggagtgtcgattccattgatgcatgaagcaatgcagaagtggtattacaaagatcctcagggagaaattcaaggtcccttcaataatcaggagatggcagaatggtttcaggcgggctattttactatgtctttattggtgaagagagcgtgtgatgaaagcttccaacctcttggcgatatcatgaaaatgtggggaagggttcccttttctccaggtccagctccccctcctcatatgggagagctggaccaggaacgactgaccaggcagcaagaactcacagccttataccagatgcagcacctgcagtaccagcagtttttaatacaacaacaatatgcacaggttttggcccaacagcagaaagcagcactgtcttcccagcagcagcagcagttggcacttcttcttcaacagtttcagaccttgaagatgagaatatctgatcagaacatcattccctcagtaactaggtctgtgtccgtgccagatactggctctatctgggagcttcagccaacagcttcacagcctacagtttgggaaggtggtagtgtatgggatcttcctctggacaccacgacaccaggccctgccctggaacagcttcagcagctagagaaggccaaagctgcaaagctagagcaagagagaagagaggcagaaatgagggcaaaacgggaagaggaagagcgaaagaggcaggaagaactccgaagacaacaggaggaaattcttcggcgacagcaggaagaagaaaggaaaaggcgagaggaagaagaacttgcccgaaggaaacaggaagaggctctgcgtcgccagcgggagcaagaaattgcattaaggcgacagcgagaagaggaagaaagacagcagcaagaagaagctcttagaagactggaagagaggagaagagaagaggaagaaaggcggaagcaggaagaattgttacgcaaacaggaagaggaggctgcaaaatgggcccgggaagaagaagaagcccagcgtcgattagaggagaaccggctgcggatggaagaggaggcagccagactccggcatgaggaagaagaacggaagagaaaggagctggaggtccagcggcagaaggagttaatgcgccagaggcaacagcagcaagaggctctccggaggttgcagcagcagcagcagcaacaacagctggcgcagatgaagcttccttcttcttcaacgtggggccagcagtccaatacaacagcatgtcagtcccaggccacgctgtcgttggctgaaatccaaaaactagaggaagaacgagaacggcagcttcgagaagagcaaaggcgccagcagagggagttgatgaaagctcttcagcagcagcagcaacagcaacagcagaaactctcaggttgggggaatgtcagcaaaccttcaggtaccacgaaatctcttctggagatccagcaggaagaggccaggcaaatgcaaaagcagcagcagcagcagcagcaacaccagcaaccaaacagagctcgtaacaatacgcattccaacctgcacaccagcattgggaattctgtttggggctctataaatactggtcctcctaaccagtgggcatctgacctagtcagtagtatttggagtaatgctgacactaaaaactccaacatgggattctgggatgatgcagtgaaagaggtgggacctaggaattcaacaaataaaaataaaaacaacgccagtctcagtaaatctgtaggtgtgtctaaccggcagaataagaaagtagaagaagaagaaaagttgctgaagctctttcagggagtaaataaagcccaagatggatttacgcagtggtgtgaacagatgcttcatgcccttaatacggcaaataacttggatgttcccacatttgtttctttcctgaaagaagtagaatctccttatgaggtccatgattatatcagggcctatttaggagatacttctgaggccaaggagtttgccaagcagttccttgagcgccgtgccaaacagaaagccaaccagcagcgtcagcagcagcagctgccacagcagcagcagcagcagccgccacagcagccgccacagcagccacaacagcaggactctgtgtgggggatgaaccacagtacactccattcagtatttcagaccaatcaaagcaacaaccaacaatccaattttgaggctgtgcagagtggcaagaagaagaaaaagcagaagatggtccgagcagatcccagtttattaggattttcagtcaatgcatcatcggagcgactcaacatgggtgaaatcgagacgttggatgactactgagcacctgccagtggactggccatccctctcctgtctgccgactatggagtctccacctttggacacaacacttactcaccatttactctttatcactctgcaacaaatcacagaaccgatcatctcaggctttttcttctggccctttgtgtccaagattctttaatccatttttgttggtgaacatctcagactatagataagtggactggaccctgtgtcttgggggtggcagttgggattactccccaacaaggctgattttaggcagcatgtgttcactgtgctgtgatttcatctactgtctcccagaaagtgtgttgggatcggccattagcagcttgctttctcttgtcactttttttcttctattttgttttttcttcttctttttccccccatcagggcaaatggtctaactggtgcaatcatgaagagagttaatggttaacagacattggccaataacaaaacaccccatggactgtgactcgagtatccaacaggcagtcagagctctcccggtctgaaagttgcattgccactgctaactttgggattgcatcagagaggccctgagtggggttgagatgaggttggtttggtttgatgttacacactcctcacctgttctttctgagtgtcctttctctgaaaggatttatgtttttcttcgttagatagtgacttctgagcaagctgatctcccctggcatgctccaacctgattggacaaaggaagctctatggcctgggagagagactattcttaatttttctttcttacaaaaactgatttttcccataaatatttttacttcagaggactaggaccattttgttttgggcccttctgctgaaaatttgtctcgtttaagaggcagctagaatctttaccatatgtatgaatttgtataatttcatttttggatagggataaacttttgcttctgataaaagcctggaatttcatctggtcctcagagcattgcgtgtgtgtcttgctgtagcccggaaaaggttttgtgtaaagattctgggatggcaagttgtttgccttttctgaaaagagaacatacagaacctgtccatctttaagaccttcatccatggaatctactatacaggaggatgcagtgggctggaggggatgggcgaaaatgggagcaggaagcctggcctggcttctggtcatggcctcctaaaaccttaaacttcaagtagaaatgtactcaagccctatttataaacaaatacttttcctgcctccaccaaacccctacagaacatcacctggaattgccactcacactgggttggagtcattgggcagctgtgcctgtgcgagaggtgctgtggtctgggcagcccctggaaaagcacctttgctgcctgtcattgttgcctgaagaaggctggagttgctctgagagcagtttgggtttggagtattatatttggcttctatttttattattttggatcaccattctccctatcccttcttgcctccctcccttctaaacatgtgtaataactatacagagactgctacaaaattgtatatagtttttggatcaaatagcatgaggggagaggaaaccattaaaagttggggctcctactctcctttgctttgtaaattcaaaagttgggggtgggtaagagggatagttaaaatgtttacaaaactttaggctccctcggaacttttgccagtgtggaggaaaataaaaaagaacttaaat

SEQ ID NO: 24915 - DNA, 5567 bp, Homo Sapiens
gcttgcgcgttagagatcgctgtccgctcttcctattggttcgtttttaggagctcggggaatacgaaatatccagccaataggagcagagatgccggaaccgggcttgtgtgcctctgctgaggtgatctggcgcagagcggaggaggtgcttggcgcttctcaggctcctcctctccccttgcggcctttctaacgttggccctgctcttgtggcctcccgcagaatgtggatgacgcccaaaagaagcaagatggaagtcgacgaggctctagttttccggcccgagtggacccagcgttatttggtggtggagcctccggagggcgatggggccctgtgcctggtctgtcgccgcctcatcgtagctacccgcgaacgcgacgtcaggcgccactacgaggctgagcacgaatactacgagcggtatgtggcggacggcgagcgcgcggccctggtggagcgtctgcgtcagggcgacttgcccgtggcctccttcactcctgaagagagagctgctcgtgcaggcctcgggctctgccgcctcttggccttgaagggtcgcggctggggtgagggggactttgtataccagtgcatggaggtgttgctgagagaggtactgcccgagcatgtaagcgtcctgcaaggcgttgacttatctccagatatcacaaggcagaggatcctgagcattgacaggaatctacgcaaccagctttttaaccgagccagggactttaaagcctattctcttgccttggacgaccaggcttttgtggcctatgagaactacctcctggtctttatccgcggtgtaggccctgagttggaggtgcaagaagatcttctgaccataatcaacctgactcatcatttcagtgttggtgcgctcatgtcggcaatcctagagtccctgcagacagcagggcttagcttgcagagaatggttggactgaccacgacccatactttgaggatgattggtgagaactcaggactcgtctcatacatgagagaaaaggccgtaagccccaactgttggaatgtcattcattattcaggatttcttcacttggaactgttgagctcctatgatgtagatgttaatcagatcataaataccatatccgaatggatagttttgattaagaccagaggcgttaggcgacctgaatttcagactttactaacggaatctgaatcagagcatggtgaaagggttaatggacgatgtctgaacaattggcttaggagagggaaaactttaaaactaatattctctctaagaaaagaaatggaagcgttcttggtttcagtaggggcaacaacagtccacttctcagacaaacaatggctttgtgactttggcttcttggtggacattatggaacaccttcgagaactcagtgaagaattacgagttagtaaagtctttgctgctgctgcctttgaccatatttgtactttcgaagttaagctgaatttatttcaaagacatattgaggaaaaaaatctaacagactttcctgccctcagagaagttgttgatgagctaaaacagcaaaataaggaagatgaaaaaatatttgatcctgataggtatcaaatggtgatctgtcgtctccaaaaagaatttgagagacattttaaggacctcaggttcattaaaaaggacttagaacttttttcaaatccatttaactttaaacctgaatatgcacctatttcagtgagggtggagctaacaaaacttcaggcaaacactaatctttggaatgaatacagaatcaaagacttggggcagttttatgctggattgtctgctgaatcctacccaattatcaaaggggttgcctgtaaggtggcatccttgtttgatagtaaccaaatctgtgaaaaggctttttcatatttgactcgaaaccaacacactttgagtcagccattaacagatgagcatctccaagccctgtttcgggttgccacaactgaaatggagcccggttgggatgaccttgtgagagaaagaaatgaatctaatccataaggctttgtagtacaagattgaaaaactcaacaagaatttaattctaaaagcaaaaattggtttgagttttcaagtttactaatttggattgtgagaaagtaccaagtaccagccgtccaaactgatcacaattaaaattctgacagttgccttttttttcatctcaaatggcagcatgggactgaaacatgagaatgccaccttttttaaaacttagtttagtgacaaagtcattgtcttttatgatatagttaattttaaagagatttagtattaatgtgagttgaatttgcagtctgttttttaggtgttctgaagataaatgccaaaaatttcagctcttattttaatggagtgttaaaattctgattcatatagtcttaaattatcaactccttaaatgtgcttttgaaccaatttgcagaagctcacatagcaagttcataagtttccaaaaaggaagcccatacataacagtggaggtgttttgtctaaccatcaaaatgtttgagacttttttttaaacatttctgagttcgaaggtaatactgacagatttcttccctcttccctccccatcacccacctcagtgataacacattactgatagaggaagtcattagaatcatttttaagtttcagatataggagacttcatgcaatttggagataagactaattattgggggttttccttggattttttttttaataactgggggctattttatcagcttgcctattaaaggactatggtaagtatagaatcttaatggttgccagttagtaattctttttttttttttttttactgtagacacaagtttggccctatcaaaaacgatgaggaaaaaagattgcactccaggattaggaggtgtgagatattttagcttttttgtcttatctgcgtgggtattgctgctttattttaaaaaatcctgcctaaagtaaacactttgttttaaaatgatacagtatcagattttgttagatgctagaaatggatttattctaaaatttggaactgtcgtacacattctatatgtaagatagcacacaagtagaaatatttaaaagcagtcttattcacagattgcagtaattctgtatttctactaagataatctgctttgtgccaaaacagtaatttccaaacttctgttcaccatgaaaaggcaatcttaaagttcattatgtaaaactaattataaacaggacccaatttatattcatagatcctctcaagtattatacaatttaaaaactcttgttccaaagtcctgtcttaactattgaaacaccttaatctgtggttactaatccagcaaattcaaggaaccaggctatgactaagaatttaggtggaattgatgtctgggcaattaaaataaatggcataagagcttaaaaaccaaagttgtgccagtggctttcaactagaggcagtaacctgtcattccagaggatgctgagaaatgtgtaggggcacttttttggttgtcatatttactaggggcttctgttggcatttaagcctaaagacactcacccctgcagtgcatgggacagcctggcacaatgaagaattagccctcccaaaatgtagattattttatttcaagggatagggcagattaccattagaagcaaaattaaaagtacaagctgggcaaactgacagaatactagataggagagactaattccaaccttctaaatttggctagtaaagtgcaataaaggcattgataagttctgttagctcaccatagcacttgtaaatcaggaattaataattgaatcagatttaagggctctgtcctgttatacatatttaaggcagaaaaaaagttacatgtcgattaggtacttatcaagaatggtcaagctgagattttggttaatagagtaagcttacatatctagagaaacaacatagtggaaaaccgaaaaaaaaaaacagaaaaatctaccggtaatttcccaatagctttgaatattcacagcagagctttattacttgagagaaagactggaagacctgaaagccacttctgctttctaaccccagttccttaaatattgaaatcttgtacattttgtgaaattccagtatgttttgcttaaggtgttaataaaattagtttgcatcatgtagtcattgagtgagggggagatataagccaaggattttaaattgacccttagctatagagaatttgctataagctagtcttgtttgtaaaaaaaaaaaaaaaaaaagaaaaagaaaaaagtgtattttactgttttctgtattaagtaattctgtaactgcatggcagtctttttttttttaaataaatatagttgttactggtcctgttgtagcagtgaatatagttaaaatacgtacattaaaaaaaaaattattaggtccttaccagttactgtcctatagctcattcctactagttttcttgacagatttgtattcccagtgtcccgtattgccactcaaattgctctactatgctaagtccttgttaatagtcttaccctccttgaaacacttgaacacttgatgactttagctttgaggagataccatctccaggtgtgctttcttagtctttgcaggcacctcttcccttcaatatctgttcttcgtatttttaaaaaaatttgttttagactgccttgttctgtgtcagctcgctagctgatctcatttccttccatggtttccttaccatttatatgcaaatgactgtcagattcatatctcctttctagatcttccctaattgatgtatctaattgctaacaaatgctctttgctgtctcaggcactacatgtcattgatcttgcccccaatcctgctcctcctctcatgtttcctctttgactaaatggcattaccactaccaaccattcatttgtcctttttaccaattctccaatgctgccattttaattcaggccatcaacctacctaaattatagcaacagcctccttattagtctccctgttttttatttttattcctttctacactacaaccaaattgctccaaaagacttactgatcatgtcactgcattgctttcaccattgctcttagggtacaatacaaatttatcttcatctttaaggtctcagtatgccacttcatctaggaaaccttcattgatgccctctagattaggtgcccttactatccattccctatacaccctgttctttcccagacatacacttggcacactttattgttactgcttattgatcactgctagactgtaagctttgtaagggcagggaccatataagccttgttcactgttatatctctagtgcttagcacaatgcctggcatttcaataaatgtttggacaaacgaatatttgtgtagtgttttacaatttttgaagctctttcacagtcttatttgaccttcacagtcattctgccttagactgtccattgggtaacttttatccacatattactaattgaaaaatgaagacaa

SEQ ID NO: 24916 - DNA, 2817 bp, Homo Sapiens
cgtgggagcagtggggttcgacggcgcggccgcgaggccgccatggccgctcacgggaagctgcggcgggagcgggggctgcaggctgagtatgagacgcaagtcaaagagatgcgctggcagctgagcgagcagctgcgctgcctggagctgcagggcgagctgcggcgggagttgctgcaggagctggcagagttcatgcggcgccgcgctgaggtggagctggaatactcccggggcctggaaaagctggccgagcgcttctccagccgtggaggccgcctggggagcagccgggagcaccaaagcttccggaaggagccgtccctcctgtcgcccttgcactgctgggcggtgctgctgcagcacacgcggcagcagagccgggagagcgcggccctgagtgaggtgctggccgggcccctggcccagcgcctgagtcacattgcagaggacgtggggcgcctggtcaagaagagcagggatctggagcagcagctgcaggatgagctcctggaggtggtctcagagctccagacggccaagaagacgtaccaggcatatcacatggagagcgtgaatgccgaggccaagctccgggaggccgagcggcaggaggagaagcgggcaggccggagtgtccccaccaccaccgctggtgccactgaggcagggcccctccgcaagagctccctcaagaagggagggaggctggtggagaagcggcaggccaagttcatggagcacaaactcaagtgcacaaaggcgcgcaacgagtacctgcttagcctggctagtgtcaacgctgctgtcagtaactactacctgcatgacgtcttggacctcatggactgctgtgacacagggttccacctggccctggggcaggtgctccggagctacacggccgctgagagccgcacccaagcctcccaagtgcagggcctgggcagcctggaagaagctgtggaggccctggatcctccaggggacaaagccaaggttctcgaggtgcatgctaccgtcttctgtcccccgctgcgctttgactaccacccccatgatggggatgaggtggctgagatctgcgttgaaatggagctgcgggacgagattctgcccagagcccagaacatccagagccgcctggaccgacagaccattgagacagaggaggtgaacaagactctgaaggcgacactgcaggccctgctggaggtggtggcctcggatgacggggatgtgcttgattccttccagaccagcccctccaccgagtccctcaagtccaccagctcagacccaggcagccggcaggcgggccggaggcgcggccagcagcaggagaccgaaaccttctacctcacgaagctccaggagtatctgagtggacggagcatcctcgccaagctgcaggccaagcacgagaagctgcaggaggcccttcagcgaggtgacaaggaggagcaggaggtgtcttggacccagtacacacagagaaaattccagaagagccgccagccccgccccagctcccagtataaccagagactctttgggggagacatggagaagtttatccagagctcaggccagcctgtgcccctggtggtggagagctgcattcgcttcatcaacctcaatggggaggacccactggtggagggctgcactgcccatgacctggactcggtggccggggtgctgaagctctacttccggagcctggagcccccactcttccccccagacctgttcggcgagctgctggcttcttcggggacgcccagctggagagcctgggggcggacaatgagccggagctggaagccgagatgcccgcacaggaggatgacctggagggggtcgtggaggctgtggcctgctttgcctacacgggccgcacagcccaggagctgagcttccggcggggggacgtactgcggctgcacgagagggcctcgagcgactggtggcggggggagcacaacggcatgcggggcctcatcccccacaagtatatcacgctgcccgccgggacggagaagcaggtggtgggcgcagggctgcagactgcaggggagtctgggagcagtcccgagggcctcctggcatcggagctggtccaccggccagagccatgcacctcacctgaggccatgggaccctctggacacagacgacgctgcttggtcccagcctccccagagcaacacgtggaggtggataaggctgtggcacagaacatggactctgtgtttaaggagctcttgggaaagacctctgtccgccagggccttgggccagcatctaccacctctcccagtcctgggccccgaagcccaaaggccccgcccagcagccgcctgggcaggaacaaaggcttctcccggggccctggggccccagccttaccctcagcttcccacccccagggcctagacacgacccccaagccacactgaggtgccgctgctggagatgcgtgcccccggcggctacccgctggaccggccactctccccagcccccttgcttctctccagccctgtccagcaagtgcagggtgcctgcacttcaccctgtgcagagaggtgggatggggccgtgcacacagggatgcccgctccacatcctgcctgcccctcagccctggcccaggccccttttggaggcagctgaggaaggatgctggggaaagccctcttctgcagctttgtggaaggctgatcagtggctgctgggtggcgggtacccttgctcagatgcctggcagggctgggtggcgattcataaagacctcgtgttgattccccg

SEQ ID NO: 24917 - DNA, 10637 bp, Homo Sapiens
tgttctcacgagggggccagcttggggcttgactgagcaggagcttccatggtcccacacgtagtatgacatgtgacctctgcacattgtttacagttcctaaactgtgatttctttttctgtgaaatagttataatagtaagtggctaccaagtagaaagtggtcatggggggtgaaggttaaacacaataacggacacacagaacttacacagggcattttatgccaagctatattgaatatctatatccctctacctgcccgtcaatgtcatgaatattgacaattcactctagaccctgctagaagaatccaaagaaattgacagtgagctggaagcaatgactgagaaattacagtacctcactagcgtgtactgtacagaaaaaatgtctcagcaagtggcagaactgggacgggagactgaggagttgcgacagatgatcaaaattcgtttgcagaacctccaagatgcagctaaggatatgaaaaaatttgaagcagagttgaaaaagttacaagctgccttggagcaagcccaggcaacactgacttctccagaagttggacgtctcagtctcaaggagcagctctctcatcggcagcatttgttgtctgagatggagtcactgaagccgaaggtgcaagcagtgcagctctgccagagtgccctccggatccccgaggatgtggttgccagcttacctctctgtcatgctgctctgcggctgcaggaagaggccagccggctgcagcacaccgccatccagcagtgtaacatcatgcaggaagctgtggtacaatatgaacaatatgagcaagaaatgaaacatctccagcaactgatagaaggagctcacagagagattgaggataaacctgttgccaccagtaacatacaggagctgcaggctcagatttctcggcatgaggagctggcgcagaaaattaagggctaccaggagcagatcgcttctttgaattccaagtgcaagatgctgacgatgaaagccaagcacgccaccatgctgctgacggtgaccgaggtcgaggggctggcggaagggacagaggacctggatggggagctcctccccacgccttcggcccacccctctgtggtcatgatgactgcaggtcgctgtcacactttgctgtcaccggtcactgaggagtctggggaggagggaaccaacagtgagatttcctctccacctgcctgtcgctccccttcacctgtggctaatacagatgcttctgttaaccaggacattgcatattaccaagccttgtctgctgagaggttgcagacagatgctgcaaaaattcaccccagcacatccgcatcccaggagttctatgaaccgggattggagccatccgctactgccaaactgggtgatttgcagcgttcttgggaaaccttaaagaatgtgatcagtgagaagcagcgcacactctatgaagctttggagcgccagcagaagtaccaggactccctccagtccatctctacgaagatggaggccattgagctgaaactcagtgagagcccagagcctggcaggagtccagaaagccagatggctgaacatcaggcattgatggatgagattctcatgctccaggatgaaatcaatgagctccagtcctctctcgcagaggagctggtatccgagtcttgtgaggccgaccctgcggagcagctggccttgcagtccacgctcactgtcttagccgagcgaatgtccaccatcaggatgaaagcctcggggaaacggcagcttttggaggagaagttgaatgatcagctggaggaacaaaggcaggaacaggccctgcagaggtatcgctgtgaagccgatgagctggacagctggctcttgagtaccaaggccactctggacactgcgctgagtccacccaaggagcccatggacatggaggcccagcttatggactgccagaatatgctggtggaaatagagcagaaggtggtggctttatcagaactgtcagtccacaatgagaacctgctgctggagggcaaagctcacaccaaggacgaggccgagcagctggctggaaagctgagaaggctcaaggggagcctgctggagctgcagagagccctgcatgataagcagctcaacatgcagggaacagcacaggagaaggaggagagcgatgttgacctaacagccacgcagagccccggcgtccaggaatggctggcccaagctcgcaccacatggacccagcagcggcagagcagtctccagcaacaaaaagagttagaacaggaattagccgagcagaagagtctccttcgctcagtagccagtcgtggagaggagattctaattcaacattcggcggcagagacctctggtgatgctggcgaaaaacctgatgtgttatcccaggagttggggatggaaggggagaaatcatccgctgaagaccagatgagaatgaaatgggaaagcctacatcaagaatttagtaccaagcagaaactactacagaatgttctggaacaggaacaagagcaagtgctttatagcaggccaaatcgactcttgtctggtgtgccactgtacaaaggggacgtgccaacccaagataaatctgcagttacatctttgctggatggactgaaccaagccttcgaggaggtttcatcccagagtggaggggcaaagaggcagagtatacacttggagcagaagttgtatgatggagtctcagccacctctacttggttggatgacgttgaagaacgtttatttgttgccacagcacttttaccagaagaaacagagacttgtctcttcaaccaagagattcttgccaaagacattaaggaaatgtctgaagaaatggataagaacaaaaacttgttttcccaagcttttccagagaatggtgataatcgagatgttattgaagatactttgggttgtcttttgggcaggttatccttgctagactcagtagtgaatcaacgatgtcatcagatgaaagaaagacttcagcaaatactaaatttccagaatgatctgaaagtgctgtttacatcactggctgacaacaaatacatcattctgcaaaaactggcaaatgtgtttgaacagcccgtagcagaacaaatagaggcaatacaacaggctgaagatggactcaaagaatttgatgcaggaatcattgaattaaagaggcgtggtgacgagctacaggtcgagcagccgtccatgcaagaactctccaagctccaggacatgtatgatgagctgatgatgatcattggctcccggaggagtggtctgaatcagaaccttacactcaagagtcagtatgagagggccctacaagatctggctgacctgctagaaactggtcaggagaagatggcaggagaccagaaaatcatcgtgtcttccaaagaggaaatccagcaaccacttgacaaacataaggaatactttcagggcctggaatctcatatgatcttgactgtaacactcttcagaaagataatcagctttgcagtccaaaaggaaacccagttccatacagagctgatggctcaggcttctgctgtactgaaacgggctcacaagaggggtgtggagctggagtacattctagagacgtggtcccatctggatgaggaccagcaggagctcagcagacagctggaggtggtggaaagcagcatcccaagcgtgggtctggtggaggagaacgaggacaggcttattgaccgcataacactctaccagcatttaaaatctagccttaatgaataccagcccaaattatatcaagtattagatgatgggaaacgacttctgatatccatcagctgctcagatctagaaagccaactaaatcaacttggagagtgctggctaagtaacaccaataaaatgtctaaggaacttcacagactggaaacaatattgaaacactggaccagatatcaaagtgaatctgcagatctaattcactggttacaatctgcaaaagaccggctagaattttggactcagcaatctgtgacagtcccacaagagctggaaatggtccgtgatcatctaaatgctttcctggagttttctaaagaagtggatgcccaatcttccctgaaatcatctgttctgagtactggaaatcagctccttcgactaaaaaaggtggacacagccacgctgcgctctgagttgtcgcgcattgatagccagtggactgacctgctaaccaatatcccagccgtccaggagaagctccaccagctccagatggataaactgccttcccgccatgccatttctgaagtcatgagttggacttctctaatggaaaatgctattcagaaggatgaagataatattaaaaattccataggttacaaggcaattcatgaataccttcagaaatataagggttttaagatagacattaactgtaaacagctgacagtggattttgtgaaccagtccgtgctacaaatcagcagtcaggatgtggaaagtaagcgtagtgataagactgattttgctgagcaacttggagcaatgaataaaagttggcaaattctgcaaggtctagtaactgagaagatccagctgttggaaggcttattggaatcttggtcagaatatgaaaataatgtacaatgtctgaaaacatggtttgaaacccaggaaaagagactaaaacaacagcatcgaattggagatcaggcttctgttcaaaatgcactgaaagactgtcaggatctggaagatctgattaaagcaaaagataaagaagtagagaaaattgagcagaatggacttgctttgattcagaccaagaaagaagacgtctctagcattgtcatgagcacactgcgagagctcggccaaacctgggcaaatttagatcacatggttggacaattaaagatactgctgaaatcagtgcttgaccaatggagtagtcacaaagtggcctttgacaagataaacagttacctcatggaggccagatactctctttcccgattccgtctgctgactggctccttagaagctgtgcaagttcaggtggacaatcttcagaatctccaagatgatctggaaaaacaggaaaggagcttacagaaatttggctctatcaccaaccaattattaaaagagtgtcacccacccgtgacagaaactcttaccaatacactgaaagaagtcaacatgagatggaataacttgctggaagagattgctgagcagctacagtccagcaaggccctacttcagctttggcaaagatacaaggactactccaaacagtgtgcttcgacagttcagcagcaggaggatcgaaccaatgagctgttgaaggcagccacaaacaaggacattgccgatgatgaggttgccacatggattcaagattgcaacgacctcctcaaaggactgggcacagttaaagattccctctttgttctccatgagctgggagagcaactgaagcaacaagtggatgcttccgcagcatcagctattcaatcggatcaactctctttgagtcaacacttgtgtgccctggagcaagctctctgcaaacagcagacttcattacaggctggagttcttgattatgaaacctttgccaagagtttagaagctttggaggcctggatagtggaagctgaagaaatactacaagggcaggaccctagccactcatctgacctctccacaatccaggaaaggatggaagaacttaagggacagatgttaaaattcagcagcatggctccagatttagaccgtctaaatgagcttggatataggttacccttgaatgataaggaaatcaaaagaatgcagaatctgaaccgccattggtctctgatctcctctcagactacagaaagattcagcaagttgcagtcatttttgctacaacatcagactttcttggaaaaatgtgaaacatggatggaattcctagttcagacagaacaaaagttagcagtagagatttcaggaaattatcagcaccttttggaacagcagagagcacacgagttgtttcaagccgagatgttcagtcgtcagcagattttgcactcaatcattattgatgggcaacgtcttctagaacaaggtcaagttgatgacagggatgaattcaacctgaaattgacactcctcagtaatcaatggcagggagtgattcgcagggcccagcagaggcgggggatcattgacagccagattcgccagtggcagcgctatagggagatggcagaaaagcttcgtaaatggttggttgaagtgtcctacctccccatgagtggtctcggaagtgttcctataccactgcaacaagcaaggaccctctttgatgaagtgcagttcaaagaaaaagtgtttctgcggcaacaaggcagctacatcctgactgtggaggctggcaagcaactccttctctcggcggacagtggcgctgaggccgccttgcaggccgaactcgctgaaatccaagagaaatggaaatcagccagcatgcggctggaagaacagaagaaaaaactagccttcttgttgaaagactgggaaaaatgtgagaaaggaatagcagattccctggagaaactacgaactttcaaaaagaagctttcgcagtctctcccggatcaccatgaagagctccatgcagaacaaatgcgttgcaaggaattagaaaatgcagttgggagctggacagatgacttgacccagttgagcctgctgaaggacaccctctctgcctatatcagtgctgatgatatctccattcttaatgaacgcgtagagcttctgcaaaggcagtgggaagaactatgccaccagctctccttaaggcggcagcaaataggtgaaagattgaatgaatgggcagtcttcagtgaaaagaacaaggaactctgtgagtggttgactcaaatggaaagcaaagtttctcagaatggagacattctcattgaagaaatgatagagaagctcaagaaggattatcaagaggaaattgctattgctcaagagaacaaaatacagctccaacaaatgggagaacgacttgctaaagccagccatgaaagcaaagcatctgagattgaatacaagctgggaaaggtcaacgaccggtggcagcatctcctggacctcattgcagccagggtgaagaagctgaaggagaccctggtagccgtgcagcagcttgataagaacatgagcagcctgaggacctggctcgctcacatcgagtcagagctggccaagccaatagtctacgattcctgtaactcggaagaaatacagagaaagcttaatgagcagcaggagcttcagagagacatagagaagcacagtacaggtgttgcatctgtcctcaacctgtgtgaagtcctgctgcacgactgtgacgcctgtgccactgatgccgagtgtgactctatacagcaggctacgagaaacctggaccggcggtggagaaacatttgtgctatgtccatggaaaggaggctgaaaatcgaagagacgtggcgattgtggcagaaatttctggatgactattcacgttttgaagattggctgaagtcttcagaaaggacagctgcttttcccagctcttctggggtgatctatacagttgccaaggaagaactaaagaaatttgaggctttccagcgacaggtccacgagtgcctgacgcagctggaactgatcaacaagcagtaccgccgcctggccagggagaaccgcactgattcagcatgtagcctcaaacagatggttcacgaaggcaaccagagatgggacaacctgcaaaagcgtgtcacctccatcttgcgcagactcaagcattttattggccagcgtgaggagtttgagactgcgcgggacagcattctggtctggctcacagagatggatctgcagctcactaatattgaacatttttctgagtgtgatgttcaagctaaaataaagcaactcaaggccttccagcaggaaatttcactgaaccacaataagattgagcagataattgcccaaggagaacagctgatagaaaagagtgagcccttggatgcagcgatcatcgaggaggaactagatgagctccgacggtactgccaggaggtcttcgggcgtgtggaaagataccataagaaactgatccgcctgcctctcccagacgatgagcacgacctctcagacagggagctggagctggaagactctgcagctctgtcggacctgcactggcacgaccgctctgcagacagcctgctttctccacagccttcctccaatctctccctctcgctcgctcagcccctccggagcgagcggtcaggacgagacaccccagctagtgtggactccatccccctggagtgggatcacgactatgacctcagtcgggacctggagtctgcaatgtccagagctctgccctctgaggatgaagaaggtcaggatgacaaagatttctacctccggggagctgttgccttatcaggggaccacagtgccctagagtcacagatccgacaactgggcaaagccctggatgatagccgctttcagatacagcaaaccgaaaatatcattcgcagcaaaactcccacggggccggagctagacaccagctacaaaggctacatgaaactgctgggcgaatgcagtagcagtatagactccgtgaagagactggagcacaaactgaaggaggaagaggagagccttcctggctttgttaacctgcatagtaccgaaacccaaacggctggtgtgattgaccgatgggagcttctccaggcccaggcattgagcaaggagttgaggatgaagcagaacctccagaagtggcagcagtttaactcagacttgaacagcatctgggcctggctgggggacacggaggaggagttggaacagctccagcgtctggaactcagcactgacatccagaccatcgagctccagatcaaaaagctcaaggagctccagaaagctgtggaccaccgcaaagccatcatcctctccatcaatctctgcagccctgagttcacccaggctgacagcaaggagagccgggacctgcaggatcgcttgtcgcagatgaatgggcgctgggaccgagtgtgctctctgctggaggagtggcggggcctgctgcaggatgccctgatgcagtgccagggtttccatgaaatgagccatggtttgcttcttatgctggagaacattgacagaaggaaaaatgaaattgtccctattgattctaaccttgatgcagagatacttcaggaccatcacaaacagcttatgcaaataaagcatgagctgttggaatcccaactcagagtagcctctttgcaagacatgtcttgccaactactggtgaatgctgaaggaacagactgtttagaagccaaagaaaaagtccatgttattggaaatcggctcaaacttctcttgaaggaggtcagtcgtcatatcaaggaactggagaagttattagacgtgtcaagtagtcagcaggatttgtcttcctggtcttctgctgatgaactggacacctcagggtctgtgagtcccacatcaggaaggagcaccccaaacagacagaaaacgccacgaggcaagtgtagtctctcacagcctggaccctctgtcagcagtccacatagcaggtccacaaaaggtggctccgattcctccctttctgagccagggccaggtcggtccggccgcggcttcctgttcagagtcctccgagcagctcttccccttcagcttctcctgctcctcctcatcgggcttgcctgccttgtaccaatgtcagaggaagactacagctgtgccctctccaacaactttgcccggtcattccaccccatgctcagatacacgaatggccctcctccactctgaactaagcagatgccatctgcagaagtgctggtagcataaggaggatcgggtcataagcaatcccaaactaccaacaagaggaccttgatcttggcgaaagccctcggtgtggcagctttagccctcctccagatcacatgtgtgcaaattatggcttcagaggtggaagataaacagtgacgggggaacaaacagacaacaagaaggtttggaagaaatctggtttgagactctgaaccttagcactaaggagattgagtaaggacctccaaagttccccggactcatgaattctgggcccttggcccattctgtgcacagccaaggacttcagtagaccatctgggcagctttcccatggtgctgctccaaccatcagataaatgaccctcccaagcaccatgtcagtgtcgtacaatctaccaaccaaccagtgctgaagagattttagaaccttgtaacatacaatttttaagagcttatatggcagcttcctttttaccttgttttcctttggggcatgatgttttaacctttgctttagaagcacaagctgtaaatctaaaaggcacttttttttagaggtataaagaaaaactagatgtaataaataagatcatggaaggctttatgtgaaaaaagttgaatgttatagt

SEQ ID NO: 24918 - DNA, 5258 bp, Homo Sapiens
atgaacaaggtagaacagaagtcccaggagtcagtatcatttaaagatgtgactgtgggcttcacccaggaggagtggcagcacctggaccctagtcagagggctctgtatagagatgtgatgctggagaactacagcaaccttgtctcagtggggtattgtgttcacaaaccagaggtgatcttcaggctgcaacaaggagaagagccatggaaacaggaggaagaattcccaagccaaagctttccagtctggacagctgatcacctgaaagagaggagccaagaaaaccaatctaaacatttgtgggaagttgtattcatcaataatgaaatgctgactaaggaacaaggtgatgtaataggaataccatttaatgtggatgtaagttcttttccttccagaaaaatgttctgtcagtgtgattcatgtggaatgagtttcaacactgtttcagaattggttatcagtaagataaactatttaggaaaaaagtctgatgaatttaatgcctgtgggaaattgttactcaatattaagcatgatgaaactcatactcaagagaaaaatgaagttttgaaaaataggaacacactgagtcatcatgaggagactttgcagcatgagaagattcaaactttagagcacaattttgaatacagtatatgtcaggaaaccctccttgaaaaggcagtattcaatacacagaagagagagaacgcagaagagaataactgtgattataatgaatttgggagaactttgtgtgatagttcatccctcttgttccatcagatatctccgtcaagggacaatcactatgaatttagtgattgtgagaagttcttatgtgtgaagtccaccctttctaaacctcatggggtatctatgaaacactatgattgtggtgaaagtgggaataatttcaggaggaaattgtgtctgtcacaccttcagaaaggtgataaaggagagaaacactttgaatgtaatgaatgtgggaaagctttctgggagaagtcacatctcactcgacatcagagggtgcacacaggacagaaaccctttcaatgtaatgaatgtgaaaaagctttctgggataagtcaaacctcactaaacatcaaagatcacacacaggggagaaaccttttgaatgcaatgaatgtgggaaagcctttagccataagtcagccctcacattacaccagagaacacatacaggggagaaaccctatcaatgtaatgcgtgtgggaaaactttttgccagaaatctgacctcactaaacatcagagaacacacacagggctgaaaccctatgaatgttatgaatgtggaaaatccttccgtgtgacttcgcaccttaaagtacaccagagaactcacacaggtgagaaaccttttgaatgtcttgagtgtgggaaatcctttagtgaaaagtcaaatcttacacagcatcagagaattcacataggagataaatcttatgaatgtaatgcatgtgggaaaactttctaccacaagtcattactcaccaggcatcagataattcatacagggtggaaaccttatgaatgttatgaatgtgggaaaaccttctgcttgaagtcagacctcacagtacatcagagaacacacacagggcagaaaccctttgcatgtcccgaatgtgggaaattctttagccataagtcaaccctctctcaacattatagaacacacacaggggagaaaccctacgaatgtcatgaatgtggaaaaatcttttacaataaatcatacctaactaaacataatagaacacatacaggggagaaaccctatgaatgtaatgaatgtggaaaagccttctaccagaagtcacaactcactcagcatcagagaattcacataggggagaaaccctataaatgtaatgagtgtggaaaagctttctgccataagtcagctctaattgtacatcagagaacccatacacaagaaaagccctataaatgtaatgaatgtggaaaatctttctgtgtaaaatcaggacttattttccatgagagaaagcacacgggggagaaaccctatgaatgcaatgaatgtgggaaattcttcaggcacaaatcatcactcacagtacatcacagggctcacacaggagagaaatcttgtcaatgtaatgaatgtggaaaaatcttttaccgtaaatcggaacttgctcaacatcagagatcacatacaggggaaaagccctatgaatgtaacacatgcaggaaaactttctctcaaaagtcaaatctcattgtacatcagagaagacatataggagaaaaccttatgaatgaaatggatattagaaatttccagccacaagtcagcctccataatgcctcagagtattcacactgtggagaaagccctgatgacatcctgaatgttcagtaactatccacaaactcaccttatgttactccaaagtaatagtaggggataaacccatagactacaacaattataggacagcttttgttaggaagtgatattctatgtaatatcagatggttaatacgggcataacaccttacagattttttttgaatttgtgaaagtttttggcaaaaatgcaaataaggttatgttagaatttacactgaggagaaaattgtcaatttaagaaatctaaagtgaaaattttgcttagaaataaaatacgacaagttatgttttgagtttgatgccataatagtttttagggcacctaacaataatttatagatgtatattgtggaatgtaaagctttaagaacttaaacaaaggtaataattaaaataacctcacaagaagtttaatgagtagagagaattcccatgtacacttcaccaaacttcctctaaggataatgtataatcatagtatatggtcaagtccaagaaatcgatgttaccttgctggtagatagagacttagtcagattttactatggtttgcatgcactctgtgtgtgtgtgtacgtgtatgtgtgtgtgtgtggttatatcaaacttttacgacttttacatttgagtaaccatcaacacgattagtttacagaactgaaaaggaatctgagatctgtactgtatcaggattacaaaggatttagcctcaagtagttccctttttgtattaataaccacacgctttctgcaaccctatcccttgcatccacttgactatgaagtttttttaaagcacagataaattgaataatcagggcaatagcattaagcacatctgcgaattatccctgaagttcaaaagacttatatatgtataagtggtatgtgatataaatcgtgtgtttcatatgcataatggaatttaacgtaattgtgaataggaagtaggtatcctagtttagtagtggttacattatcaggcccatcccagatgtttgtgatgtcctgaaacaatttaaaaggagacccacagagctaatgtttatccatttaaaaggtataaatcaaaataacaaattatctaaaaaaaatctatcctgtacatgtgaagatctaggctcgcctccatgttactccctttctcttcctacctgtggctcatgccatgccatgaagtgcctagggtacatatgtgaacattccagccttcagcataagtggtagtccaaattttctttaagcagctgctctccaagacagggccctggaaaggcccacacatacagcccagggctgcccagggctgttggactgtcatttcaaggctcattgtccccagacagggatctgggccctcagacttttgagaatatgaagaggagggttgaggctggagcagaaccagaatcaagctggtgtggggcttttattgatagtgtgaagattgtacactatattacatgatcagatcatacaaataatctaagattatacagtctagtgatcctagattacacaagtaatctaagcttccactttaggaaactagaaaaagaagagcaaattaaatccaaagtaacctgaaaaaacattagagtaaaaatcattgaaattgaaaagagaaaatcgataaaacccaaaactggttccttgaaaaggtcagtaaaattgataaacctctagctagcttaagaacaaacagaagacaaatattgctaataccaaaaatgaaagaggccatcacagctaatcctatggtcaccaaaaggattagaaagaaacatggacaactctgtccataaatttgataacttagctaaaatggaccaattccttgcaagacgcattctctcaaagctcacacaagatagacctcaataggcatatgtatctattaaataaaccaaagcagtaattaataaccttccaaggccaggtacagtggttcatgcctgtaatcccagcacttcactttgggaggctgaggcgggtggatcacaaggtcaggagttcgagaccagcctggtcaacatggtgaaaccccctatctactaaaaatacaaaaaattagctgggcatggtggcatgcgtgtgtagtcgaagctactcaggaggctgaggcagaagaatcacttgaacctgggaggtggatgttgcagtgagctgagattgtgccactgtactgcagcctgggtgacagaatgagactgcatctcaaaaaataataatgaaactttccaaaacaaagtgccaggaccagctgggttcactgatgtgtttttgagatacttaaggtagaaatgataccaagtctctaccatctctttcagaaaataaaagcagagataacacttcccaactcattttgtgaggccagtattaccctaatagcaaaaccaggcaaagatattacaagaaaggaaaactacagatcaatatttccattgaacacagatgcagaaatcctcaaaatattagcaaatcaggaatgcaaggcttgttcaacatttgatattcagtgtaatccattgcatgcattagcagctcaaagatgaaatacgatcatatcaataggtacagaaaaagcatttgacaaaatccaatatccattcatgttaaaacctctcaacacagaaggaatacaggagaacttactcaagttggtaaagaacatactacaaaaaaccctacagctaacattatccttgatgtttccaactagacactttcctactaagatcaggaacatggcaaggaacaccacaccactgcttttcagcattgtactggaagtgctatataatgcagtgttaaaaaaaaaaaaaaaaaaa

SEQ ID NO: 24919 - DNA, 33033 bp, Homo Sapiens
cctccccaatcatatagctgcatcttttaggattcatttcctcagagaagtttttcctgaccaataatctacaggaacctgcaagtgattctctttttttttgagacgaagtctcactctgtcgtccaggctggagtgcagtggcatgatctcggctcactgcaacctccgcctcccgagttcgagcgattctcctacttcagcctcccgagtagctgggaccacaggggcgcgccaccacgcccggctaattcttgtatttttttagtagagatggggtttcaccatattggccagggtggtcttgaactcctgacctcgtgatccacccgcctcggcctcccaaagtgctggggttacaggcgtgagccaccgtgcccagcaagtgattctctttcacaaaaccctatttaattttctgcatagcagttctaggtaaagtttttctttattatttattgtatatctcctccaaagagaatgttagttccacgtgaggagtaaccttgtctgccttatttactactgatgatcacacattttgaacagtgtcaagcacatggtaggtctgcaataaatactattgttaaataaatgaaataactagtacaaaataagagctgtaggaatgaagtggaagataattagaagaggcataatgcaagaagtggccatctaagtcctccatagttcaagagatagaaatgaggcagagacctcacaagtaatgtacaaacaaaacatgcaatgtgtgcaagaaaaacaagcagtccagatacagagcagtggggatgggaatgcagggagactacagtgctggaaaatgtagctgagttagtaccagattatggaagatgttgaatgccctgacaaggacttagaatctattgggtggtcaatggatggctactgttagtgtttgagtagaaaagtgacacaattccaaaacatgcttttggaattgtaagatgattctgatggaaatgagcaagatgtatccgatggagtaacagttagaggagttcaaaaacaaaacagcatggtcaagaacatagctgtagggattggccctgaaagaataatgatcttttctttctcccagaaaaaaggaggaagacagacattctaagcaagtgaaacaggtagggaaacttggggagaatgtaattccagcatcctggtagaagagtggaactgacctggaggacagcaaaggagcccacgtggcgttaagcctgaaggtgcagtattcccattcaacagagactgctgctgacagtgggcgggggagtagtttgcttggcccgtggttgaggaattcgttggcggaggagggatcctgagaaggtactagaaatactgaacccagtcctgcagaagctacttaacttcacagaaaactagggcgtcgttgccctccagcacgtccaaaggtgtccccgacaaggccagcagctctacctgtttcttctccctcctcttactctgcctgtccaaaggcacgacactagtccacgtcacctttctttggggcgcgcaaagggtatggatcctcaatgccaacctcgtcaccccccccccccacacacacacacacacacacacatacaagcccaccatcgcgcaagaaactcgaccccgtctacctcggttcagtggaaggcattcatttgcacaacgctgtgcgcatgcccggaagccttaagtgtttcagcctccgacaggggcgtaattaaaggggcaggcgcccacgtaaagacgcgccctacgcaatacgtggagtttctcactttgtggagccgcctggaggcgccaagatgaagcccatcggggaagtggggcggggccaacccggcaggccccgccccttcgcggcgcttcctagttcggctggttcttctgtcgccggcttcagcagcccgcgcccgggcaggtaaggcattccccgccttaatgcctcggtcaaacgtcgtccgaggtccgcttccaggcctcggcacctctgccccagggttgctggggtcggctgcggaacggaaatctctttatcatccgtgagaaaagttagagaggaagtgggttcctttgacagagcttactccagaagaaagacttgggtaggtccccggtaatcaagaagttcgtcggccctgaggaagagcctgaggcttggagggacgtcacccagctgttctggggcgcagtcggacctcaagtttctcacctctcaggccctggattccgtgaacccgactgcgaaatgaagtctcttttccccagaaccaggaagtcaggccagcacctgacagatgcctgtggcgccagcagctcgctgagcctccacacgattgtaattcgcttgtttctccggcctccaagcttccagggaattagaaagtggaggcggcttatgggatcagatgagtacattcgcagatgggggaaaaaagtgtacctgtcagcttggaagccagagggagacaaagggataaaagcaaaccctgtccaggtgcggtggctcatgcttgtaatcccagcactttgggaggcccaggcgggcggatcgcttgaggtcaggagttcgagaccagcctggccaacatggtgaaacccctgtctctactaagatacaaaatttagctggcatagtggcgggcgcccgtaatgccagctactccgggggctgaggcaggagaatcgcttgaacccaggaggcagaggttgcagtgagccgagatcgtgccactacactccagcctgggcaacagagggagactccgtctcaaaagaaaaaaaaaaaaaaaaaagcaaaccctgagaaagcgagaaagcactttgagcatttagaatgggaacaaacggcgctattagtgcttcaaaaacgtaactgcccaaggcccctggtaagcagaggatactaaaatctgccttttccctttcttggagtggtccttgaagagggctatcgggaagttcaaatttcttctgttttcctgcagagcgttcatttgaagtttgctttctacctctccaaactgagcttctgatattccaggccaaacttgctccttcctcagccttctctatctcagtaaatatcggtaaacttggttatgccaaaaaccttggtgctgtcttctcactctccacatcagcccatagctttctattggctccacctcagaatcctaggacttctgcacttgctctgctacgaccctggtcccagcctgcagcacgtcccacctggcttattggtaggctctcctaaatgcttctttcttgcttctctgtccttactccaacatcctttattcccagcagccccagtatccttctaagacatgagtacagagcatgtctcttttctcaaaacttccagcatctacatctcacccagaggataaacaaagtcaatacaaaaactctaaggcccttgaagacctggcccctttacctttctgacctcatctgctacttgcctgttccctcctctgcagtctcaccatgtccttgctgttgcccagtgggcccagttccaacctttgcatttacatttcgttttgtccacaaacttttcccacagatagtccagtggctggctttctccttctttttgacctttaatcaaatggcaccttcttattgaggcttcctgtgactaccatatttataattacaaccttttctctatttcgttttgttctttcatttcacttggcaccatctaacatactatagagtttatttatttgcttattgccttccttcctccattagaatataaactccatgaattcaggttttggttttgttttgttttttttctctaattttcctaatgcttcatctccaggggcctggagcagtatctagcacaaagtagacactcagtaaatatttggtgagtcaatggtattatattttgttttttaaatatatgcaaagcattttcaattacttactgttgtgttggatcaatgttcaagaaagatatgttaagtttaatttatggtacaccagcacatatcccagtttgtaataggcagccctatctaatttaatagctctggaagccctcaccagcttttgttcataatgatgatgttaaagtatctaaaaataaagattaatggttatacagcatattttgctaagaatatatggaagtaaatagtgtattttagaaaggatataaatacattaaaattaccatggttgatcaaataagacagccaccatctcaaaagcttagctattttctcagacttgttatttgtacgctttcagtagatcctcactactgttctggaaattgaacctaaatacagtctgcacatatctttaaaaataatgtgatataagaataatttctgccaggaaataataattgctcctttttttttttgaccacctattattatgtgacaagatttggccctttgcatgtgttgattttaattcttacagcaattcttaggtattactatctctgtttttcagataaagaaaagcaaggtgcagagaaatgtatttactagctctggtcacagttggctttggttagaacttaggcctgtgcaacctcaaagttcatcttccctccacccctgcacaatcttttcctctgatcaaagtgctaatgaagcagtcttaaaactttattaacacatttgacaagaatcttttgccctcctgttttgggcacagtactttgggaaggcattggattccataagcaggtgcttattttaatatatttctcaatcaccaccccaccttttacacttgtctgagttgtcttacttgaaaatatgaatgggttttctttactatgagagttagtggtatgaggaaacagtcatgaaggtatttacttatttgtaagcaacatatcctgttccacctgtgttaatcctaagtgtactaaagtaaatcttgaagaatttgaaagagatgacactttttaagtttttttttgcccagtctgttttcattattgaaaattcagaaaagcaaaatgaaaacaaaactatcataaaagtcatcaccaagggataaccacgttaatattttggcttatgttcttgtaagtatgtggttgggagtggtatatgaatatacatttaaagtaaaattttaatttctgggattttgaacttctgggcacatgtgtggaggagttgcagaaggccttctttttcctagtatccctacacttatcacctctgctggaagcctgggtgcaggagagctaccaaatttatccctggcctttagatagtctgggttttttcctcaattccttgtattttgctctaatttataagactactaagcagttctatcttgtctagctttgtcaatcatgttgtaccttacagtagagagaaatcttagtaaggaaaaataacttgaagagagcaactgcagagtctataggcaacctagatacaatttcttaattaaagttaaaaagtcatcagcctttcattcaacacaaatgttgtgagtcgttgctgaggtgaatttggttgggtcctagctcaggagagcacccatctaacagagaaagcaaacacataaacagtaaaacataataattattataacagaagaatgactaggtgacattttggagcaaaagagatgacaatcaggggaagctaacagtgccttttgaattgggcttgaaggaataataggcatttaccaggtggcctttaaggtatgtgggctattcttttacctggccctagatgacttcatttcctgtttcacagaaaaaataacagtatgtgggaactcttctcccttcaaatatatctgtatttaaacctctgcttccttctttctagattcaaaagaggtttctctctattcaaggctgatttcttcaccctatatgctattcattatcccatttgtattgccaaacagcttaagtcttaaacccttaacaccaacagttctcaaaagtctggttggagtccctaatgctctttcaggagatttgtaaggtcaaaatcatgtttagttaaaagattcattcagagtgcaatggattttaatgttccaagttaatttatacagcttcagattcctcattgcagcttacctttaggaagttatttcttgtcaaattttagtgtagtatcaaagagaaatatctactactttgtgaaaaggctattaaaatacacctttctttataactatatgtctgtgtgaagctggattttcttcatatacatcaaccaaaacaacatgctgcagtgggttgagtgcagaagcagatacaagaattcagctctcttctattaagttaaatattgaagagattagcaaaactttaaaacaatgttgttcttctgtttttgaggaaaaggtaattattttattaaaatatatatgctaacatctatatttatgattattttaaatgaattaataagtaatttttaagtttctcagcatcaatttattatggtaaatattggtagatataaccaacataaacaaaagccctttggggtctacaatagtttttaagagggtaaaaggtcctgagaccaaatttgaaaactgctactctcttgcatgctctcctccctctctttccctacccctccacccccattttccctcccctcatactcctctctctctctttctccttcccttcataaccagacttcttggaaaatctgtttttgccattcactcactttttcactatagctgttcccaagtcaccaatggccttctgatttcagagtctaacatatccatcagtgtctatttgacctctctgagtcttttataccaacctgccaccttttctagaagtctctggtatgctaccatcctggtttttttcttgccttcatgactaagcagtattttttaaaattcttctttcacatcattcctttccattctaagcattcctaataggcaacctcattttattgttgcttcaactgtatatgtgtatatgctcttaatttgtatgagggcatttcaaaaagtttgtggaaaaattgaattaaaagataaaaaatgtaaactttggctcagcactatggctcatacctgtaatcccagcactttgggaggccgaggtgggcagatcacctgaggtcaggagttcaagaccagcctggtcaacatggcgaaaccccatctctaccaaaaatacaagaattagctgggtgtggtggtgcacacctgtaatcccagctacttgggaggctgaggcaggagaatcgcttaaacctgggaggcagaggttgcagtaagccaaaattgcaccactgcactacagcctggatgatagagcaagactccaaaaacaaaaacaaaactgtaaactttatttctgaacataagcccatgaagttcaagacacttttgtaagcgataacaccagccatttgggccatccctaaagaactgagagtcctgggaatttaaccacatcaatgaagtcttttttacattattaactgaagaaaaatgggtgctctatgaagatttttcaagattgggaaacaaaaagaagtcagaaggagacaaatcaggactgtaaggtggatgcctaatgatttccagttgaaactcacagaattgcccttgtttgatgagagaaaagagcaggggcattgtgatggagaaggactctgtggtgaagctttcccaggtgtttttctgctaaacatttgactaaagctgtaacagaaaagctttagtttagaaacacttagaaaagctactgtttctcaaaaccctctctaataagcagatgttaccattctttttccctccagaaagtcagcaagcaaaataccttgagcatcccaaaaacctgcagccatgcccttgcttttgactgtctgcttttgctttaattggaccactgccactttgggggagccattgctttgattgtgctttaggatcatactcgtaaagtcatgtttcatctcctgttacaattttttgaggaaatggtttaggatcttcatcccacttgtttaaagtttccattgaaagctctgctcgcatctgcagctgatctgggtacaacagtttgggcagccatcaagtggaaagtttgctcaactttaattttcagtcagaattgtataggctgaactagttgtctatggtgttcactgttggttctgctgttaattataggtactcttcatttagggcacaaacgagatgaatgttttcctcgaaaatcgatgtggatggtctgccgcagcaggcttcatcttcaacatcatctcatcccttaaaatgagttactgatttgtacactgctgattttctgggggcattgtccccataaataaagcatcagtgatttcaccattcttccaaccaacctccaccataaatgtggtgtttgttcttgctttagttttagcagaattcatgttgctgtggtagaggttcttttcaaactgtcttattcttctcagtgtctcaactagatcctgtttagacatgaatgataagttagtatgagtttattttggaaatacattttgcaaaaaaaaaaaaattgaaatccatgcatggtttttgcacgatatgcattttccatgaactctttgaaaaccccttatatatgagaatacttacataatgagcattctttgctgaaacctctctcctaagctccagaccacatatataagtacttggtatgaaggctcctagatagtgccaaaggtagatatttcacatttaacatgagccaaaaaaaaaaaaaaaacttcattctatctccctttcttctaatcgctcatctctagtgaaattgttttgatttggcctcctaaatgttttgacgttttacctctccattcccctaccctatactttttccaagctctcctttctgctcacctggattattgcagaagttttcaaactaattttcttgcctcaatatacatccctttgatttttatccagaggaatccacttaaccatataagattatttaacatccctcctaaaaatcctaaagtggctctcctgtaacttttagtttataagttcaaactctttgtcttagcacatgaggtacatgatgatctggccctgctacctttccaccctcatctcttctcacttaatcacaggcatcctgtggtccagccatagcaagctctttgcctgagacacacatgctcttaccttttcccatgctattccctctgcctggaattttcttttgggcttatcctcattccctttcattcatccttccaacctcctactccaaccaaatctgtcttgatatccctattccagactgcctctgcttgatgccccttttctgggccccataacattcttgcagcatttatcactccctgtcactgtttgtatcccctggtatactgaacagcttggaaacaaagattttctcttctctgtgctcccacttgttagtacaaagactgacataaatattttctgaatgtattcatgaatgaaaggaaaggaatggtctttctgaaatagagaatggcatgaacaatgcattgtgttataaaagcagagttgtatggcatgacttttggagtcagacataattgtaagtcctggatctctcacttaccacctttgtaaaatagagatgataaaactgtactgggaaataatttagttgttccaaaagtaaatactgaacaataccattatctacagtatgcaagtcactaggtgtatattcatgaataaaattagcatggtcctgaactcatggatcttaaaatcgaatatgggagacagtaaacaggtaaacaaataagtatatgattacaaatacattgtgcagtgatgaaagataattaggtgaagggcagctagacctatttagatgtggtcaaagaagtccaaagagaagaagtgaatactaacatagaagcctctgatacagagaagcttttcgctttttactctttttgatagttttagaatgttgttccatatgaacacattatttactctaaaattgtatttttaaaatatatatagggaagcaaaaataattgacagaagaatatctgagtctatttgtcttaattggaaggaaagatcatttcctattgagaatgagggacacgcagaacaaataaaatccacatagaaagaagtaaaggtatgaaatagtcactaaggactatgagagaagacaagtggaaggattaacggcagtgttgaaggccctgtggaaagggggttaccataaatttgtattcacatcagcaaccctggtgtacaagtaaagttgttagatttatccctggctgcagctctccaggatggagtagcagaagtaaagggggattgcagaaataaagattctgtctagagagtagttgaagtggtgaagcacaggttttggcgtagtagcaaatgaattgtggtcaggcagatctcatggactcaaaaaatgtgcagaggtcaaggaagagcaaagtatgtgaaaagtgggtgggtggaccatatctgttaatgctacacaaatcatttcagtacgttttttttttttacttctaccaaagaatgttgcataaattttaattgtaaataagtactaattgagaaacatatattaaattgaaaggtaaatgtttttattaatagatttgatttctgaatatgctaattctgatagtttgttgatattactcttaagaatttttctggtaagttttttgcccctttctataaattttactaggaaaatatcagtgtcagaaaaaagtcctccgatttttattgctattaatgggtggaaaaaggaagcaaacccagaggataattggacaaatgaattacaattttaatttcatcttaggatatcaatgacttgactttggaatgtttctttattatggtataatcagttgctgacatttcatatgatatagcaaagtgtgatatataagcttacagatgtcatctctaaaagtactgtaaaattttaatgagatttttccatattttaggaatagaagatgaacaaacccataacaccatcaacatatgtgcgctgcctcaatgttggactaattaggaagctgtcagattttattgatcctcaagaaggatggaagaagttagctgtagctattaaaaaaccatctggtgatgatagatacaatcagtttcacataaggtaacagataaaattctttgtatttttaaattcttacatcacaatatggaatgattaattggtataagtactgtctaatgtggcagtttagaaagtaaacctctccactatggaggagacattggtagtaggtaacctctttttgattgttccttttgcagttttgtcttctttgtcccatatgtcaatagggctaatactgtgatctctcaaataagttttttgggttagaatcaagattcccacctttgctgtggttccctgtttggcaagccaagtgaagttcactctgcctcacacttctcatttccagattgaaggaaaataagaatgttacaagaatgtctggtaaaaatctagagcttaaatttcaaagtgtgtgaatctctaacacactctaacaatgtattttgggactttttcaatttgacgttttaaagttgttgcttacaagtgtacacttctgtgcacagaattcttaaatcttagctaggatttctcagtgctgtcttcagataatttcaatttttcctttttactcatctctgctcaatttagtgtaaaatatgcatgcatattttatttttgtcagtcattgcagttaaaacctatgtcaaaatgtttctttggtagcaaaaggaaaagaagactatttgttattttcagcattaatctgggaaagaacctaaaagacttggctcccttgcaggaaatatttcctcataagaagagcgaacatgttaaattacttgaaagaagcttaagtttaaactgtgttaagccaatgtttaaagataattttttgatattactgttaaaaacttatggaagataattggggcagtggtggcaggaagataaagctcttctcttttttttttcttttttccaagactcattcctgtgacagaaaaagcttttctttacagaataatacctgcaaataattgtgaaaagaatggtagaatgagaaaaatacctatttgcaaccaccaatgagtaactgattcatgcaaggctcatcactgaacctaaaagcataaggtgaaaggtggttgttctcgtgcatgtgagcaggatatgcacaagattttaaagtattataggctgagcacagtggctcatgcctgtaatcctaacacttgtggagaccgaggtgggcagattgcttgagcccaggagttcaagaccagcctggacaacatggtaaaaccccatcactacaaaaaattagctgggtgtggtagtgcacgcctgtagtcccagctacttgggaggttgaggtgggaggatcacctgagcccaggaagtcaaggctgcagtgagccatgatcatgccactgcactccagcctgagtgacagagcaagaccccctcaatagatagagaaaaagtattgtacacaaattacttgtgaagtatgaaagagaagggtacatttttaatgaggaaatctgaagtacacttccttcaccaagtgatcaaactttagcaccaataataatggtacaaaatgctaatatgtacccctggatgtgatacaatgggaaaggcacattatacctatgtagtatttctaccaaaatgcttaatctgaatttaatcatgagaaagtagtcagataaatctaggctgttagacccattctataagacatctggcccgtattctaaaacacacacacccacagacacagattgaaagagagaatgcacaagagcccagatatggcacaattttatcaattattcaattggtgaatctaggtgaatggttgttcattctatcattttttcaacttttctgtaagtttgaaatttttaaaaataaaatctttagaggaaaaacagaaagaaacaatattggttaaatttttaaatgttacttttcaaaactaatttttgattttaaagaaatggaaagaaatgggttgaaagccgactttgtgatttttttcaatttaattgaattacagttaagatcaaaggaataatttcctaagtttttgtgtgttctgtttctttaattaagcaggtgcatttattaaaaattatatagctatcagagtcttaagtcatgtgggaagtaatattgctagtagattaagaatacactcttttgtcaaatgagatctgaatttgtacctcaacttggatacatcatattggctgtgtggctatgggctggttactctacctctccaagcctggctttttcactagtaaattcatatgataatcataatatctttgaacatgctcatgtgtgtgcatcctataacccactaagtaaatatccagtaagtacccagtaaattattatcatcatctttggcatcttttttcctcctatctttcctgtctctctgtaattcttgctggttctcttgttgtcccttttctttaatgttgtaggagatgctgtgggcaaaatgggcaggggagatcaacacctattttcatatgacctcagtttataaatgctattgtttgaatgtgtccccaaaagttcatgtgttagaaacttaatacccattgcaacagggttgataggtgggacctttaaagggtagttaggccatgagagctttgcccttatgagtggattaatgtcgtcatggcaggagtgggttagttatctagggagtgggtttctgataaaaggataagttaggccctatttttctttttctctctctctctttttttttctctttcacatgcacgtgtgcatgctcttttgcccttctgcccttccaccatgagatgatgtagcaagaaggccctaaccagatgcagcctctcgatcttggacttcccagcctccagaaccgtgagccaaattaactattatttataaattaccctgtctgtggtattctattattgcagcacaaaatggactaagacaatagactaattttgtttctttgttacttacttttaaggagatttgaagcattacttcaaactggaaaaagtcccacttctgaattactgtttgactggggcaccacaaattgcacagttggtgatcttgtggatcttttgatccaaaatgaattttttgctcctgcgagtcttttgctcccaggtaaactgattgtgaccagggtgtccacaattagggtggaaagacaaatggcagaaatataaatgtttcttcttactcttccttttttctcatagtagatgaagcttacatttgagagtccctttctttcagcactcctcaactctttaaaaagcagcacagacaaaggacactgtggactctgctgctaaggtgatagaagcttcgtaagagttagatagttttgtgccaacaggaagtttagaaggaaagacttcatacttctggcttaggctgtaagaaagtaattataattttgagttcttcctttttttcatcttcaacttctaccctgatgggactctataatcataattttaaaaaattgtattctgatgtggtagtgtctagttgccttccttataagctttctttttttcctttgatgcctttcacaccagtggttctcaacctttatcatgcataagaatcacttaggttctggttaaacatgtagtttcctagggtctgttccaaatctatgtaatcagaattctggaattgggtttaaggtctatattcttaaacaggtgcttcagtgcctctgatataggtggctcatggatcactgtttgaaaacactgccttactctctttacccatcttcattataacttacagattcttactaggcagcttcttgtgtgtgctgtgagaatatgagaccaacctgtagaaactggaatgatattaaatgaaccaagtttctagtttaactttttcacaaccactttttcttactgaaaaaccacttgtatcttacttcatttgttagatgctgttcccaaaactgctaatacactaccttctaaagaagctataacagttcagcaaaaacagatgcctttctgtgacaaagacaggacattgatgacacctgtgcagaatcttgaacaaagctatatgccacctgactcctcaagtccagaaaataaaagtttagaagttagtgatacacgtaagtaacattttcagtgctttccactagggatttgtcattaagactaccagtgctttaaaagaaagctcttgctcttttgtttgtgcagcaatcacaggcacactggcaatagctcttttgtgagttgtttcctcctgatatattaagaaccatcttcattgtattaatcagtgattagaggcaataggacatgcaaacaaccagagaagctatgaaaaaaaataagtaaatatttacataacttggaaaggtcactttttaaaataaaatatgtgactagagttttgggtaggtagactagacccactcaaatgtgtgactagaattttgggtgggtgactacagtgttcagagggtaggatcaccaaacagagttctcaagaaaaacttataatttgtattttagaaatggttttatcttctctcatcttgtctaattcaaaatcataaatatttgcatatatgtgaaatcttcaaatgagaaaatattataattattaaaacgaatttttaaaatttaagcatgtttttcttattttgacataggttttcacagtttttcattttatgaattgaagaatgtcacaaataactttgatgaacgacccatttctgttggtggtaataaaatgggagagggaggatttggagttgtatataaaggctacgtaaataacacaactgtggcagtgaagaagcttgcagcagtaagttatattttcaggaataaaaagaaagagttgcttcatagtgtgccctataataggttttaaagttaatctttaggaaatacattatttcagtatgtattttctttaaataaacatcattctaaatagtagttcttaaaattttaaaatctgttgaacactatggaccctacccctagaaaaatgtggttatgtccatgtacacaagatcatacatacaattttgggagattcacaaactaaagttgagaagccctgctccacatagtgcttcatgtgtaatcaagattaaaatggtaagataccaggaaaactatttttaaaaaaccttgtttgcattacttttcccatttaaaaataaaatttaggaagtatacattaagaaaaaacattaaaattttttttatctgtgtcctttgttgccatttctactgaggtgtttaccttttacttacttgttatattctaaatcttttgttagagcctaaaaatatcaatagaatgcatatgtatgtgataaagatagtcactctttgtcatatatgttgcagggcttttgtagggtttttttttccattttgcacctaaattgcttatgttttctgtttcctagaatttttttcaaatttttttgtgtagtgaaatttcgtgttatttcattttgtttccacaactcagtgaaatttatatatatttttcattccactaaccagccatgggccttgagcaaatcactagtatttctagatctcagttattctgtagaattgggagaataatacactattgttttaaagaaagggagatgagccagctgatctcttgatccctctgagcattaggaaccttagaattgtgtagtattacattgtatattttattttttcagatggttgacattactactgaagaactgaaacagcagtttgatcaagaaataaaagtaatggcaaagtaagtcttaatctggcagtgcggtgtagtggaaagaaaaaagacaaggagtaaagaacctggttcactctagagtatgccatgaactagtgatgtttgcacatatatgaaattaaaataaagtgtttagattagagaaattgaaagtacttttggctccataattctatgattacatatactcatatgcctggagattaaatagcagtcatttttatttatttattttttttgagacagagtctcgctcttttgcccaagctggagtgcagtggcatgatctcggctcactgcaacctctgcctcccaggttcaagcgattctcctgcctcagcctcccgagtagctggacctacaggcgtgtgccaccatgcctggctaatttttttctgtatttttagtagagacggggtttcaccgtgttagccaggatagtctcgatctcctgaccttgtgatccacctgcctcagcctcccaaagagctgggattacaggcgtgaccacgcctggccgcagtcattattttaagtcacaacaaagttacgtgaaatttcactatcatgtccttcattatcatgttttccacttccagaattcatgagagatcaattgtagagatacttaaaaacaactatctatagagtaataggcccttatatataaagtagcatctatagagcaactagagtcatgttatctgtaaggatgcttagaaggcattgatcctgtgtgctggaaaattgttggacatcatcaggaaaagtaggagggacaaagtaggaaatgtattctaattattatagtgattaatagtgattgatatttgagtgtgtgcaacatgccagacattgtgctatgtactttatgtgcattgtctgtctaacccttacaactgttacaactgcccattttgtttgttaactgagatttagaaacattaaatagcttgtccaagatcacatagccagtaagtgttagagatgggattgaaatccagatctgtttgattgcggagcctgaactttagatctgaatcgtaatgggatttaccaaattatacccattaaacccactgctgtaaatcaccaatcatagttacctaacctcaagtaagaagaatagactagaattgatttatgcacggtaaaaatgatacatgctgaaaaaagatcaaactttttttttcaggatttgtcttcttcactcctacccctactctccaattctaaaagtaacttgttcacagtaggtcatctggaaaatacaggaaaacatttttaaaatatacaagcctatatgcatgcaggacttaatacgtaggtgatgggttgataggtgcagcaaaccactatggtacacgtttacctgtatgacaaacctgcacattctgtacatgtatcccggaacttaataatacaaaccatctctcaaatatatcactcagagataaccactgctaatatttttatatacttgcttcatgatgtgtgtgtagcattttcccatgtcactaaaaataatttgaaaacattttaaattattgtacaacagtctagcatatgtgaaaatcatattttatttaaccatagctaggtttgtttctaattttcagtattaaaaataaagcttctttaaagttctttgcacataaatctttaaatgcagttatacttactttatcatctagggtaaagtcctagaaaaagaattactaggtaggaatgcatgaactttttaaagactttctaaatacacattcaaatggcttttgagataagttactaccagcaatgtattacaatttcaaactttactggttccttaccttcatttaatatcattactttttttttttttttttttttttttgagacggaatctcgctctgttgcccaggctggaatgcagtggtgcgatcttggctcactgcaagctccgcctcccaggttcacgccattctcccgcctcagcctccagagtagctgggactacaggcgaccgtcaccatgcccggctaattttgtttttgtatttttagtagagacggggtttcaccacgttagccaggatggtttagatctgacgtcgtgatctgcctgcctcggctgggaatacaggcgtgagtcactgcgcccggcctattattacaattttttaataagtgccagtctctggatcttactagcagaatgaacttggccaagttttttaactttctattcgttaattttctcatctataaaatgggacaatagtacttacttaagttattgtgaggattaaataaaacagataaatcacttgccacactgcctcgtttatagtataaattcagcaaacgttaactactcatgtttaaaatgtgccagtttggtggaaaatgggacacttactgttttaatttgcacttcttcaaatatttatgagactagaagaaattgatataatgaactgctagaattgtggatcattttgaatgaacaaaatgaataagcacttaaataataaaacacttatcatgtgccagatacgtttctaggctgtcatgtttacatttgctcatttaattgtctcagcatccatattacatactgttttctgcatttagcagataaaggagctgaggctcagtaaggctgttaacttgcggtaggtcacatatccaggagggggcagaactagactttaaatttaggatgtataactctgagccctgttttctttcgtcttaccacagatgctgccactttattagattgtaggtctctttagttttattactctcaagtatataaagacactcaaattaggttataaataatccagtgtgattaaagatcaaaaacatgtaaattagatgtgattcaagatcatgtctgtaaatcagtgctttgagtgtgttagaaaattcttgacagtattagcataaaaattcaacggacttcttgaaatcttatttgtgccatcattgaaaattgggctaaagaaagtgagcatcagcctagtccttaaccaaacttatcacaagttccaaaaatctgaattatttagcttttactgtaaaatagaaagaggtttggccagctgtagtggctcacacctgtaatcccaatactttgggaggccaaagtggtaggagcacttgaggccagcagtttgagaccagtctgggaaacacagtgagacctcatctttacaaaaaaatttaaaaagtagctgagtgtggtgtacaccagtagtccaagctacttgggaggatgagttaggaggatcacttgagtccagatggtcgaggccgcagtgagctatgattacaccactgcactccagcctgggcaacagagttagaccctgtctcaaaaaaaagaaaaagaggttttacttctaatgttgattaatactggctgaaaagagaagtatttgcagaaaattataaacagttacaataaacatatataaacataaacatcaagttagaaataatatataacatactatttttttgctctttttttctattaaaactttgaataacttccaacctatagctgaatatatatttattataataattttgcatgaaaaattatttgtcacaggtgtcaacatgaaaacttagtagaactacttggtttctcaagtgatggagatgacctctgcttagtatatgtttacatgcctaatggttcattgctagacagactctcttgcttggtaagctatttgttcatcagattgtttggctttttgtttatatgctggaatattaatattcattttgttactggattatttaaaccaaattcactttcatatttttcctgctctatgaaaattatacagttgatatgtcaacaaattatacagttgatatgtcaacaactgggttgccattttattaggtggtaatcttaaatgtagaattcagttaagactatactaggaagatgcttttatatatttttatcttcaaataacaaatgtaaacacccatttgagcttatttagatattatttttaataacttaaaaatgtagtcctaaattattaatgctataacatcatcttcagttgttgcctagaaaaatattctgtgttatatattctctgtagattttttattattctttctcatttttaatttggtttatttctttataaggatggtactccaccactttcttggcacatgagatgcaagattgctcagggtgcagctaatggcatcaattttctacatgaaaatcatcatattcatagagatattaaaaggtaaatgctactgtttaaaagtttttggaaagctgtctttaaagaataatttgctgtcactctattcacgattcatatgcaggtcttaacctagagcatctggacttttttcccatcactccatgaaagctcttctcaataaggacatctataatctcctttattccaagcccagtgacctacttccagtactcatcctacttgaccttttttgtttgttttaatagtagtttattctgttcttcttgacacttttgccttatggaaattagttgttttcttagtttatggatcactattcttttctgaatcaccttcatcctccatgagtacttttcagttctctttctttcttgtgtatttatctagttaaatatttacctactataagtaacatattcatatatagagctcaacatcaatcaaataagcacaaaataattatagaatgttaatatgtacagttcacatatatattatatgtattattattatatagtatagtacataggattaatataaagaagggtttccaagaaagtgacatttaagcagagattcaaagaatgggcaggaaataagtagacacaatttgagggtaactgtagaatggatgatggggagaagaacattctaggcagaaggaactgcatttgtaagaccagtggtgagacagaatatgggagcatgatgagttacaagaaatgaaatatgctttgggagccaagataggaggatcatttgaggccaggagtagcagacctgactatgttccctgaacaacatagcaagacctcatctctacaaaaaaactagtcaaacgtggtattgcatgcctacagttccagacactagggcagctgaggagggaggaggcttgagcccaggagttcaaggttgaagtgagctatgatcgtgccagtgctccccagcctgggtaataaagtaagactctgtctaaaaaaaaatgaagtaaatgcagtatgactgagatgcagaaagttatagggtggtggattggagataaaactacagagaagtgtaggaagctaagtcctataggacttaatagatcaaggtaaggcttttagttttatcacaagtgtaatgagatgccgttgaaaattttaagtaggaatatggcatcatatttaagttttgcaaagatgattttaactctagtgtagagaacagtttgtaagaagaggcagttagtaggctatcataggtggcagttcataagaagagaggggagcagattagaaagattaaaatggcaaaacttgttgataccttggctatgcaggggttcaggaagagcgaagtatcaggaatgactcctggaataatggcatccagacttgcattctggaatgattatggcatgattcacttatgtagaaaggactgaaaaaagacttggttaggttggggttagagagatggttagaaaatgtgaattctcttttgtacatgttgtgtttggggtgcttttaagatgtagtagtagagatggtagacagtgtgatatacagatttggagctggaggtctgagctgaagatataaatgtgtattacttgcatacaggtgataattgaagtgactgtattcacttgaggggagatgtagattaagaaaaggtcacaagattaagtcttggggaaccctaagacttaatggccaaatagaagagatgatcacaaaaaggaatctaaggaagtacacatacagagaagggtaagatgaaaacctggagagtgtggagtccctgaaaacgaggaaagaaagtgtttcccaagagggagtagtcaaaaagagtcaagggctttaatcattggattagcatcaccatggtctttggtgactttatggaaacccatttccaggtagtagttggtttagaaatcacattgtagttgagagagtgagagctagagaactgagataggagtatagacaagtcttttaagacattttactagtgaaggggacagctagaaatagataagtcattcaggaaactttttttaagctggcagagattaagctgtgcttatgtgcctataggaaggatccagattaaaagggagaggatactatggaagagagaaatgagatgatgtgttcagtagggttactgagaatgtagaaagcagctcaagcagaggaactgaccctagatgagaaaagaaacgccatctcctatccttcatggattggtactttcttgtgttcttatatcattgtctcttttctccctgtatgttctttttttttttttttttgagacaagtttcactcttgttgcccaggctggagtgcgatggcgcggtcttggctcactgcaaccgtcgcctcccgggttcaagagattctcgagcctcagcctcctgagtagcttggattacaggcatccaccaccacgctctgctaattttgtatttttagtagagatggggtttctccatgttgatcaggttggtcttgaactcccgacctcaggtgatccgcccgccttggcctcccaaagtgctgggattacaggcattagccacccgcctggcctctctctgtatgtttttgctgagtgatattatgttaattttaactgctacttatatgtgagtgtcttttgaatctgtattattagcttccaatcctggatttttagtatccccgtaccaaaaacacttcatctgggtatcccacagtagcctttaagtcagaacattagaaatcaaactcatcagctcttcccaacctaaagtcttcccacatttcctttctgatccagtgaagtcactgttcattctgtctctcaaactgaacacgttctcattctctatatcatgctaattacaaaattctgttgtgtgagcctcaaaattttcactttccatttatcccatgttatgaccatttaaaccctcattatctcccatttgctttgttacaaaccttcgtagtcaacctaaatccagcctatcagttctcatctattcactaccacactactaggtcatggtcctaaaagttaagtctaataacatcagtttcctactgtgaaaactttagctggtatcctgttgctcacaggataaaatgcaaattatctccatgtttcttggacactcgttccttgaagttgaccatgtataccatatcatgtttttgtcactttgtacctgttactccatttgcctggagtgcctttctttccctcatataactattaacttctaataatccttcaatactaagcacacttttcaccctctgtttgaaatttttcctactttttccaggcacatggttgttctctcagcattttgtacctaatattaccattgttttaaaaaattatttatgcctttgtcacagacaagattttaagactccgccatgcccagcagtgagcttaaatactacacaacatagggagttctcaataagattgtgttgaattaaagtatgaaagcacataatgaattaattgagatattttggccatatttttttctcttcaaaagccagatagtacagaacaaaagaataaagaaattcataattgagatactttggttggaaatttgttttgaaatgaattgatacatactaagaaaggaattaataaaggtgccttggaagactttgtagtaatttaccctataataaatgatttgtggaataatgaaaatatctcttactaatgtagacagttttatttcatttttattctcctaaatgttttcctcaagaaacataaaaaaagaggacagttgcttctctttagctataatctgaattctaggtttatttctataaactttaggcttttatgatgcatactataaaacgttacactctgtaaatatgtatgtacatatgcatgtatgcatatacatatatacatgcatacatacgtacatctagctaaggaactgtttgacttttttggggtgggaaaaacatttttttcttcaaactttacatttttttcagtgcaaatatcttactggatgaagcttttactgctaaaatatctgactttggccttgcacgggcttctgagaagtttgcccagacagtcatgactagcagaattgtgggaacaacagcttatatggcaccagaagctttgcgtggagaaataacacccaaatctgatatttacagctttggtgtggtaagttccgtatacataattattaaaaataatcattctgctataattgtgaaaatgaagagaatattatttaatacacccatcttgtttatctctcttatgtaacaatataagtttttcacattaacctctacttataccagaaagtttataaaaacttcttccaatgtgtaaaacttttgagttgatttttgaaatgactacaagaaatgattttcttgccatctgtctttatgaattagcatgacacctaatgcattaaatgaatcatgtcatacagtatatactttagtctcacattttttgacatttactaatctacctctctattcccaataacttttaagatagagcaagagataggtgtgggtggttgaagaagccgggggctttttcttcattttattttttcatacgtgtttcatatatggaaatttaacttcatagcactgaaaataaggcatagggctatagaatatgcctaatgtttagaaaataatattctcctaagagccagagtaaattattcttgtgaagaatccccaagaggcaggaaaaggattgggagtccttagaacatatgttgagtggggctgactctttagtaagttgccaatagaaaagagctgcttatggtcatgttggggtccaagatgtccctgaaggagggatggtgagaaatgcccaaagctcatgttctttccactttaatatctaaaagacatagctttgtatagaatgattaatcaaattttgtaagcaagattcatattcattctagtttttgtcttgagtattatatatataatttattaatatcatgtataatatatatattttttagagagacaaggtctcactcagtcacccagactgaagtgcagtggtggaattatggctcgctgtagcctcaacctcccaggttctagtgatcctctcacttcagcctcccaagtagctgggactacaggtgtgtgccaccacacccagccaatgtttttttaaaattttttgtagagacagggtctcactgttgcccaggctggtcgtgaagtccggggctcaagttatcctcccacatctgtctcccaaagtgctgggattacaggcgttagccactgtgcccagcctatcttgtgtattatattaatgattttttttgtcttcataggttttactagaaataataactggacttccagctgtggatgaacaccgtgaacctcagttattggtaaatgaaatattcattttcctcaatccttttttctctgcttttgtagtctaaatttatatggataaatttgacatctaaaaataacattttctattggcaatctttccattggctattacacgacagcatatggaaaaagcattaaatattttcattctcagctctcccatgaagtatttgtgaagcctagaaaagtcacttatatattctttgttctgatttctttgtgggtaaaatgagaatagaactaaatgatttctgaggtcctctttagcttatgtttattttgtgtcacttttggggtggctactgttaataacagtgtttccagcattttcagaggggggaaaaaaaaggcttccattcaaatttctttcagaataaaattgctagtaaaagttatcacttatttctatcatggggtattttatttacaaagttacaataaaaaacataccaaatttgctattgttaggaaaaattcatatcatgtttttcctttgctctcacaccacaacaacaatcaacacagaagatttctgtgaccaaatgcgactgggaagggtttctccccaccaacaagcaggcaatctactttgcagcggaagtcagctggatctcctccaatttaattctgacactacattcctggacatagcatcagagtcagatcccacaggttaagagctcagtccccaagactgccatcccaccagacaccagttgtaagtttaggcctccagaacttctgaccaactgccttcaagttggagttcctatgacctcctctgtgggtatggagggctcaagattgaacccagattgattcactaagttgcagcatatactttacctaagttttccatcgttttgcctaagactttttccttcaaaatatataaaagcctcaaaactttggcttgagtaagaatgaaatgcagaaaaacataagctgtatctcagtcacaagttttgcatttcatcatataatagtgaaaatcataaatctttggagaaggttttactctttcacccattcttaaggtttgactgtgatgtgactctaaagtaataagattttcatacaagcacagtttttaaaaaagtgatcatctgaagaaccgttatgtcactagattctgccgttgtcaaacattttcagaatttatctttgaaagtggttttgaagagtttacatcctacctctcatgaatagtttttttcatctgtattagcttcctaggactgttataaaaatataccaaaaactgtgtgacttaaagcaacagaaatttatttgctcatagttctggaggccagagtctgaaatcaaggtatgggcaagactatgctctctctggagactccagagagaatcttgccttgctcattggatgtagggcttacctccaggattagccataatctggaatgatctcatctcaggatacttaattacacctaaaagggcccttcttttcctaataagatcacattcacaggttccaggaattatgacatagacatgttttgggggaccatgattcacccaactccacgatcttattcctacacttctctccctgttaatttttttttatcatggcctgctccctattttttcccctccttttttctctttgattcaacaaccttagtacccatagagaaatttgttgggtacagggaggaggagtcagggtccaaaagttggaattgcgctattagaagcacatcaagaagcagaccaccctgtgctgcccacctagtaaatgctgctaatgggaacatataagcaattagctcataacatagatataaaaattggaaggcaaatgggtggaagtatctaggaggtataaataattaaatatacatttgtatatatatatgtgtgtatatatatatatttatatatatatatatacacatacccagccatgtgttgcctaatgacaggaatacattccgagaaatgtgttgttaggcagtttcattgtgtgaacctcatagagtgtacttacacaaacctagatgatatgacctacgacatacctgggctatatggtattgctcctaggctacaaacgtatgctatacagcataatactctcctgaatactgtaagcaattgtaacacactggtaagtgtttgtgtatgtaaacataaaagaggtacagtaaaaatacggtattataattttatgggaccaccatctatatgtgatctgtcattgaccaattgaccaaaatgtcattttgtggtggatggctgtacttatttacataggatttgtcctgtatgtcttcaatttttttttttttttttgagacagagtctcgctgtgtcacctaggctggagtggcgtgatctcggctcagtgcaacctctgcctcctgggttcaaacgattctcctgccagccttccaagtagctaagattacaggcatgcaccaccatgcctggctaattttttgtatttttagtagaaacagggtttcaccatgttgcccaggctgggtcttcaattcttaataaggttttaagataagatagtaaaatgagagcacatgttattacaaagtagattaatttaaataattaaaatatatattctattttctttcactatgatttgaagctcttaaagttttaacactcattttaaagctagatattaaagaagaaattgaagatgaagaaaagacaattgaagattatattgataaaaagatgaatgatgctgattccacttcagttgaagctatgtactctgttgctagtcaatgtctgcatgaaaagaaaaataagagaccagacattaagaaggtatgcattttttatacttatttaaaaagtgaaaggggtggggttcatcatattttccagagtgtatattttaaagcaactgtataatgtggttcttttgtttttttctttctttttaaaaggttcaacagctgctgcaagagatgacagcttcttaaaactttattggaaaagactcttgactttttatatacacctatctcaaccatttttttaactgatttttttcctaaatattcttctttacctttaacaaggcataggctgttgcaggacagtggttattaaagcatgggttgaacttccaaaatataaaaatagagccaccatatcaacacttagccctacccattagtatcacccccagttcttacagtaatccctgagaaatctccttcaagcatcaccaaacacagtttgaaaattacagggttagcaaaaagagcctgggctgtatgtagggtggaaacactctgatctgaagcccagctgactccactactaatttgctgtaaagctttggacatacacttagctgctgtgagccactaataacattgggctaatatctgctgtgcttctctgacaggtagtcatgaaaatcaaatgatgcaaaatatatacaagcactttgtaaattgtaaaatgatacaaaatttaaagtttatagagccagttacaaaatcctattagtcatatatttatagattgtgttcacagcaatcatttaaccacaaataaaatatcccttgatgatactgccataatgatatgtccattattagattatgttacatgacaaagttgaaggaatttggcagatgcagttaaggttcctaaacaactcactttgagactgttgaaagggcctgacctaatcaagtgaacccttgcaagaagaattctccttgtaagccttgaagaagtatgtgagagggccacattggctaaaacctaaaggtggcctctaggagatgagacctaccttccagttgtcagcaagcaggaaaaaaaaattgggacctcagttgcaaccacaaggaactgaattctgccaaaaatctgagtcagcttagaagagtactccaagcttcagatgataaccacagcctgggctgacacctggatttcagctttgcatgatcctcagtatgagaatctatctgttctgtgctggacttctaatatatagaactgtgagataatgggtcacattggctggatgtggtggctcatacctgtaaatcccagcactttgggaggccgaggcaggcagatcacctgaggtcaagagttcaagaccggcctggccaacatggtgaaaccccgtctctactaaaaatacaaaaattagacgagcgtggtggtggacacctgtagtcccagctacttgggaggctgaggcaggagactagctggaaccagggaggtagaggttgcagtgagctgagatcgtgccactgcactccagcctgggtgacagagtgagactccatcataaataaataaataaataaatgggtcacattaagcctttaagtttgtggtaatttattattcagtaatagaaaacaaatacagatactctcccatgatgtttttcccatgatgatttcccatgatatttacaggttttgcccacatttgaggggtatgtggaaattatacagagcatgtacagcgggaggcttatagtgtacgtactgaaatgtggggttggagccccaacacagagaccccagcaggacactgcctagtagagctatgggaagggtgctgccaccctccagacttgagaattgtagagccaccagcagcttgcactctgagcttggaaaagccacaggcactcaacttcaaccatgagggaagccacgcaccctgcaaagccacaggagtggagctgcccacggcctcgagggcccaccccttgcaccagtgtgccaggatgtgggacatggaatcaaggaatatgttagggcttttttttttttttttttgagacggagtcttgctctgttgcccaggctggagtgcagtggcacgatctcggctcactgcaagctctgcctcccaggttcacgccattcccctgcctcagcctccccagtagctgggactacaggtgcccgccaccatgcccagctaattttttttgtatttttagtagagatggggtttcactgtgttagccaggatggtcttgatctcctgacctcgtgatcacccgcctcggcctcccaaagtgccagtatttaaagtttaatgtcttcccagctgggtttcagacttgccaggatcctgttgcccctttctttagccaatttctcccttttgggacaagaatgttttacttattgcctgtaccaccaactgtatcttggaaataaataacttatattttatttcagaggctcataggcggcaggaacttaccttgagtctcaaatgagacttaggacttttgagtgatgctagaatgagttaagactttgggaagggatgattatattttgcaatgtgagaaagacattagatttggggggctgggggtagaatgacattgtttagatgtttgtctccttcaaatttcatgtttaaatgtaatccccagtgttgggggtggaggtggggcctgatgggaagtgtttgggtcatggtggatgatccctcatgaatggcttagagccactggtgatgagtgagttctcactcagttcgtgtgagatctggtggcttaaaagagtctgctccccctttgccttccattgtgattgtaaccttcctggggccttcatcaaaggccaggcaaatattggtgccgtgctagtatggcctgcagaaccgtaagccaaaacaaaccttttttctttataaattacccagcctcagttattcctttatagtgatgcaaaacgggctaactatataaatttgtaatttttaagttatagattgtttttattaaacacttatgaatactgtttgaagtgctttaatttttataacaatcctatgaatttggtaataatcacattttacagatgaggaaattacccaagattatatagctaataagttgcgtggcagaaattagcatctggtatcagtttgcgatctttaccactaacacgatgtctgtgcatcatattaatcataatcattttctctgtcatatgttgaaagttattgtgccaaacattgtgctgagttttagaagcatgatctgatttgataaatctacaatgtaggttctattcttttacttcttgaggaaattttgagacccccaatgattaaataacttctttcccttgttcattgtattagactgcaattctccactcattatatttgatgccttttgcaatatggctttgtaatttttcccatcaggaagtaaagtctatttcctcaaccattaaatctgggctggccttgtaacttgcttacagaaaaagtgatggtcagttccaagcccaggtctcaaaagcactaatgcactacttctctcatttggaaccctgccactgacatga

SEQ ID NO: 24920 - DNA, 2191 bp, Homo Sapiens
ggtttctatttcttcatctgtaaaatggggattgtaatatttactttccagggtcatagggataagagagctaaaggatgtaaagtccggaactagtgctgtcttttagatcatggtaacatcagtttgcaaaagaaacgaataccagcttgtgtggtttccatgatgggaaaccatccagtccctgctggtgtgacggtaggaatgggcttgtccatcgttcccgggaactcagacaggtggacctgaccttttattccttgggggtttctcgtagtcttgggacatcagcccagtgccttggaaccttaactcatctgactcttagaaaaatgcccatggcaagatcatcattctgtatgacgatgatgaaaggctggccagtcaggcggccaccaccatgtgcgagcgtggatttgaaaacctcttcatgctttccggaggtctaaaagtcttagctcagaaattcccggaaggactgattactggttccctgccagcatcttgccagcaggcccttcctcctgggtctgcccggaaacgatccagccccaaagggccacccctaccagctgagaataaatggagatttaccccagaagacttaaaaaagatagaatattatctggaagaggagcaagggcctgcagatcatcctagccgactgaaccaagctaactcctccggaagagagtccaaggtgcctggtgcccgaagcgctcagaatctgccaggtggcggccccgccagccactcaaacccccgctccctcagcagtggtcacctgcaaggcaaaccctggaagtaaagactttgtctcacttaggcaaataaatgttcttcctcttttcagaacccctgagcatttcccaagttgggtcatttccagaaacttctgcagaggaaagaccatgacatatgtatgggataggcctcttccctgtccctgtctccagttcctctcccctcaggaggccacctcaggaaggattttgacaggtgaccataaaaaccagaggtgtgacaggctctagtctcctccctgttgtttacagcatatttaagtcttgtgaaactgtataggaaaaaagtatctacgtttttagtttttttgttttgtttttttttaataaggtccagcttgttgggtctctctgtgttgttttgtaaatacttcagtcacatctgcccgtgtgcctgtccctgccaccttttcattcactgttcttgacttcatgaaggcttctccgggcagtcttggtgtgagaagctgtttccaagggtgcagatgagccttaggttccagccgcctgcagaccccaccccagcaggctcactcagcaaggagctctctgcccagcatattgcaggccctgttttgagtatggaagccagtgcctgtgtactcactgaaattgaagatgaggaaagtagctgtacactcactgaatgctcccccttactagatatttcctggagccagaaaggtatgcatgtgggtgtcttcacaccggggaggagggcctctcatgggaaagccctggccaccacaccggcctgtgccccttgaagcccaccaaagcggccctcacttgtggtcagtatatcagttatgacgcccattgcccagcttcagtccatccatgttagatggacagaaattatggccagttgaaaataccagctttggttggacaactgtggacacacaaggtgaagaggactccgaagtcctttgtcagggctgacaacctcgtaagcccttgcttagaaatacagtattagtctaattgagtaattagtgcaatttcctgcttacttttcattctcatgactgaactgtgattaggaagttgtgattatagattctggttttggccggaattttgaatcagcattaattgaattgctaaatgactgacattcattccatttaattgggggaacaaaaggcctcaggtaaggatgaggaactctgaaatcagatggaaaagagcggtgttaatttttatggtctgtgatcgtagctgtgataagggactgaggaataaattgtgctctttgtcatggcaaccagcttctgaaaagcccactgaaaattgcctgtcctgctggtaactgctacggggtaagatttgccttaacagtactattttctcgccaccaaaaaaaaaaaaaaaaaaaaaaaaaa

SEQ ID NO: 24921 - DNA, 3459 bp, Homo Sapiens
agcctaattgcacaaaggacagcacatctggtagtggtgaaggtggaaaaggctataccaaagaccaagtagatggagttctcagccttgaaagaaaaagaagagtagtccaaggtgtggtagaaataaggaaggaagagcattgatgcctctttgttctggggatttttctgaagaaagccatgttatcttgttggttagcacgattatgcaaacaagttgctcagtgacaatttggctcaatggggaggagtcttgcaataatactgcatccattgcataaagctttatggatattggaacattgatatgggatggtggacctgtacctaacacacacataaacaaatgtaaaaattactatgaagtacttggagttacgaaagatgctggtgatgaagatttgaaaaaagcttatagaaagcttgctttgaagtttcatccagacaaaaaccatgcacctggagcaacagatgcttttaaaaagattggaaatgcttatgctgttttaagtaatccagaaaagcgaaaacagtatgacctcacgggcaatgaagaacaagcatgtaaccaccaaaacaatggcagatttactttccatagaggttgtgaagctgatataactccagaagacttgtttaatatattttttgggggtggatttccttcaggtagtgtacattctttttcaaatggaagagctggttatagccaacaacatcagcatcgacatagtggacatgaaagagaagaggaaagaggagatggaggtttttctgtgtttatccagctgatgcccataattgtattgatcctcgtgtcattattaagccagttgatggtctctaatcctccttattccttatatcccagatctggaactgggcaaactattaaaatgcaaacagaaaacttgggtgttgtttattatgtcaacaaggacttcaaaaatgaatataaaggaatgttattacaaaaggtagaaaagagtgtggaggaagattatgtgactaatattcgaaataactgctggaaagaaagacaacaaaaaacagatatgcagtatgcagcaaaagtataccgtgatgatcgactccgaaggaaggcagatgccttgagcatggacaactgtaaagaattagagcggcttaccagtctttataaaggaggatgaactggaatttttatttataccttttagcgtactctttattttttctgtaagtaagtttggtttcatcatgagggatgaaggaaaagatttgatactgaaaactaaactgaatagttggttcctgaaatcttggactgtttatgacctactggctcctttaaatagtaactgaaaactaaaatggaatattttagttaacgcttctacaagtattttcattttaaaagcttacatgattcctaactaaagtgtcatgagaaaggattatcacacctgtagcaatttccagttttagtgattctccattttttcccttgtcatgtaaatatttatggaatgatcattttgtgtacatacaggttactgcttttttatttaaattcttttagtgtttagctccatgagacacttcagtttaaattgatggaataaatgttatatgacacatttacattttccttatcaaggtgtcaaatatgtggactttaaacaatgaaactttttcaaaaagaaaaaacaaaaactttaactttgtgtaaaatcttatagtattatcagcttagagggaattgatatttttaatattgccgttatattccaaaatatatattgagataaatgaactggtgtagaatatcagtttgctatttagttttatgaattactatacatatacatgcatagaaatgaaatgctatactgataaattttaaagaaaatatgaggaaatggctataaatattaaactaaaagggtcttcaacagtaaagtgcagttatgtcatttaaaattccaatactttaaaggccaccaaattttgatgtatatgtccttgaagggctgctaaaatttatgaagaggactcacattttcccccatagaaatttgcagtttcttggtgatcatttaagcaggatccaaagaagttcctttacaaataagtaataagaaaaatgagtactaaaatacagctttgtgccttttaaccctatgccaactcctaaacatataagtagattacagtatacttatctgatcagagcatgatctgtttggccacatgcaagtgtgagcagaaatagagcagcacgtagaatagtaacttaaagcaagtcatcctttaaaaattctgagctaaaatctatttaccattgagtaattgaattaatcccataggaataagctccttgtaagtaaatccatgatatgaattagaaaaaaaaaacagctggaaattgaagtttttgatgcctgtatactggatatgaaactatttgatttctagtcttctgtgtttagcagttgtaatattttaatgattttgcttcatactcagttaatggaacataaacatatctttgatacttctttgtgagtgagagaatgctagatagggtggctttgttctttgtttaagttttttttcctgaatgtagttaatttatggcatctgttgaataaaactgctaaaatgacctcttaaaaatgttctgttgtatccccttttccaggtgaatcaatagaaatgcctgattgaattagtaggttaaactaaacaacatactgtcataggaaaactggagagcttaaccaacttgctcttagaaatgttaccttaaaaaaaaaaaaaaagcagtgcttaagagaaaatacaattttaattattttgttgagcctgcagagtaagtttttaaaaatataagttcatagcattttaattaactttgaaagttcatatgcatcagaaaatttatgaaaatttgaatgaaaaaaatttcatctatttatttttctaattttaatggcaaatttacactattatggctgataattctgtgaacttaccttcttgttgactgattctttttcccttaatcccagctttaaggagataggtgaagttattgtacaaagttaagtgataccataaagtatatattataaagtcatacatggcttttggacagtattatatttcagttgcagtgctgcattccattaaatttcataaaatgctagggaaaatgtgtttgataaaattttctgcagtgagaaatgacagactgagtgcctgacaatttaagccacatatgaagtatgcaagtaaagattcagtccttaatgtcatctatatcatggtataaaagctcaacaagtatcttataatttggagttaactttataaagtaagaagagtttggatatcttgataaaagattttcatgtttgctgctttttttataataaaaatcccaacattttgccatcgaaaaaaaaaaaaaaaa

SEQ ID NO: 24922 - DNA, 985 bp, Homo Sapiens
gtagacagatccaggctcaccagtcctgtgccactgggcttttggcgttctgcacaaggcctacccgcagatgccatgcctgctcccccagcctaatgggctttgatgggggaagagggtggttcagcctctcacgatgaggaggaaagagcaagtgtcctcctcggacattctccgggttgtgaaatgtgctcgcaggaggcttttcaggcacagaggagccagctggtcgagctgctggtctcagggtccctggaaggcttcgagagtgtcctggactggctgctgtcctgggaggtcctctcctgggaggactacgagggcttccacctcctgggccagcctctctcccacttggccaggcgccttctggacaccgtctggaataagggtacttgggcctgtcagaagctcatcgcggctgcccaagaagcccaggccgacagccagtcccccaagctgcatggctgctgggacccccactcgctccacccagcccgagacctgcagagtcaccggccagccattgtcaggaggctccacagccatgtggagaacatgctggacctggcatgggagcggggtttcgtcagccagtatgaatgtgatgaaatcaggttgccgatcttcacaccgtcccagagggcaagaaggctgcttgatcttgccacggtgaaagcgaatggattggctgccttccttctacaacatgttcaggaattaccagtcccattggccctgcctttggaagctgccacatgcaagaagtatatggccaagctgaggaccacggtgtctgctcagtctcgcttcctcagtacctatgatggagcagagacgctctgcctggaggacatatacacagagaatgtcctggaggtctgggcagatgtgggcatggctggatccccgcagaagagcccagccaccctgggcctggaggagctcttcagcacccctggccacctcaatgacgatgcggaca

SEQ ID NO: 24923 - DNA, 4012 bp, Homo Sapiens
cgggacgctcctcacttcctagatgggatggcggccgggaagaggcgctcctcatttcctagatgggatggcggccgggcagagatgctcctcactttcctccagccgcgagaccccctccccttccgcctcgcggcgcttcctcgcgccgcggttttctctctccacccccgacaccgcggggctccccccgcccgcccacggcgggccccggctgcccgatccccctcgcttcccgcgctctccagcggggccccagccccggccccctctctccctcccttctctctaattccccttccggacgctgccatcatgttgaagcctcagccgctacaacagccctcccagccccagcagccgccccccacgcaacatgccgtggcccgtcggccccccgggggcacagccctcccaacggcggcctcccggggccgctggccacctctgcggctcctcccgggcctccagcggccgcctccccctgcctggggcctgtggccgctgccgggagcgggctccgccggggagccgaaggcatcttggcgccgcagccgccgccgccgcagcaacaccaggagaggccgggggcagccgccatcggcagcgccaggggacagagcacaggaaagggacccccacagtcacctgtgtttgaaggcgtctacaacaattccagaatgctgcatttccttacagctgttgtgggctccacttgtgatgtaaaggtgaaaaatggtaccacttatgagggtatcttcaagacgctaagctcaaagtttgaactagccgtggatgctgtgcaccggaaagcatctgagccagcaggtggccctcgtcgggaggacattgtggacaccatggtgtttaagccaagtgatgtcatgcttgttcacttccgaaatgttgacttcaactatgctactaaagacaagttcaccgattcagccattgccatgaactcgaaagtgaatggggaacacaaagagaaggtgcttcagcgctgggaggggggtgacagcaacagcgacgactatgacctcgagtctgacatgtccaatggatgggaccccaatgaaatgttcaagttcaatgaggagaactacggtgtgaagactacctatgatagcagtctttcttcttatacggtgcccttagaaaaggacaactcagaagagtttcgtcagcgagagctgcgtgcggcccagttggctcgagagattgaatcaagcccccagtaccgcctacggatcgccatggagaacgacgatgggcgcactgaagaggagaagcacagtgcagtccagcggcagggctcagggcgggagagccccagcttggcatccagggaggggaagtatatccctctgcctcaacgagtccgggaaggtccccggggaggagttcgatgcagcagctctcggggcggtcggcctggccttagctctttgccacctcgtggccctcaccatctggacaacagcagccctggcccaggttctgaggcccgtggtatcaatggaggcccttcccgcatgtccccaaaggcacagcggcctctgagaggtgccaagactctgtcttcgcccagtaataggcttctggagaacttctgttccacctcctcctgcagtgggccggatgtatccccgcgttctcccaagtctgctgcccctgccccaatctcagcttcctgtccagagcctcccatcggctcggcagtgccaacctcttcagcctccatccctgtgacctcatcagtctcagatcctggagtgggctccatttctccagcttctccaaagatctccctggcccccacagatgtaaaagaactctctaccaaggaacctgggagaactctggagccccaggagctggctcggatagctgggaaagtccctggtcttcagaatgaacagaaacgattccaactggaagaactgagaaagtttggggcccagtttaagcttcagcccagtagctcccctgagaacagcctggatccttttcctccccggatcttaaaggaggagcccaaaggaaaggagaaagaggttgatggtctgttgacttcagagcccatggggtctcccgtctcctccaagacagagtccgtatcggataaggaggacaaaccacccctggcaccatcaggaggcactgaggggccagagcagcccccaccaccttgtccaagccaaactggcagccccccggtgggcctcatcaagggagaagacaaagatgagggccctgttgctgaacaagtaaagaaatcaacgttgaaccctaatgctaaggagttcaatcctacaaagcctctgctgtctgtgaataaatccaccagtaccccaacttctccggggccccggactcattcaactccctccatcccggtgctgacagcaggccagagtgggctatacagcccccagtacatctcctacatacctcagatccacatgggaccagctgtgcaggcacctcagatgtatccatatcctgtatccaattcagtgcctgggcagcagggcaagtaccggggagcaaaaggctcccttcctccgcagcgctcggaccaacaccagccagcctcagccccgccgatgatgcaggccgccgcggctgctggcccgcaccaacaccagccagcctcagccccgccgatgatgcagccgccgcggctgctggcccgcctctggtggctgccacgccctattcttcctacatcccctacaaccctcagcagttcccaggccagccagccatgatgcagcccatggcccactacccctcacagccggtgtttgcccccatgcttcagagcaacccacgcatgctgacgtcgggcagccatccccaggccatcgtgtcatctctaccctcagtaccttctgcagagcagtaccccccaagcctttatgccactgttcaccagtctacccacaccatgccacacagctccatgcccaccagccgcagccggtaccacgctactggaagccagccgcagtcccagcatgcggcccccagtcctgtccaggtgccagcatcaggcggggcaggccccacacttgggcagtggacagccacagcagaatctgtaccacccaggggccctgacaggcacgccgccctctctgccaccgggaccttctgcccagtcccctcagagcagcttcccccagccagccgctgtgtatgccatccaccaccagcagctgccccacggcttcaccaacatggcccatgttacccaggcccatgtccaaactggaatcacagcagccccgccccctcaccctggggctccccacccgccccaggtgatgctgctgcacccaccccagagtcatggggggcccccccaaggcgcggtgccccagagtggggtgcctgcactctcagcttccacaccctcaccctacccatacatcggacacccccaaggtgagcagcctggccaggcgcctggatttccaggaggagccgatgacaggattcctccccttccaccccccggggaactgaagattgtcctggccgcgacctgagacctccatgagtggagggaagagtgatctatgtctcttcccccagcagctcggaccactcccagccccccatccccccgttccccaggggagctggggaattcctgccaagcaccttgaatgggaggggcctcacagagggcagggccagggtccagcaggggtggggggttcctgttctgcccctgcccgtccccacccagtcttgccctcccatcctctcatctattcccccgctggagacggaagatcttttattttctattatttataacttcagacttgggccccctgttctttctttcccattaacttgagtgacctgtgtgagagacagacagatgccccacgaggatggctggacaaggacttttactttttattacataaaaatattaaaaaataaataaaaaaaataaaattttaaactaacttaaaaaaaaaaaaaaaaaaaa

SEQ ID NO: 24924 - DNA, 3750 bp, Homo Sapiens
gtcgaagcggctgcagagccggtaacggtggtggcggctgttgggccaaaggcgaaagacgaagaggaggaggaagaggagccgctgccaccgtgcgaggcggtgcgctgggccccagtgggggcggtggcggaggcccggcctggggcaaccgcgtttttagaagaggcgacggccgaggagcctggcgcggccccgggctccccgccggattcgccgggccggacgctgcggcggctgcgggcagagcggcggcggctggactcggcgctgctggcgctgtcctcgcacttcgcgcaggtgcagttccgcctgcgccaggtggtgcgcggggcgccggcggagcagcagcgccttctgcgggagctcgaagacttcgccttccgcggctgccctcacgtcctaggttacgaagggcccggcgaccccgccagcgatgagggcgatgggctgccaggggaccggccacggttgcggggcgaggaccagggcttgagtgagcaggaaaagcaagagcgtctggaaacccaaagggagaagcagaaagaactgatactgcagctcaagacccagctagatgacctggaaacgtttgcctatcaagagggcagttatgactcgctgccacagtccgtggtgttggaaagacagcgggtgatcatagatgagttaataaagaaactggacatgaatctgaatgaggacatcagttccctgtccactgaagagcttcgtcagcgtgtagatgcagcagtggctcagatcgtcaacccagcccgagtcaaagaacagttggttgagcaactgaaaactcagatccgagaccttgagatgtttatcaacttcatccaagatgaagtgggaagccccttgcagacaggtggtggacactgtgagtgcaaggccggtgggaagacaggaaatggctgcagcagaacaggcagcagcagaacgcctccaggaaacagcaaaacaaaggcagaggatgtgaagaaagtccgggagacggggctgcacctgatgcggcgagcgctggccgtgctccagatctttgctgttagccagtttggttgtgccacaggccagatccctccaaccctgtggcagagggtccaggctgacagagactactctcccttgctgaagaggctggaggtgtcagtggacagagtgaagcagctagccttgaggcagcagccacatgaccatgtcatcacctctgccaacctccaggacctctctctgggaggcaaggatgagctgactatggctgtgcggaaggagctaacggtggctgtgagggacctgctggcccatggactgtatgcctcctccccagggatgagccttgttatggctcctattgcttgtttgctgccagccttctcctcggccccagaggccatgcacccgtgggagctctttgtaaagtactaccatgctaagaacggccgtgcttatgtggaatccccagcccggaagctctcccagtccttcgcccttcctgttacgggaggcactgttgtcacccccaaacagagcctactgacagccatccacatggtgctgacagagcatgacccttttaagcgcagtgcagactcagaattgaaggccttggtgtgcatggcactgaatgagcagcgtctggtgtcctgggtgaacctcatctgcaagtccgggtcactcatcgagcctcactaccagccctggagctacatggcacacacaggctttgagagtgccctcaacctgctcagtcgcctcagcagcctcaagtttagcctccctgtagatctggctgtgcgccagctcaaaaacatcaaagatgccttttgatgagagtgccctaaccccagacaagctccttgttcagtagggatagatgtgctagtcttctagcataggagcaaggaatcagaggtggggttaaaggcatttttcccagaccctgctcaggcagtcggccaaatgagtgcaaagtctgttttccccaccaacttagctctcggaaagatgtgctggagggaccctcttgttaagaaggttctgccaggccgggcgcggtggctcacacctgtaatcccagcactttgggaggccgaggcgggcggatcacaaggtcaggagttcgagaccatcctgtctaacacggtgaaaccccatctctactaaaaatacaaaaaaattagtcggacatggtggcaggcacctgtagtcccagctactcgggaggctgaggcaggagaatggcgtgaacccaggaggcggagcttgcagtgagccaagatcgcgccactgcactccagcctgggcgacagagtgagactccgtctcaaaaaaaaaaaagaaggttgtacccacagtatacgtgtgggcacttgtgcttgagcctgtattaaaggaatcaggccaggcacagtggctcacgcctgtaatctcagcacattgggaggctgaggtgggcggatcacctgaggtcaggagttcaagaccagcctggccaacatggtgaaaccccatctctactaaaaatacaaaaattagctaggcggggtagtgcatgcctgtaatcccagctactcaggaggctgaggccggagaatcgcttgagcccgagaggtggagactgcagtaagccaagatcatgccactgcactccagcctgggcaacacagggagactccatctcaaaaaaaaaaaaaaaaaaaaaaagacattcaacttgaggctcctgttagttaagctatcttctttcacttgaagcaggtttgagaggcctaggccagaatttaaattccttttatgaatagatttccctttcttcctgaccccaaggtcagaggagactatatattccatggctgcctctaagactaggaataggaatatctgaaaacagcatttctaagggtggtaaccacaggtcgattttaatacgagtcctttttcttgtagaggtaagtaaaatcttcctgacaaggtagtcctcttttcacggcacagacaatgggctttctgtttatgaggggtgagaagtgatgtttgttactatgttctccagcaagtaaacattcctctgctcacctcccaacaagactaacagtctttttagaagtaaatatattcaagacaaacgagaaaatcctggctacccaagtcgagtatatacaggaatacaaatcggtaaccagcagctgttcctcaggttgtgactcactgagcaccacttgtcctggaggctggatgatggaggacatctggttataggtactgtagcagggataggtgccacaggaggataggaactacagcagatcgctgtttccagaacggggaggagtatctcattgtgaaacagactctagagtggttctatttggtcttcagtgttttagcctcattagttcatatttggcatgcagcttgtggtgagtactgttctaggactggccaaaaatgggcaaaatgtatcactccaaacactactgattcagcattgttttcatgtcttaaaattgccacctgcactttgtttctgcactattatgtagtgcattttaacttaaattttttccagcaacatgttacttatttaagatacattactgatatttcattataattagttcaccttccctgtgaaacaagagaattgtaaaatgttgtggaaaatgatacatatgtggatgctaatgaaatcatagtattttgtgtagcttctctgaaaaaaaaaaaaaaaaaaaaaaa

SEQ ID NO: 24925 - DNA, 573 bp, Homo Sapiens
ctccattccattatacctttgagtatataaaacagctacaatattccagggccagtcacttgccatttctcataacagcgtcagagagaaagaactgactgaaacgtttgagatgaagaaagttctcctcctgatcacagccatcttggcagtggctgttggtttcccagtctctcaagaccaggaacgagaaaaaagaagtatcagtgacagcgatgaattagcttcagggttttttgtgttcccttacccatatccatttcgcccacttccaccaattccatttccaagatttccatggtttagacgtaattttcctattccaatacctgaatctgcccctacaactccccttcctagcgaaaagtaaacaagaaggaaaagtcacgataaacctggtcacctgaaattgaaattgagccacttccttgaagaatcaaaattcctgttaataaaagaaaaacaaatgtaattgaaatagcacacagcattctctagtcaatatctttagtgatcttctttaataaacttgaaagcaaagattttggtttcttaatttccacaaaaaaaaaa

SEQ ID NO: 24926 - DNA, 55266 bp, Homo Sapiens
cactagtgatgctggaagtgctcccaagaagcagagaaaagtcatgacatttgacattacaagaaaaactggatttgcttgatatgtaacagagactgaggtctgtagctggggttgcttccatttcagacagatgattcatcttgtaaacaggtggtgtaaacttactgtatggaaaaatacataacagtaccacagatgtattttctccttacgaacatttccttttctctagcttactttattgtaagaatacagtatatcatacatataacatacaaaatacatgttattaactgttgctggtcaacagcaggctgttagtagttaagtttttgagagtcagagttatacctggattttctactgtgtatggtcagtgtgccaacccctgaaattgatcaagggtcaactgtaatcctaaaagaatctaatacaatattgtaaacagtaagtggtcaataaataaggaattgaactaataagaatacataaatcccagaatatgtgcaacctgatcatagtacacagagatctctctatatatctcttttcttagttcatgctgttctttcaggtagaaagcgccttattttgaattagttgtctttagagcaaaaatccctccaagagtgctgtgtggtttcctatgcacaacctggaatagtccattgcttcatgcctaccctggacatgaagggccatgccgcagcggaagtctctatgcacccacccccgtctatacctgagcaacacattcctctttgctgctctcttacaggctacagagtgcggtggcgccagcacagagctctgctcaacgtccctctgtgctttcacgatgctgatggattatgaaggtagggaagaatgtacagccaggaggccattaggagggcaactaatttataaaatcacatttgtagaatttaatgcatccaacaactaccaggggaaaggtgggcaaaagctataccaacaccacccaagtcaaaaccaaaacaacaggaaaagaaaattatgtggatgtagaatttctgataacatcattcccaaggtgccttatccaagaggaactgctacaataatattttaagtggaaataaatacatgctggaagcattatatattagtagagtatttttttttcccaaagtactttctcaagcacatcaacatgagccccctaagagacatttcacattaaaaataaaatgtctgcccactgctggtttctcaatctgcctccaccttctgtcccctttaatgaactgggccacgaggtgagtcagagaggataaagggagtggtaagaatttgaggagagaagagagtgaggctaaaataggaaatcaggaaaagcgattcggtccccctgtccctcacatggggccaccctcttgttgcccagtgtggcttcttcttgagggttctgcatggttcctcaatcccagggaattccgcaggacattccacccaagaccattgggctcccacctctactcttttgccagttaatgaataggcaggaatttcactgcctggaaagaggaacaatgctttctggtccttatttcacatctaaaatagagaggtcaattgatttattcctaaatatctttgaacactaaaatagaagttttacagcatatatactacctggttgctctagacttaagccagggaaaagtacagattcaacatttaaaattgagatagacgctttccacttaatgctaccagtcttgctttatttcatgagaatgagaatataataatatggcatacgttcatttgggggaaagattgatgtcttataacataatttataattacagaaaacatgtgagttcactgggaataaataaattttgaagataataagatactttcacttatgtcgtaatttctatgtcatttggtgtaggatgtagagatattaacgtttacacctaacttaagtttgtcatctaagacctgaaagggttttgtctatcagctgcacccctgggtagagacacaaccttggggaaggcctcagccccatccctcgtacagcaggaatgagaacagccctgcctgttgggaagcttgagggaggctatggacgtgcagcgcttggcagagggtctcgtcatggaaggttccagcaaatgtgagatacttttatgatttcattttctccaaaagaaagggaataagagaagaggggaggaaataagactaattgcgagagataaagtacaagggtgagggaaggaataaggagacatgacggcagcgtggagcagccgaggggggagattgctttcaccacttcccagcatctattgcagattccaccctcaaacatgttgtaaggactctttattcaaggtaatgtttgaaccctgctgagccagtggcatgggtctctgagagaatcattaacttaatttgactatctggtttgtggatgcgtttactctcatgtaagtcaacaacatcctgggattgggacccactttctgggcactgctggccagtcccaaaatggaacataaggaagtggttcttctacttcttttatttctgaaatcaggtaagacatagtttttttaaattataagaattattttttctcccacaatgtagtaaaaatacatatgccatggctttatgtgcaattcatttaatttttgattcatgaaacttccagttgaaaatcttgtataagattgaggaattcttcaagaaataagtttaagtttcctgtgaagattgtcagggtgctggaatgaatgggcagagaaaataatgggtgatttttcaaatctaaatgagtgcacccacataatggccagtctaattgaaaaagagccaatgtagctaattatgcaaaggacggctaagctctttgcctggttctcagtttgactaatttatatcatctctgttacggtgtcatgctcccctcacttgcaagttaaaacagtgaaatatctctttgaatatattccgttctctcaccagttcatggtggcggcagggtcggggactcagcatttctccctttgttatggcctgaggaaggctttccatcagtatacgtttgcctcttatccccggaaaaatcacacgcatccatttgccagatgctgtgtgcagatagtgatcaacaaatactcagttgcttgggttaggtccctacatttttacacatacatacatacctgtgtgtgaatgtgagtgtgagtgtgtatcctttacaaatactagcttatttagctcgtggtataggtagggtagcatattcatcctcattttataaacaaagaaatcagacttaggaatatcatgttatttgctcagtgaccaaattctcagatctgggaaataaagaaaactggatttaagccaggtttcccagaaggaatctagggctcttctcacttttcagctttgtttaagcctttgaaagaatattctaaacatgtcctagtacttctttttctttaaaaaaaaaaaagctttattgagatataattaacatatagaattcacccatttaggcatacaatccaatggatttcaagatattgagagttgtgcagccaccatcagaataaattttaaaactattcatacccccaaaaacgcactccactctccttagctgttacccccaatctgcagcttctggcaaccactaatctactttctgtatttatatctttgccattttgaacatttcatacaaacggaatcatacgatttgctagtagttcttcatgtaaataatgtacgcttgaaattcaatctataaattaccagataaaattttacaagttgcactttagagtcaaatacatttgaatttagtggaagccattcaaggagctatcaaagaaaatacagagcaggagaaaattaaagaaatttttgtaagaaattggtgtatgttggggggtatgaatattatatttcaatgcatggaaactaggacatagatcactatgaacttattcagtgggctacacccaaaggctagatcaaacttctctgccacaggattaacatatgttttaacccacctggtgggcacattctctcataagctcttttggaaagccaggttttctgtggatgtatcatctttccagtgtgctgcaatgcccggggagagggaaaagtttcttttacagccatgcttagtgggaagtggagaaacatcttccatttcacaaattaagtcttttacacatgcaaatatgcatacacattcacacaccacagtgaggaagaaattctcacaccattaataaaatacatttgcatcagtagcaatatacatctgcattttgcctataatataaatgtatttttccactaaaagatttgtttgatgtttccttgccagcaaataagccctatcaaatcctattgccatatgagtcctagaggtgaataagagaagaaaaaatgggggaaaattatttcaaactgaaaagagaaaagtttgattctgttttgggatatttcctagggacatgagctggggaggggatctcagcagcgatgcgctatgaagcatagtaacataacacagagaacttaattgaagggggaaataaatggaagttttctttttttgaatatcagttgtagcctgctctgctatacttcaaaaaaactcttcagaaagtttaactgaactcactgtaggacacactttgtggatttattgtgtgttttgaagtcacactgtgagctatatagaattaaccaaaacacaactcttcttgaaaatgagagttcaagttggcagaaagtgcggggtaaagacatggatatgggcctaaagcatctatttctttgtgatcttttgatatatctctcaagtgctttttagtggattagctttagaatgcatcagccaactcctgctcaataatccatttttccagcccggaatgtcttaaattgaggaaggacaaagtcccagaggtggggagcagggggactttggccgaggactttgcatgaatcgatgagcatgcatccacctccctgtcctgccccttgtgctctgtgtaccctcaggaggtcaggacaggcctttctgagaatgaaaatctgttcatttgctttcctactggatacttgtcatcagcatacaaaccaatgcgctctgcagtgtgtcatctttcagaacctcccctgaccgcatgttccctggagggctcgctgtcttcagagccaggcttgtctcctgctgcagcctccactgctctcctagtcactctgtaacccaccccctctgcctgcggcccccaccacgcccctcaaagtggtcaaggttgtcctgttgtctaattccatggagcttgcctgtcttcattttattagcctcttttggcctctcacccttgtgcaaatcactagcattctgtgccaaggacggagctggcatctccaggcttggaatagagctaccaaagctcagccagatgtctggaagagcctcaggacaaggggacaccctgtagccttgtggtgggagcacagctgaggcccccttggccaccctctgccacgaccaggcagaaagcagctttcggacagattcgttgtctcagatttgatctcaaagaaaaaccaagaccagtatttgtcccaggtcctgcttttttacaatttcctccgaaatccagatacctgtcaacaccttggaaaaactgacttctccccaattagtagtgttgtgtgactgtcataagcccagtacaaaaatggccttctttgttggggagcttcttaccctccagtgttttgcccaatttttgtccaaggtggcaacataatttagttcagttcttgtttatttccaccatcatctatgcaccaaaatttatgtttctcaaggagggaccattcagaggatgcttcccaccggttcaagtgacagtgccagaaccaaagcgcatattgtaggaaatcaaacaatggcctccaagttccatttctacccagggatgaacaaatcaacatcaatcttggtaacacaactgccactgatggtgccttactcttctctcatgacatggcacaatcaatagcaaacataaaatttgttcttgtttaaggatttatatccactaatatggtaacatagtagtggttccatagttctaacctgtttgtcaatccagttaatcttttactatcttgcaatctgctaatgaaactgtttttctttgttttataatttcaacttttagagtcaggggtacatgtgcaggtgtgttacataactaaattgcgtgacactgagctttggggtacaaatgatcccatcacccaggtagtgagctaaatacctactaaataggtagtttttcagcccttgccttgctccctctctcccttctctggtagtccccagtgtctttagttgccatctttatttatgtccaaatgcccgactgtgtgttcttaactaaacattttgattcatagctacccattctacttccagtaaacagaaagttttatttggttaatgctaaccaaatagattaaaaggaagtcatgacaattagacattgacattgatttactgaccatttattccacttggatctcccacctctaggtcaaggagagcctctggatgactatgtgaatacccagggggcttcactgttcagtgtcactaagaagcagctgggagcaggaagtatagaagaatgtgcagcaaaatgtgaggaggacgaagaattcacctgcaggtatttccattgtcgttgcacctacgcaggaatctgtaattcagatggcaagtaatttactcacaaatttattaatgatttaagaggaaagagaaatttatggagccagagtttggaactatatttgctcacagtatgtgaagccatactaacagcttcttgttaaggtttattggagtctttgttagaaaaataccctcaaaggaagttatttgtttttacaccggacacaaacattagcagttattgttctgagctccagttttcaacatcatcatcagtaaatgtttgttgaggatcaggtgaatgaaagtgtcctagatagatctgagcaatgacttatagctacaagatccagtgcctgccctttagtatttaaggtgtagtcaaagaaactggatataatgttaaaaaaaaaaaaaagacagcccaagtgaggtacaggcataatcaatgcatgctctacccagatccagaagaaagaacagtgcctaaggttgaggcagctagagaaggctcagggaggaggtgggaactgagctgggtttggagttgagagagctcttgacaagcaccaggaaggcaggggaagatgcggccctgcaccttctgagggggaccattaagagatgaagttgactaaagcagagactttgtgtaggtgacgggcttgggaaggtagctatggaatccagactgagcacccatagcaggaccacgggatggagatgggaggggtcaggggccagggtggggtggaatgtggagcagaggttcaggggaactgatcagagttgggaggtcatggagacggactatcttggcgaatgggttcaaagcaaccagagttgcttctttccaacccaaaaacaaaaattaagaagatgagtgaagaagaagtaaagcagttgaaacaggaagaaagggaaaattatgagggagggaaggtaagggcagataagatttgctgccacgttggtgtattttgttcagtacttcatcgatgccatgcccaaataactgaaagaggcagcaattctgagctctctggtccctcaagatattcaatgatctttagcatgtctcacttattaataaacatttgttttctttaaataaagaaaaatacttattggatttcctgcttcgttctgcagggcattccaatatcacagtaaagagcaacaatgtgtgataatggctgaaaacaggaagtcctccataatcattaggatgagagatgtagttttatttgaaaagaaaggtgagtacattttcttcctcctcctcctactgtcctccccatcctcccactcttcctctttctctattctatctttaatttataagaccagaggaggaaggcactatcgtgttataaaactgaattctgagttaggacaggatttgattactaactaaccatgtcagcttgagtgtattacttcacctcttagatttaattttttttgttcaaaagatgaaaggattagatttacaaaatcacttctacctctatgaccctgaaaataagatttttaaaatattattttatatttaacaaggagatgggaagtctaagcattccttttggtcttggcttcttattctgcagggtgaccatggtccttgggccctaacatctggatgaagccttgtaaaacagaaatactgaggtgttttaatcctcagaaacatttagattgggacacaaatcttatttttactcttaaatttttcacattttgggggacatggtctatatttttctcagatttctgaaatgttgtcttttaaaaatgtgtaaaagttacagttccttttctatagtttattttaaaatgtgggtcaatagtcccactgcttagaataagaggcagacaggatttcaatagaaattgcatgcctttttagatgtgcaaatgtttcattaagcatttcccatcaagtatatcccatcaagtatgctcccattaagcatatcccatcaagtataaatatttgaagggatgcatgacactttaaaaactgtttcctctactgtgttggtagccaggtattaagactgttaatagtaacaatttagctctccaaacattctgcatcccaggtgttaaagaggactggaaacaccttagttcttgtattcttgaggatgatttgccatattgtgtctagtattacggcaaaactctaagtagcattttaaatagtatttatttgggttggaattatttctatgcattgactcatcttcctgggtttcattagctgtacgcattgtacttccttccttaccactatttatctcgaattcttgagattaaagtgcagattaaatctaaactttatctggtgaagttattagttcttacaagtagcaagcaaacggtaaactaaataggatcacctaattgtaccagattttaaaaaaaaaaaaccctgattctcctgattctctctacaaaatgctaacatttaaatatgtcatttgtaaattgttaaccagaaggaacatgggaatgactgtaggttgagtttgaagtctgaagtttgaaggcttagtttgcttgttttcaaagtgacagaagggagcaaaaggttatataaactctgatgggtacatacaaaaaaaaaagaagtgaaaagtcaaaagtcagtcattttttggtccttgtttctttgctgtgggatattgacctgctactaacttacctgccagggttttgccaggaacagtcagtgttagatcacatttacttctgccacttgccaccagccacactgccttcaccaagtccaagaccctatcaccactggttggggctacttgtagctgtacacatgatctctaagaaatgtaacttccctgtttaaagcccttcctagtgcccttaaaataagacccaaagacttcccaaatgtgctagggcccagcattatttaagtaacccccagctgctgtttgcttggcttgctaaacttttctacactggccttacttctgttccttcaccaccccaagcacacaccctcctgcctgggaccctcttcacctttgtcctgctgtgccagctccttcttatctcctaggtgtcagctcaatcatcatgtcctttgcaaatcttccttgacccctagacctccctttcacaaagtaccttgagtttacacttttgatgagtgtcttatgtctactgtaatactatgtcccaatgaagatgtacttgcaatcataatacgcagtattgggttaaaagcattagtttgctgtaggtatgttaggagcactttccccatgtgattgatcaattaattaaaaaatggctaaagtgggtaaccttaaatgatggtgtaaatataccttaaacattttatattttcattgaaaacacaagtgtacttgacaccttttgacgtagagcagaggcttttcttcttcgaatatggggtcaccagtagaaggtctctggtgtatttcctgcataaactatgctccagtgcaacatctacaataattactttccttatttttgaagtggaccatatctcgacatttattaatcaatctgaatgtgtaaaacctttagatttttatgaattcctcctcaagctttatagtcaactatatgagtggattgccctctgtggatttgatagcaattttttaaatgattcatgtttcaacttgttaaaaacatttaatttagttaaaaaccaaacaaaaaagagctttgtttcttttcacattcatttctcagtttagatcatctttaattaaatataaatgtaagaaagttggaaaatgcaaagaaatgactcgttgtaagcacataactcacgtggggggaacagacatgggtgggcacactagcaaacacctgccagctgcatgtggacccaggtgggcaccggactgttttaaacacaggagagggcccgttgtctaactggtgagttggttgagtggaagctggttgagaacttttactgcaaaccatttacagtagaccacaattttatagccctgtttggcactttttcatatcactgggagcctgaagaaatagaagtgggttggatctctttcagcctctgaaaagcctgccattcccccatctaaaaagccctttccccattctctcactctgtctcatcatgtatgtaatatgtatcatcattaagtgatctcattttatattgtttccttgaatatttcctgtaacccccctgcctgattccactagaatgtaagctccatgacggccaagcctctggctgcactgtgccccgtgtgtccccagcatcctggtggggctcgatacacagagagctcataagtagcatttgaatacatgaatcaaagaatggctcagtttactgcagcctttttgcagatgcaaaagatgatcttttagaaagcagaaacagggggtctggtgcatgagatctttttctcaacgtgactatgctgtgcagaccttcatgtggtgtcttgtgaaagactttgaccactgtgtggacttcccttcagtgtatctctcagagtgcaagactgggaatggaaagaactacagagggacgatgtccaaaacaaaaaatggcatcacctgtcaaaaatggagttccacttctccccacagacctaggtaagacattccctttcatctttgtgttcatctactgtaaagttgtccctctgtgtctgtgagggattggttccaggacccctgtggctaccaaaatccatgcttctcaagtcccttatataaaatggtgcagtatttgcatataacctacataccttctcttgtataatccctaatataatgtaaatgctatttaatcgttgttatactgtattgtttttatttgtattatgttttattgtcatattgttattttctgtcatctttttcaagtcttttccatccacagttggttgaatttgtggatctggaacccatggatacagagggccaactgtatttaggataatttcatcacttttaattcaaaccacaatatgtgaataagcagatagaaagaatctttttgatgtcgatgttcaactatttttggcaccatagtagaacatggttgctttctattttttcttggatatggaggtttcttgaagacctagaacatagaagaatgcctagtttaaaaaaaatcaatgaaactatgagttttaggccaaatctgagaaaagatcaaagatgactatgtttgggactgaagtaagcatatcaggttagaactctcatcacatgttcgactcaaattgtggagcaaaagagtaaataagatataaaaatgaaaatgaagatacgtgaaattcaaatgttgcaacttgcctattatttattttagtgcatttttttgtacttttcccagtttggtgttaggtggcattaagttctcagtaatgacgcttatcaaataggaacttagtgcttgttactcacctttatccattcccccaacactcaacaaattgcctttgctatatccctatgagatgagcagatcaaatattccccgtgagttaatgaaaactgattcaaccaaatggcaaagtcagagactatcgggggccatggagacactctgggccatttttatgaggtagtctaggctcatctttatgagggaactgaggtctcggggggtgggggttatcccaaataggttcacagaagaaccagaaataaaacctgcctttctagactgtaagtcttgtgattttcatctaaatggttgtctctatacagcaactcatctctagaactgaaaataagcttaaatccctcctccatccccaataattcaagctgcatttcagagaaaaccaggactttggaatcagacagatcaactttgaattcttgatctgcttcttcatagctatttacacttaggcaagttttgttttgttttgttttacgttgccactcagttttctcatctgtaaaatagggataataacaccttcctcaaatggttttattaggactaaaagagagaatgtgtggaaagatgttagtggaattcctggcagatagttcacatggacaaaatggtattaactacaaaaatttttacagagaaaacggtaactgacaaaagcaggtgtttggaatgaattaagaccatggcagccttttgaggcctttatatttctcctgactgtgcaataaaaatattttggctctctaagacttggctgtcacagtagcaatggtaatattagctactgtgccagaagcagcctatcaatagagaaattgaaaatctgaccacacaaatgctgcagcacccagctgaaatgcatttggatgacaatctcagatgggaatcgagagcatctccttctgccttgctaatagcaagctgatttttagaatatagtctaagtgcttcttttccatcctccccagattctcacctgctacacacccctcagagggactggaggagaactactgcaggaatccagacaacgatccgcaggggccctggtgctatactactgatccagaaaagagatatgactactgcgacattcttgagtgtgaaggtcaggagtggttctagaaaatgttttcatttctgcccttcacctgtaaaataatttgttgtaaagccccttcccacagggatgttattaataattgagtaacgtattcacctctcggaaagaagcaaaaccccagaattaacctgaattttttttttttctgagacagagttttgctctcgttgcccaggctagagtgcaaccgtgcaatctcggctcaccacaacctccgcctccgggttcaagagattctgctacctcagcctcccaagtagctgggattacaggcatgtgccaccatgcctggctaattttatatttttagtagagacagggtttctccacgtaggtcaggctggtcttgaactctcgacctcaggtgatccgcctgcctcagcctctcaaagtgctgggattacaggcatgagccaccatgcccagcagacctgaattatttttattaaaatgttacatcaacatgtacaaatataaaactacatctaaactctaagtacaaacttcttatgcttacaactcttacacagtgttaaccccaagacaggtttgcaattaaatagttaaaataaaacaacaaaatcaataaaaatcaaataaacaatatatatttaatgtggtagactttgctgttttgctgaagctaagcaaggaaccagtttttaaatcagcaatccattatttgaatggactgagcaatttaatagtgcacctcaaaggtcaatgctaaaaaattttaaaaaaatcctactgaaaaaactgtcatcgtttcacatttctggctacattagtgcaaaagggaataaataaaggtgagatttgtgtgacagtgtggatatggtactgtgtgacaactcagttctcccatcacttccacctgttcgaatcacggggatcctttatttgtacaccatgttataggtatttgcccttaagcaccaccaatgcatcactgttatattaagtctgcccgttttccttagtactccataaaatttaagtcacatattactctgcctcaccatgttacttcaataattctgaatcaaagtttaagtttgtgaataattttgcaaaaaagagccaatcatgcttctcaacaacataaaaagagaagcgctgtcacttcaggtgaatattgttctccctgaggccatgagcataaacaaaaactccagactaaaaccctgagacggtgccaggtcattcagcagtcagcggaatgatcagaataatttcatacaaagttttaaagatcattattgaaatgaagatgccaaatattgaaaactcctaatggagaacgtagactcctgggaatatatgcacccttgagctccccactggcctgtgcatcccggtctaaggacatggcatcatggaaattctgaacttggtcatgactacaatagttgagggagtattgactaaaatatgtgaatgttacggtttaaaaggaaaatgacatttggattatgctagaaaatcctgagtccttattgccaattttattgccaagtgcctgttgtgaattacatcggaatgagaggcaagtcgcacttaagtgagtaggattctggtttttactctctattttgcttcatccatttcagttttcttcttcctctctgtccttccttcccactctgtccagaggaatgtatgcattgcagtggagaaaactatgacggcaaaatttccaagaccatgtctggactggaatgccaggcctgggactctcagagcccacacgctcatggatacattccttccaagtaagtctcactgggaaaaacattccatgtttaattaaggctctgcagctctatcagacatttgctgtcatttagatattttagcattcctcaagaagtgaacgcctgatgtttttaatttcaaagctaacctcctcccacaatattgcaagtgaaatacgcattcttgctgctcaaaatatggtccacgggtcagcagcagggatgttttctgagagtttgttagaaatccagaatgtcacaccctctgaatctgatttgaataataaccagatcctcagctgatgtgcacacacattcaaacactaatgtcagtaatgaatacattaacatctgtcttcagaaatgcacacacacatgttgctggtgtattttccaaatattttccttttctctttactccttgtctttcttttccctttgtaccaatgagattcaagtctcctaacctttgacctatgagcagacgtcatggatttttgaatccctgatgttttatgtatatttacatcaatgtgtttttctggaatgaggattcgtaacttccatcagattctctaaggggaccacgaatttaaaataagaataagcttcttgctctagaaagtcatgatggttcctagaataaggtttcgtgagtattctatttcacattaattgtgctggaaaacacctcccattccacagtcgcttctggtcttcctcttcattctatgatgactacagggccataccagggctttcaagaatgcagaagtgaggctgagccacagattccacggtggaaagcagctctattgaatttgtacacctcccattccaaatagctagcttaaaacacagcagctgccattttccttcaaaggagaaatacaggaaagacctaagggtccaaaactgggtaaaggcacttccaggaaaccagaaggagaagaggattgcttaagccgctgctggctcctctttccatcctggtaagcatttacaatcagagagggaatgaataaacgcagagggccaccaggcatggagtgcatccaacagccctggccactgggccccactgaggaaggatccagccccatactgcatggtgagacccttgcaagagcacagcttctcctcttggtttttctaagcttcaaggctggtgggagcagagcctggtagaccagaaggaccattcctttaagctatgaagatgcacatttcttggctctgttaggtactagatgagtatctttaggcagggagcactttacattttaaagactgctatcatttgtggttgaataactggaatttgcttacatcaattttccagatggccaaaatgataaggtcactgattctgttgagtgatttttacacatgtaaactgttagaaaaacagtgcttggcagccgggcatggtggcacatgcctgtagtcctagttacctaaagggctgaagcgggaggattgcttgagtgagttcaaggagttcaaggcaagcctgggcaataagtgggaccctgtctctaaaaacaaacaaaaaaaagaaagtccttggaatacagggccaaccttgtttcctagttgccatctctgaacacagccttcatctgattacctcctccatgcccgactgtgcctagcacacagcaggtgctcaatgtttgctcttgaaaaagagtcttatccatgaatgtaaatgttcagtgctactaaaatctttcttgtccattcagatttccaaacaagaacctgaagaagaattactgtcgtaaccccgatagggagctgcggccttggtgtttcaccaccgaccccaacaagcgctgggaactttgcgacatcccccgctgcagtgagtatgatgcacacccagattccaggatttggacctgccctgttcttgaaatcaaaagaaaacatgtgtcagtgcctgagtgcagcctctgaaaagtgacctacaagtcctatgggatgttattggtctttattttattgctggtttaaaacagttatggttattggttactgtgggtgattgatcagagcgtccatttatcatgtttttctttctttgcaactgaaacttctgcctcaggagttcactgaaatgtaggctttaggtgttgttcatcctattctctctgtgctaaagggaaatcagacccatgctctctgacacatggatttcattttcaaccagagttctaatagttgttttgtaaacaaagagtgtctttgtttacaatgttcaggtctgtgggtgtccagtttttccaccttggggagcagagggtgagtggtgggggtggggaagagttcaagaggagaagatgaaatggcagacctagtagaaatgatgtggagtaaacaattttatcatattttcctctctgagaatttgaagcaaaggattacacactaagagaaatacaggcatgaaaggttaaaaaggattcagtgagggttggcctcccctcctttcctctgacatgtgtcctttgaaagcggaagttcctcaggcattctccctttttatgaatattaatttctctttttttttcagtttctctttttgtcatcttttttcctcaagaatatcttgatttctggatgcacacacttttccttggaggtgttttttgccttctttccatggactctttccctgttgtttggcttttatggcatgttgggtgccattcagtcatgtctactcagtgaataatttattcttcaggaaagagagtggacctttggtgtatgtgagaattcggggtgtgaggtgacacgtgttgatacttaccaggtaggaagaactgagcaaagagaacatagaaagaagcacctacccaagggtctttctctgaaggagttccttgtgaaagggtctcacaggcatagatgctactaaattgatttcatctgaaaacatgaaacaattctcaagtgccaaattccaagagaggctgagcagaagccaagacaggccagaacaccctgcagccatcctccttaacatccatctgtgcattctctattttaaaattattcattgtagggctgggcacggtggctcacgcctgtaatcccagcacttccggaggccgaggtgggtggatcacgaggtcaggagttcaagaccaacctggccaatatgatgaaaccccacctctactaaaaatacaaaaaaattagccagttgtggtgacacgcacctgtagtctgagctactcgggaggctgaggcaggagaatgacttgaacccaggaggcagaggttgcagtgagctgagatcgtgccactgactccagcctgggcgacagagcgagactccgtctcaaaaaatatatatatattcattgtaacttattttgcccattcaagcaacacctccaccatcttctggtcccacctaccagtgtctgaagggaacaggtgaaaactatcgcgggaatgtggctgttaccgtgtccgggcacacctgtcagcactggagtgcacagacccctcacacacataacaggacaccagaaaacttcccctgcaagtaagtcccctccggtctcattctgctgctatggaatgtgaaatcccattgactttgccttagttttagttactgtaggaacgcaggataaagtattctggaagaaaaactgatctagtcataagtaaaggaaatgaactttagcacgttttttcccgtaacggttgttctcaaagcgtggttccctagacttttttctttttggaaagctaaactcacaatcacttctttttcagaaatttggatgaaaactactgccgcaatcctgacggaaaaagggccccatggtgccatacaaccaacagccaagtgcggtgggagtactgtaagataccgtcctgtgactcctccccagtatccacggaacaattggctcccacaggtaagcaagggtatgggagcttactgagggcccaagttttctccttatttttgtataccagtggcatcatcacaatatacagtagctttgtaagtttaatgctattgtggtcagaaagcctgcccttatgatttcagtttttttagatttgttgaggtttgttttatggttcagaatatagccatcttggtgaatgtttcatgtgctcttgaaaagaatgtgtcttctgcggttgttgggtggggtgttccctcaaggtcatttaggtgaagttggttgctggtgttcttctgtatccttactgattgtctgtctcctccttcattgactactgtggatgaatggtgatgtgtccaactttaactgtaaattagtctatttctcttttagatcgtaactcttttgtatattttgaagctcttttgttaggcacatatgtatttaggatggttatgtcttctagatgaaaggacccctttatctttatgtaatgtttcttcttatctctgggaatatttcttcttctgaagttctgaactctctttatggtgatataaatacagtctcacagctctattttcactagtatttgtgtgatatatcttttaaatttgtatgatatatcttttaaatttatctgagcttttaaattgagatgttcaaaccatttgcattcatgcaattgttaatagagttgaatttacatctaccatcaagttagttatttctctttgtcccatttaaactttgttccttttttcatctttttctgccttcatttagattgagtttatctccactactcacttagtaaattaatttttaatggttttagtattttccacaatgtttataatatacatttttgacttttcacattccaccttcaaatgatatcattctacttgacatatgaatccttacatcattgcagttctacttcctccctcccaaaatgctatactattactctttgtaatagaagcttacttctactatgtcacagatctcacaatacattgacactatttttgccctaatagttgtgttttaaagtgatcaagaataaaactattttaaatattttctttatttatttattttaccatttctggtgcttctcatctactggggtagatctcaatttccatctggtgtcagtttctttctgtgaaaaacaacttttagcattttttgtagcacaggtctgctactgctgaagtctttcagattttgagtgtctgaaaaagtattttgccttcagtttttaaaagtaattttgctgaatgtagatactgggttgagagtttcatcacttgcaacactttaatgatgatgttccattatcttctgttttaaatagtttgactagtaatctgatctttgttcctatgttttcaataggtcatttttctctgactacctttaagattttctcatctttgtttttcaacagttcgactatgatgtgtttattattaatttctttgtgtttaatctgcttgaggtattctgagttcctagatttgtagattgttgatttttttcttttctcttttttcttttcttttctttttttttttttttttttttttttttgagatggagcctcactctgtcacccaggctggagtgcagtggcgcaatctcggctcactgcaaactccacctcccaggttcaagtgattctcctgcttcagcctcctgaggagctgggactacaagcatgtgccaccaggcccagctaatttttgtatttttggtagagacagagtttcgccatgttggccagactggtctcaaacttctgacctcagacggtccatcaccttggccttccaaagtgctgacagtacaggtgtgagcaaccgtgcccagcctagattgttgattttcattgtccttgtaaaattcatagccattatctgttcaaacgtttctttttgcacttttctctctctgtattttccttttgggactctaagtaccacgtgtttgggattctaagtacccacaacattcatgttgtttcataaatcttgtaagcttgttctctttttttttcagtaactctttttcattctttgtgttggtttggataagttctggtaacctatttccaagtttatggattattttttcagttgtttctagtcatctcctcagcccattgagagaattcttcatctctgatattatgactttttttctagcattttcatgttactcttttctatagtttccatctttgctgaaattctctacctatctatgcatactgtccaccgttacaacaagatcctttaacatactaatgtaggtatcacacaatcccaatctgatagtttccagatggcgtcttctctaagtctggctctctggattgctttattattcaacagtggctttttgttcccccttgggttttttggtgtgtcttataattctttaatcaaacactagacattataaatagaagaacagtagaggttacagtaaatattatttatactttgaaatggacacccttgtcttgcaaatatatatcgtggataattgagtcaatgtagtcactagtttaactgaattgggatttgtgattgctagttttaccttaagtgcaccacagatataaattcctccagtgatgtgctgctgctatcttttacttagagtggggcctggggtgctaaagagttttctccgtgttcctatccattcccagatttcagcagtcactgcatgcctgcactacagaggagatatcttcatacacataatctaaccccattgacactcggctgtttcttgttactgaatgctcactttttggtggacgtaggagaatacttatctccctggtctacctccctcttaggccagttgagcacagctcggctttgaaagtagtgatttttcagtgttcttgtgcctccttctgatggaacttgtacctgtggtgggtttggaaagaaagagtagtaggcttctgcttcattgcaatgcaggatgttgggcacaagaggattccctgtaacttctccaagggaataagatttttgcctccaccactctctgagaagctgtggatctttgcctgcagtcctagatgcaggaccatctcctgccctatcacccagaagctttggtctttggctttgtttgaggaaggagctagagaaatgtgcaaagctttcatgtctgccccccactgacagccactcaccacccacagcctgcactgccgaatgcatcctcctctcatctgccctcgtgttctcatgaacactcagtagggacccataaaaaagagcttgcatgtaagtgcaatttccaattataagtactctatctgttctttcacacccaggttttaaatgaaatattactaggaacttattaatgttctaaaatgctataaatctatttttatgttaatctgtctgctaatacagaaaagagaacagtcataattctcagaggctaccgtactgtttttgtcataaattgcttcatgcttcttttttttcagtaattgttaagcttgatttcttttattttaatttcagcaccacctgagctaacccctgtggtccaggactgctaccatggtgatggacagagctaccgaggcacatcctccaccaccaccacaggaaagaagtgtcagtcttggtcatctatgacaccacaccggcaccagaagaccccagaaaactacccaaatgcgtatgtctttgatttttactgtaagaggggcatcagccaactgaaatttctgttaaaagagccatgcttcatgcttcaagccaacttcctaggaccaaatttctcttagacccagaatgtgtagaaaaatgtctcaagaatcttgcttttgaagaaagggcctgcgagaagagaaattttaggctggctatttttcctgagtagttttatggatgcaggaggacatctggaggtgatgaggtcacattaattgaaagctcaggagtacatatgagcaaatgcttagaaacagtaccattccacaatgcccactaaatatcagtgcaatatttctaccatagaaatctatcattttaacctccaacccctgaaatgaaggttgaatttgctatttttgtcttgggtcacaagtaaatatactttatatatataagtatgaatatatatacacacatatatatgtatacatatgtgtgcatatataaatacacacatatatgagatatacaagtatacatatatagtgtgtatatatatgtacacatatatgtgtgtatatatatgtacacatatatgtgtgtatattagaatatatataacataaatatgtatatatatatattctgacctgtataaacacagtggatcctgagcaccagtggcctgaaaggatatgggttgctgggacatgaagaacaaaagcaggatacgcagatgctgaacagcgaaagaggccattagatgaacagaaaaccaggtctaacaaggacagcttttcttccataaatgagtacacaatatatggaaaaaactatttttacatattggagaacagataaactgagataatttagaaagggaatcaaatgagatcaacccaataactaccttggctttgttcctggagacttcctgggctgaagaacaaggagatggagcccaagccgaccacagcagtcttgctgaactgaggaaggagactggagttgggattactaaaacagctgagattttctaggctaggtaataacatgaaaggaaacattgtggaggaaagcagctccaggaatgtccatagaaaagtcctcaagtctttggctaaatagaaagctgcatatgcacagggagaggttccagagagaaaataggataaagaacagctactggggaaagaaaaactgcaggggaacagtgagctcaatggagatgccagagctcacatagcactgggggatatttgagttctgaccagcctgaggagagacctcgctgaacatcttgggcattcagtagtcaccacataaagccaaactttgggagtaggattagtgtattcctataataaaggccactccagaaacagcatagtaaagctgaaaagcaagtctaaaaaaatcaacacgatctccaagtaaattaactgattgccagaagaaaattcaaccctttagaggcaaacaacaaaatcaagttgctcagttatgtggcatccacaatgtgtgacctaaatttataactttaccagacatacaaaaagcatttactgtgatccataaccaggagaaaaagcactcaaaacaaataaaccccaaaatgaagaaattggcaagaagatttgaaatatatatatatcataattgtgttcaaggatttaaataaaacatgaacatggaagaaacaaatggataatatcaaaaaagaaaaattataaaataaccaaatagaaattaaataactaaaaaagtgcatgtttaatgaaaaatgtactggctacccttaccatcaggttagacattacagaagaaaaagttaactagaaaataattcaatagaagtgatacaaactgcagcacacacatacaaagactgaaaagataaagaaacagagcctcaagaatatctatgaaaatatcaaaagatttcatatatgtgtaaagcaagtcacaagagaggaaagagatattgggacagaaaaaaatacttgaagcaacaagaaaaatcttattagaagccagaagaagaaaatatatgtttacacagaagaatagtggtaaaaatgactgatgccttctcgtcagaaactatgctggtcagaaacaatgaaataacacctttaaagtgatagaaaaaaataaaaaagattaacatagaatgttatatccagcaaaaatatcccttgaaagtgaatgttatataaatacatattctgcctcccccaaaataaataaaacactaagagaatatttcattactaggcttatataataaaagatgttctagaaatctattttggtagaagaaaaatagtgccagatgggaactttatactaagtaatgaagaaccctggaaatggcaaatgtaaaagattcatatttaatgccttaatttctttaaaagataattgatgggaggctgagtcgggcagatcatggggtcaggagtttgagaccagcctgaccaacatggtgaaaccccatctctactaaaaatacaaaaattagctgggcatggtggcacgtgcctgtaatcccagcaactcaggaggctgaggcaggagaatcacttgaacccaggaggtggaggttgcagtgagctgagatcgtgccattacggtccaacctgggtgacagagcgagactcaaaacaaacaaacaaacaaacaaacaaaaagataataatttactacttgaagcaaaatgatagcaatgtattgctactttaacatatgtaaaagtaaaaatttctaaataataataatcacataaataatgtaggaaataaatggtagtatactgttctaagtttcttgcattatccatgaagttatataatacacatggttgaaggtggtaagttaaagagggttattgcaaatcctagaacaactgaaaaaatttaaacttagaggaatagataataataagaatgttccatttatccaaaagaaggaaagaaaggaagaaaaaagaatgaagaagatatggcaaagagagaaaatacacagcattatggtacacttaaactgaactgaaaatatatttaatatactcctaagcatattaaatataaagggattaaacattgcacagaaaaggcagagattattaagctgaataaaaatcaaagcccaattatgttctttttactatacatgctctttaattgtaaagagctagtccaaaaaccaagtgtggaaaatgacatatcatgaaaataagaatcagaagaaagctggagtggtaatgttaatcccaaagtaatctacaagaaataataccacgatgaaaaagttatttcttaagtaaaaaaagtttattcatcaagacttaacaatgctaaatgggttgcaccctcataagagcccttctgatatatgaagcaaacactgacagaactgaagagacaaacagataagcccacaattagagtgggagatatcctaatgtctctctccgtatggttatacatcttcccaaacaaaatataatagaaaaaatacacaaaaaaatcagaaagaatatatatgttttaaaggaaattgtcaacctatttaacactatgccaaactgcagaatacacattcaagtatgcatggagcattccccaacatataccatatgtgtgggcctacagcaagtcttaatagattgaaaagaattaaaatgatacagagtctgtttttgagcaaaacagaattaaatgagatataaataacaaaaaaattgggaaattatcaaatatctgaaaatgaaacaacacatttccaaatacttcataagtcaaagaaggaatttagaaaagttttgaactgaataatagtaaaaatacaacatatcaaagttcgtatgatgcagcgaatgtttttagggttttataactttaaatgctttcagtagaaaatagaaacatgtaaaaatcaatgacttaagatggcatttctcaaagtatgctctggagaaacctgaagtctcttgagatcccttcagagacagtctatgaggttaaaacacctttaaatttaaaaaaaaaagattttatttgctatttcacttttatttcctgataagtgtacagtggagttttccagaggctacataatgtttgatcacattatctctctgatggctaataaaatgtgtgattgtctattatgtttaaaaacattctcagttttggatgcaataaatattcatagtatatattacaaaatgaaagctctttagggtccccaatactttttaagagttaaaggggtcttaagaccaaaaactttgagaactgttgatttaagataacttaaacatctagaaaaggagaagcaaataagatccaaggtaagtggaaggaaggaaagaatgaaaatctgtgaaatccagtgtataagaatatagacaaacaattgagtaaatctgtgaaacagaaagttggttcttttgaaagattcatgtaattgataaacctctgcctaaactgacgacaaaggagggagcaccaccgtcaacatcaggagtaaaaaaagggaagagtcattgctataggatctttttgatattaaagctaataaacaaatattgagagcaactttacgttaacaaattcaataacctagataatatggactaattccttagaaaaaaacaaataagcaaattggacactgaataaactgaatttctaaccaatctgatatctattaaagacaacatgtgtatataatctttaatatgttaatatatattaataaatcaataaacttcccacagagaacactctaagttcagatggcatcattagaaatgttattatttaaaaaaaatccaattcttcacgatctgttacagaaaatagaggagaagggaaatatttcttgactcaatttgtgagaaaaaaaaaaaaccctagttgtaaaaaagtagacaaggatattgtgagaaactatagcacattatgtattgtgaacataaatataaaaagatgtaacaaaattttaatcattaacatgatgaatatcccaaacaagtgaagcttctcttcaagaatgcaaggctggcttaacatttacaaaacaatccatgtaatccaacatgttaacagaataaaagtgataaatcatatgattatgtcaatagatgcagaagaaaatgtgacaaaatttaacacttatccatgataaaatgtcttagcaaactatgaatagactggaacttctttaacttgatcaaaggcatctacaaaagacctccagataacatcaacttaatggtgaaagattaatgttttctctctaagattgggaataagaaaaatatgtttgctctcagtacttctaatcagcattttactacattggtcacaaccattgccataagacctgaaaacaaaacaaaaagagaggaaaaaaaggaaggaaagaaagaaagggcctaaagtttggagaggaagaattaaaactgcctgtattcacagaaagcttaattaacggatgcagaaagtcctaaagattaataattaaattttgcaagattggagaacacataagtatatacatgatcaatataataaaagtagttgtatttttatacactgccaatgatcaactggaaaataaaaatgtcagagcaataccactgacaatagtatcaaaaccacaagatatttagtgatacatttaacacaatatgcacaagaattatgtactgcatactaaaaaacattgttaaggaaggaatcaaaagatctaaataaagatatatcacgcttatatattaagagtcaatatcacttctcaccaaattgatctttggattcagcccatacccaaccagaatctcagcagtcgttttttttaaaaaatgtgaaaaaatgtatatgctagaatcacaaggacaatatttaaagagaagaaaaaagttggaggacttacttacccaaaggtaaagacctataaaggtacagtaaacaagatatgtggtattgggaaaaaaaagtatacagatatagaaatggatggtccagaaacagatccacatatacatgatcaatttagtttctaggtaggtgacaaggaaattcaacagggaaaaacatcttttccaaaatcattgtgaaacaatcggatatccatctagaaaacaaaaataaaaacaaattttgacttctactttccatcccaaattaatgtgcaaaagctcctagatctaaatgtaagagctaaaacttaagctgaaataaaacaattccaggaaaatatataatattttcacaaacttgaggaaggcaaaatttttttcaggcaggacccagaaaacactagctttaaaagaaaataaattataatttgggctttcataaaatgaaaattatgttcatcaaaagtcattgttaagaaatcagtaggtaagtaacagactggaataaaaattctctccatccatatatctgacaaatggtttgtatctagagtataaacgtttctcccactcactaatcagaggacaaacaacctaattaaaatgggcaacagaattgaataggaaatttctcagggaacgatggacagatggacaataagcacctgaaaaaatgctcaacattttagccatcaaagatataagaattataaccatcacaagatgtcaccaacacttaatgggcatgggtatcattaagaagacacaacaataagtgctgtcactgatgtggagcgaggatgtgcagctctcgcatacgctggttaaagtacagtatgctggttttccataaagttaaataactatgagtctaccccaaaaaactgcaattctattcctgaatatttaccccatggaaatgaaaacagaagtccacaaagagatctacaagaatattcacagcagctctagttattataaccccaaactgtaaacaactacaaggtcaatcaatgagaaaatgaatcgataatttgtgatctattcatataatggaatattattaagcaattaaaatgaagaagtgactgatcctctcaaataggatggatggaactcaaaaatatattaaggaaaggaggcagatacataagtgtacattctgtatgagcccatttatatcaggtttgaggagaggtaaaactaatctttagtgaaggaaaccaatagtatttccctctggcagtgggaagagggtagcaggaattgaatgagcagtgacacagggtgtttctagagtaatggaagtgttctgtatcatatgggagtgtggtttacacaagtataggtgatcatcaaaactcaccaaacaacatttaagatctgtgcatttcacactatgtaaaagtatacctcaactgaagagagtggaaatctgtttcaaatgctcagccttttaacacatccagttgcttagactatgaacttcctcaaatggggtgtctgggcttgagattagatcacatgtgtagagtcgctagagagacaatgttgcattcccatggtacataatacatttcccgttttctcagacagccacaggtcatgaatgtgaggattctgagaggttggagcaacattcttgggaggcatgagggggagcacattctccaagatcccccccagcccggggtcctcgcctgctttgactattactccgttgttttcggactcctccgtagctgcccgacctcttcagatcccatagtctccctttatatcttgagtcccactgttcttccaactcatcccccattccctcagacctggagtggcagtggccagcagaggatggattgagagcaggagaggatgtcctgcccaggaacccatcctagagaaatggcatcctgcctgggagctagtttcccagggtggctttgatacgtcttgcagaaacaaacccacttgacacacctgatacggtattgacagtaacactatttttcgtggttgtttttcatagtaaaagtagatccctttagttacactgtgagtacttagagtaaggtgactggcctgggaatgataccatcttggatgtcattttctccttggagaaatgtattttagttccaatgcacatttcacaatacagtcctatagagagaaatacagagagctagacagttagagatatacttttatgtgcataaaaatataaaatatgcactttaaaatctgtacctgttattcctgagaaatgtatttggcagaaggtgggagggggatattctgatccttttatttacatgtttatgtatgatctgagtttttatatggagcatatactacttttgattttttaaagaaaaattaaaatctgtctttgaaatgtacacagttgtttagaagttgaggaccatttttgtttgttacaacattattgtacctataatgggaatatttcaaagccacttgttaacactttgttagaacaaaatgtagagggtgctgggtgcccctgaatattctcccacctcttgtgacctgtattgttttggaatttccagtggcctgacaatgaactactgcaggaatccagatgccgataaaggcccctggtgttttaccacagaccccagcgtcaggtgggagtactgcaacctgaaaaaatgctcaggaacagaagcgagtgttgtagcacctccgcctgttgtcctgcttccagatgtagagactccttccgaagaaggtaagaaatctgtggctggacatctacacacttggacgctgggatgaaaagccatggaaaatctcactgatgcagaaaccttccatgctacacgagaaatcaagtgtttttagagggtctgccatgtggaaggaagcctcagtgcactctctcaaggaggcagaggtgtgacttttggcacaacatgagtgggctgtgcctttaggacaggtgcaaaccctccaaggtgctcaacttaaccactcaccttgttctaaaatgggttatctcagtatcccagtccaaattcgtattctatcatgctgccatatgtgtgattctttccaagccagtaagcatctccagtaatttcttaaggtaggcagcgttcattgcagtcttcagcattgcagtttctgaggaatgtggcccctgattctgtcatcctagagaaacctgacatgactgtattgattccatatcatcctgggtctctgtggctcttcataatcatccattttttccctgtacagactgtatgtttgggaatgggaaaggataccgaggcaagagggcgaccactgttactgggacgccatgccaggactgggctgcccaggagccccatagacacagcattttcactccagagacaaatccacgggcgggtctggaaaaaaatgtaagccactttgatttggactctttggccttttgctcaccaatctttgcaaacagaattggttctgtgttacagaaaatctgacctggactgctcttttttgtaatgggggagaggggacagaagaaaatattggaaaggcatcagggggctaagctagaatataattggccttagtatggaaagtacaagcagcacaggccaggaaacctccacacatgtgagggttctcaggcctcttccctttagtgacatttctttaaagtttccattattggggactgtctctagtttctagtgtttgtatgctaggttccagtaatcaaagatgccctttatgaaatttaagtcagatttttcgagaaaaaatttggatgggccatcaggtcaccatgggacttcccttagcctcatgcattctctgcgatggtttactttggggcctatgaatagggaagactgagatataggaaaaaccaaagtgtctgtgttcccccactctcacacccatgcagcataacacttctcacaccagatgtggggggatttctcctcacaccccaagcgagtctccagcagataccagctgggtgtcctacaatgtaactcagtgctgacactctatctggagacagtgtcagatcccataagttaaggctcagtcccacaagaccgccccactgcagatgccaatcccaagttccaggcggtgacctgtacttctgcccaactggacaaaaatctgtttttctacttgattactttgctagagtggctcacagaactcaggggaacacgttacttttatttacccatttgttataaaagatattacaaaggatcctggtgaacagccagacagaagagatgcacggggcaaggcatgtgagaaggggctcagagtttccatgccctctccagtgcaccagcccccggtaccccaagtgttcagcaacccagaagctctccaagtgcagtcttgctgggtttttatggaggcttcattacagaggcacagttgaatacatcgttggccattggagaccagctcaccttcagctcctgttccctccctggaagttggacgtggggggctgaacagttccaaccctgcaatcacatggttggttcctttggcaaccagccccatcctgagactatccaagaacccaccaagagttgcttcattcaaacaaaagatgctcccttcactcaggaacccccaagggatttaggagctccgtgtcaggaactggggggcagagaccaaatatacgtttcttattctaccacagtgtcatatgaaggggaggacaacactgcctttctgtgtcttgccccatagagggcgcacaatgcatggaaataaatgtttctgaatcaacagcaaacaggcttcatcgggtaggagagcgctgagccctccagggacaatgcacatcaatgatgtcccactgtcctttggtgctggggctctaaggcctccactgggtcaggctcctgaagggagacccattctccaaagacccccgagggtcaccactccctgtccaggggtgtggcctcatagctccttttgaacaggggcacaggaaggacggctttagagcattcaaaaaataactttgccaaaataataataataataatagaaagaaaggaagaagaggctgagcatggtggctcacacctgtaatccctacactttgggaggctgagacaagcagatcacctgaggtcaggagttcgagactagcctggccaaaatggtgaaacctcatctctactgaaaatagaaaaaaaaattagccaggtgtggtggcgtgcacctgcagttgcagctactcaggaggctgaagcaggagaatcgcttgaacccaggagatggaggttgcagtgagctgagatcatgccactgcactccagcctgggcgacaagagcaaaactccacctcagaaaaaaaaaaaaaaaaaaaaaagaaggaaggaaaaagaaacactcctttatgtcttctaaggatagacatgaaatgcgtgagccttggaacaccttctccctctcctgccccacgtgagctggagcttacatgccttcttgttttcagtactgccgtaaccctgatggtgatgtaggtggtccctggtgctacacgacaaatccaagaaaactttacgactactgtgatgtccctcagtgtggtaggttgccttctttttggtaaggaaactgcttacttaatatggatttgcaacaaaaaaggaaaagggcttctgagcagactgcttctggggaggagatagctgccctctccatcagaccccactcttcatcatgggcatcttgaatctgccctactattggccacatttgttagaggaacacctgcccatcgccccaggcacacataaataaaataaatgtaaaattcccaaagagcaagcttagaggtaatctagtcagccccaggatggtcccactgaatgctgccatgtctagcgtgggatgcatgaaaaatttagagtcattcggatgaaaaactttccctttccacagctgagaagtaagaaagaaaatacaaacagcaggaaacaggtaagcatgtaacgcacattgtaaacctcagatggccatcctaggaattcaatgaaaggtagtgcagctctttagccccagatggcctttcttataagtttactactcacaagtcacattagtgacatagcttagagactgcttgttgggttccatcctcattgctctgagactcttgttgggagtatgaggcttggatcaggggaaggggagttgacattagttcttaaagaattggaataacaaatccatgggtatttctgaaaaaaaaaaaaaaaaaaagaaaggaagctacttggaattgtcccatatttaacattctgctgaccaatcaatttgtcctagttacagaaaaccaccctggacttctcctatgcataatttggttgcttgtggttgggtctgccatgtggagggaccttgagctgggggaaggagcttggcctccaagtccactgaagaccagcatcctgagattgcctgggaaggtggtacagggcagtgatgaagatcatgggagccacactgcccagcttcgcatttgggcttctcctagggacaccaagagggaggaaggaggggttaggatggtatgaaagattctacttggccaatattattgtaatgcggcattgtgatctctggatttagcatgagttgatagctgactttttctgcagaagcatcttggtggcacctctaactcaaagtccctcgatggagtcagttccagttctccacttctggccccatctggtacacaccactgcctctcactgcccgggctctctatccttgacaggctgccttgaagttgagcccagactgattttcttgcctcagaccccactaccgtgcctgggactcatgcacctttgactcccatggaagggaagtgcagtagtttcccaggtgcaattctggtgtcctcacccacattgaggatgtacaagaatcaggttcttagagattggagaaagaaggaagaatgggaacaagatttttcccaaaggactgtgaggtcccccacctaaccttgatgtgagacaagtgaggttaaccccaagcctggtgagaagcgttcccatcagacacttggaaatcctgaggactgtttcatgcagaaggatatggtttattcaggtttgactcgtgcttgagaaagctagagcctctggtggtgaatgattttaataactatttcctttccaccaacatatacagtacaaataataataagcaaaaataaatagaaacattcagttttgttttgaatagtaggagcagggtaccatcatttctgtagttactcttttagtacaacgatgcatgtctactgtatgtaaggcatactagcagaaattgagctcagcactagagaagatgattgcattctatgccttgcttctttttttaaaaaaaggcttccatagatagattctcagaacagcccatggcaaatgtaaagttatttggaaaacccaggttccagattcactagagcatagaatctctggttggttgggaaggaatttcctcttacagttgttactaataattgtatgaacaattatttaaaatattaacatttacatttgtgaagaccttgaagggctggagacaacagagaagcatttttgaataccctctgcagcccctgcactgttgtaggcattggtggatggtaccaaagatgggacactgtccctacctccagagaccctgtgggctggctacagagagaaggcagggaggaggaaaagaagaataaagtcatatgtttaagtcacccccacggccgttggttagtcatgggaggctccccagaggagctgtcctgaagctggctgacagaaggcaacatttcaacttaggacagtaatccttgctacatacaatcacatacacacacacacacacgtgcacacacagagactcacatggaaaaataaacctttgtgcctttcagcagtgatgacaattatggttttcagtaaactttacatggtttagatggtgatggtgatgatgatgattatgggaaggatggcatcatgttctaaacatactgcatggagtcagaataacaatgacaaataaccatttgtcccaatcaaggttttctcagaaaatatctcattctgatgctaaactataccagtctgtttgatcacttctccaacaaaataattacaaagtgcttatattttcttgaaaagagagggtcctgtgttgtctactaccacttttgaaacttagagaaaatgttccaaaagatgatgattttactatttagttcggcctttaagatgtcaaaaactcagtgcttggaatttgtctcgaattacaccacaaaattgctaccttgtctcaaatgggatttctttcccaccttgtgccacagcggccccttcatttgattgtgggaagcctcaagtggagccgaagaaatgtcctggaagggttgtaggggggtgtgtggcccacccacattcctggccctggcaagtcagtcttagaacaaggtaagaacaggcccagaaacgatttatactgtccctccacgtaagccctgcaaaacccttctacatttacataaaatccacacagctgaggcatcagcacctgcctctaagttttctgaaggaggaaaaaagctacaaaaattaatatatgtatatatacatatatatttttataggttctctactgtgaaaatgacaaaaattgctgtctttttcttgatctgggcagctccatcaaaatctgtaggcacagtgatttgcaccaagttccaatattgctggaaaatactgaagatgctctgaggatttctatggatatccattgtctcattgtcagatgaaaagagggggaagtttttagaaatgtgacactttctgggttgggagagcaaggacaaaattatctccagtctatcacaggcacagattctttttctttggacactttcgtgaatcattgaattcaatgcagaggctactcatccattcgcaaacaaaaaaattctaggtcatgatccccataaatgaagagtgatcagtccaatcccagggaacctggacattttgggtattgtttcagtggaacatgcctttcataagttccattttcttgggtatctcttaggaagcaagcataggaaacaggcccatccgtctgcctgttttgcttcctcatctcacttctacacgagggcgcctgtgctcaattgctgttttcccctaaagagactcttttccataagtttgtgaaatgccatcgacaaacctgatcgcattgcatttcactctgctgttgagtcgatttttctttattttatcatttagtaactccttgctctacagagctttcaccttccacatatttcagattcattctttcctaaactatgtggtggtctacgtcctcactgacttatcaacatgctaccatcatgcacttcctatctctattcctcttctttaaaatttggttccaaatggctcacaccattattctgagctattacctgcctacgcagtcctagaaagtaagtgattcaggaaacattccccaaaagtaaagtttctcaggtaagatcagaagactcccatgagtcactgctgctcaggatcacatctggctccttgaagagtgattcatcagaccttacatagatcttgtcataaaaatgaaagaggcctcgggggaaggtcttgggctggtggcttctgttggagtcctgggctgtggggtgaaagccgtggctgtagagcttcatgcggagttacttagctttgctctcctgtggacaggccatgcctgtgcctcccccaagcatcggaaaaattggcatagatgggcccttctcaaaaatcccactcctggagcactggccaaaattactaccatcctgatgctgggcttgcagtcctttcctttgggaatatgaacatggtcaaaattaagtgaacgtgtctttctggctttctgtacaatggagcagaacaaagtatcaatttaactaaaatttgaactaaatcctctttccaggtttggaatgcacttctgtggaggcaccttgatatccccagagtgggtgttgactgctgcccactgcttggagaagtatgtttaggggacaattgacatgaagtcttgtcttaaatactttttctgtccttcttttcctcctttcctcctttcctttctcactcttcctcccttccttctctggctgtgacactagggaccaggccagggcaattggataagagagaagggaagggtttctagaaagaaactgcagaggaaagacacagtacagatgattttgtgggcctgaataaactgcagaacagagctgttcactaccataggctgtatcagtctctgcccaaacagcccaagaacattccttaactgcctgtttcaagcaaatcatgaattttgcttcttgccactcagaagtcactaattctgagtggccaagggtgtcagggagacagcaccaatttcatggcacagaggttacctgaaggggctggaccatattttcctcttgacatcctcatcttttctaggtccccaaggccttcatcctacaaggtcatcctgggtgcacaccaagaagtgaatctcgaaccgcatgttcaggaaatagaagtgtctaggctgttcttggagcccacacgaaaagatattgccttgctaaagctaagcaggtactcgttcacctgtggtcttcaccccacgctggtgaagatatttgctttatgtctgggttttatgggccatggccactgcatggcagtggggaggaactgtctatcacatgaaaggctcaagggctttggggacagcatcaatcttcaaccctagccctgccacatgctagctgtgctcttgagaaaggcagcaggactccgttttctcatgtggaaaaagagttgaaatgaggtactctgttactcctagaactcacttaatgttcaccagttcatacacattcatgatcagagaacgattcagttattccaggctgacaattcccccttcatcataatatgtttaagagaatcatataagactatatttgtttcaaagcactttaaaaaccacaagatcgagttgggtgtctggtgtgggtgcctgtaatcccagctacttgggaggctgaggcaggagggtcacttgagtcccggagtttgaggctgcagtgagttatgatcgtgtcactgcattccagcctgggcgacagagtaagacactgtaccaaaaaaaaaaacaccaaaaaaacaaaaaacaaacaaaaaaaaaacaacttcacaatgtcaaaaaaatcacaaatacagtttataaatgtaaattatattattattattgtcttctttgatttgattttctctttcctgttgaaatgttgtttcactaagcctgacaaagtgaaacatttgcttatgtcactcatttagtgctgtttggagccagatactagttgagtcagctaagaaacagctatttgtaggagaagcaggtttgggacaggtgacaaggcacgcagggcgctcgctgtgctggtggttctggaagacagggtgtcagtgtggacagggatgagcatggcctggatgagaaggcacggggcaggagcctgagctgctctcctgggcctggccacaagcccagggcagcttctctgggtctgtgaactgaggggtgatgtcctgggatgctctgacactctagaaggagagaagagcctttccagctcagcctttataaacagtagctgatctccctcctgctccccagtgtcctccccgccatcccagcaaatgtgcaaatagaaggtccccgttcctcatgatcctcagagagctggggtgttctgatggcttgaacaagtaatttggaaattttgggttttggaggagttctctgataggctgatacatttcgagtttagagttcccaccccacatccccacaccccgagtctagggcatttagtgctccaccagggaacctgtagagtgaggacgtctgcatgacaggctgggccttctgatgatgctcagaagcagaaagtgtgcctgcttcaaagttggtgacgatgatgtttcttgatcagaatagggcatttcttatttccaatcctttatcctcttgaacttactaaagtagaatcaggtctaaaaaccggagttctaatgtttgagagtccctgggactctaaagtatatgaatgttctttgaaaacaaataccattttgttcaagcaaaaggcttatttccaatcctctttcatttggtatcaagtattttactggattcttacaactatggcgtagtaacattcactgaggaggaaatggaggatccaaggatggagcaagttgctctgggcacacaacacatttgcaattttacagcctcttggtggcatctcagtcagacattccatgcactgatcaatgccctattcgattaatgtaaaaggacacactcagcatgagattccagttgtgcacagaatatacatgagaagtgcgcctttgtcatccctactttcaaaggtgaaggccaccagcagtatcttgcatgcaactgatgcctttcaaatgaaaccttacatctgcatagtccatagacaaccacaggcaaatgtgagggtgaaactctgtgttctacgttgctctgtgtcagtgaagcaaggcagtgccagttcagagggctctggggcctcaagacagggatgactggttgtgggtactgcagctgcgagcagagcagtcaaacataactgctgatgcttttctttcagtcctgccgtcatcactgacaaagtaatcccagcttgtctgccatccccaaattatgtggtcgctgaccggaccgaatgtttcatcactggctggggagaaacccaaggtgagataaattccattgcccacataacgaattggttttgacctacagtccatgtgacaaaatgatcattttggagaaagctgtgcaaattcctatccatgaatgtggtccaccccactcctgattttgcctgggcacctgtctatgtcttaatcagtcttcaaggcacatgatcaaagggaggaaaactgtgtctttgagtctctctctctctctctgttttcagaacatttttatttcaattaattaatttttaacttttattttaggttcaggggtacatgtgcaagtttcttgtatatgtaaacagtggtttgtcatgcagattattttgtcacctaggtactaaccctagtacccaattcttagtatttcctgctcctctccctcctcccactcttctccctcaagtaggccccagtgtctgttgctctcttctttgtgtccatgagttctcatcacttagctcccacttataactgtgaacatgtggtatttggttttctgttcctgtgttagttttctaagaataacggcctccagctccattcatgttcctgtaaaagatattacctcattctttcttatggctaaacagtattccatggtgtatatgtaccacatattcttcatccaatgtgtcattgatggtcatataggtgattccatgtctttgctactgtgaatagtgctgcaatgaacattcatgtgcatgtgtctttagggtagaatgatttatattcctctaggtatatcgccagtagtaggattgctgggttgaaagttagttctgcttttagctctttgagaatcaccatactgctttctacagtggatgaactaatttacagtcccaccagctgttagtgttctcttttctctgcaaccttgccagcatctgttattttttgactttttaggaagccattctggctggtgtgagatgatttttcattgtggttttgatttgcatttctctaacgatcagtgatattgagctttttttcatatgtttgttggccacaggcatgtcttctttagaaaagtgtgttagtgtcccctgtccattttttaatggggttttttttttcttgtaaatttgtttaagttcctcatagatgctggatattagacctttttcaggtgcatagtttgcaaatattttctcctgttctctaggttttccctttactcccttgagagtttctttttctgtccagaagctcttaagtttaattagatcccatttgtcaatttttgcctttgttgagattgcttttggcatcttcatgaaatttttgcccgttcctatgtccaggatggtgttacctaggttgtcttccaggatttttgtacttttggattttacatttaagtctttaatccatcttgagttgatttctgtatatggtgtaaggaaaggggtccagtttccatcttctacatatggctagccagttaccccagcaccatttattgaatagggagttattttcccattgcttgtttttgtcagctttgttaaaaatcagatgtctgtaggtgtgtggccttatttctgggctctctattctgttccactggtctacgtgtctttttttttttttttttttaccagtaccatgctgtttttgttactgtagccctgaagtatagtttgaagccaggtaatgtgatgtctccagctttgttctttttgtttaggattgccttggctattctggctcctttttggttatatataaatttttgaagtagttttttaatagtgctgtgaagaatatcattggcagtttgataggaatagcaatgaatctgtaaattactttgggcagtatggccattttaatgatattgattcttccaatccatgagcatgggatgtttttccattcatttgtgtcatctctgatttctttgagcagtgttttgtaattcttattgtagagatctttacctctctggttagctgtattcttacatattttattctttttgtggcatttgtgaatgggactgtgttcctgatttgcctctgggcttggctgttgttggtgtaaagggatgctagtgatttttgtacattgattttatatcctgaaactttgctggagttgattatcagctgaaggagcttttgggctgagactatggggttttctagacatagagtcatgtcatctgccaacagggatcgtttgatttcctctcttcctatctggatgccctttatttctttctcttgcctgattgctctgaccagggcttccaatactatgttgaataggagtggtgaaagagggcatccttatcttgtgccagttttcaaggggaatgcttccagcttttgcccatttagtatgatgttggctgtggacttgtcatagctgtctcttattattttgagatatattccttcagtacctagtttattgagagttttcaatataaaggatggtaaattttatcaaaatccttttctgcatctattgagataatcatgtgggttttctctttagttatatttatgtgatgaatcacatttattgatttatgtatgttgaaccaagcttacattctggggataaagcctacttgatcacgatggattggcttttttatgtgctgctggatttggtttgcaagtattttgtaaaggatttttgcatcagtgttcatcaaggatattggcctgaagttttttgttgtttttgtgtctctgccaggttttggtatcaggatgatgctgacctcatagaatgaattggagaggagaccctcctcctcagtttttttgaacggtttcagtaggaatggtcatagctcttctttgtacatctggtggaattcagctgtgaatctatctggtcctgggcttttgttggttagtaggctatttattactgattcaattttggagctcattattgttctgttcagggaatcaatttcttcctggttcagtcttgggagggtgtatgtgtccaggaatttatccatctcttttaggttttctagtttgtgtgcatggagctgtttgtagtagtttctgatggttatttttatttttgtggcatcagtgctaacatcccctttgtcatttctaattgtgtttattttggtcttatcttccttttcttcattagcctagctagcagcctacctatcttattactgttttcaaaaaaccaactactggacttgttgatcttttgaatgaattttcatgtcttgactttcttcagttcagctctgattttggttatttcttgccatctgctagctttggggttgatttgctcttgtttctctaattttttccattgtgatgttaggttcttaatttgagatctttcttcttgatgctagcatttggtgctatgaatttctctcttaacactaccttagctctgtccaagagattctggtatgttgtatctttattctcattagttcaaagaacttcctgatttctgccataatttcattattcacccaaaagtcattcaggagcatgttgtttgatttccatgtaattgtacggttttgagttattttcttagtcttgactggtatttcattgtgctgtggtctgagagtgtgtttggtatgattttggttctttggcacttgctgaagattgttttatgtccaattatgtggttgatttttagagtatgtgccacatggtgatgaaaatgtacattcagttgttttgggaaagagagttgtgtagaggtctatcagatccatttggtccaatgctgagttcaggtcctgaatatctttgttaattttgtgcctcgatgatctgtctaatactgtcagtggagtactgaagtctcccactattattttgtgggcgtctaagtctctttgtaggtctctaagaactttatgaagctgggtgctcttgtgttgggttcacatgtatttaggatagtagatcttctttttgaattgaaccctttaccattatgtaatgcccttctttgtcttttttggtctttgttggtttaaagtctgttttgtctgaaattaggatggcaacccttgcttttttgtctgatttccatttgcttggtaggttctcctccatccctttattctgagcctatgggtgtcattacatgtgagatgggtctcttgaaggtagcataccagtgggtcttgctttttatccagcttgccactctgtgcctcttaagttgggcatttagcccatttacattcaaggttagtattgctatgtgtgaatttgatgccctcattgtgttgttatgctggcttgtttgtgtgatggttttatagtgtcattggtctgcgtatttaagtatatttttgtattggctggtagccatcttgctatagttagtgcttctttcaagatctcttgtaaggcagttctggtggtaaccaactccctcaacatttgcttagctgaaaatgatcttatttctctgttgcttaggaagcttagtttggctggatatgaaattcttgggtggatattttttaagaatattgaatataggccccaatatcttctagcttgtacgggttcagttgagaggtatgctgttagattgatggggttccctttgtagacgacctgtcctttctctctagctgcctttaacattctgtctttcattttgaccttggaaaatctgatgattatgtgtcttgaggatgatcttcttgtatagaatctcacaggggttctctgtattttctaaatttgactattggcctctctagcaaggttgaagaagttttcatggacaatatcctgaaatgttttctaaattgtttactttctccccatccctttcagaaatgccagtgatttgtagatttggcctttttacataatcccatgtttcttggaggctttgttcattccttttcattcttttttcttaatttttgtcaactgtcttatttcagaaagccagtcttccatttctgagattctttcctcagcttggtttattttgctattaatacttggattgctttgtgaaattcttacagtttgtttctcagctctcagctctgtcagatccattaggttcttttttaaaccagtgattttgtctttcagcttctatatcattttattgtgatcctcaatttccttggattggattttgccatcctcctggatcttgatgatcttcattcctatccatagtctgaattccagttctatcatttcagccagctcagccttgttaagaacccttgttagagaactagtgtggttgtttggaggacatatggcactccggcctttatgttcctttaactgcagtgtaggttgaatacagccaatagacttgttctttggatgtttttacagggccaaagccttgtgcagggtctttatttgtagttgatttcttgtctttggtttcatagtgtggtatgttagcaaggtatttttggtgttgaagctttggggtgtgatccattttttatttgtatatttccctacacctaaaacaagcaaaaaaacagtaaaggtctttgagtctcttaatccataatttcagcattcctgagtatgcttccctgggtaagtggggttttcacccagccctcaagttaagagtgttagattatttttcatgtgaaattagccagactggctttcttaacacaatgtaaaacaataacaacaaaagttataattagactagtcttcttcccaaatacccacatgtctaatgtaagtgggatggtgttaaacaggggacctacaactgggggagaggcggacaggtcccatggccccaggtctaggatggcatttggtattggttgatgggtgtggatgagaacaagagagggaacacttgtgcaggatatggtatcagcacctgtaatacattttagggattctttcttctctttgcagtatgccctgacaataattatatccatcagcctagtccccttggccattgaaacactaagactgtcttaggatccctgctgcagtttctcagaggtgctaggagggcattaggagtctgaagccctggaagtgtgttctgactttgccactagctagatagacctggactaggcacgttacctctttgtaccactcagctctaacccctcattcaaaaacccagcattttcaagtggtgtttttcacatcagcctttgcataagttttcatttgaagaaaggtttgtttttgttttcttggtttaatcaaacatttaaaaacgaatggtctagatgatttcaaagtggctttccttttcctgtgcttttcctactatttaaaaactttacctccttgatttcttgatctccctttctgcactgctgggtctgggagcattgaggccaagtaaaaggaaccttggcaaaggaggaacacctatgggtgtgccaggctgctcccagtgttttgcatttttaaaaatttaaatgctgcaaacctctatgaattacatattattgttcctagtttacaaatgaggagcctgaggctcagagaatgtgtgggatggtacagactaacctgaattagaaccctggctcccatttactggctgtcaggacttagaaaagtcataaactctctggctgggtgcagtggctcacgcctgtaatcccagcactttgggaggccgaggcaggcagaccacgaggtcaggagcttgagacgagcctgaccaacacggtgaaaccccgtctctactaaaaatacaaaaattagccgggtgtggtagcacacccctgtaatcccagctactcaggaggctgaggcaggagaatcgcttcaacctgggaggtggaggttgcagtgagccaagattgtgccactgcactccagcctgggtgacagagtgagactctatgtgagaaagaaagaaagaaggaaagaaggaaagaaggaagaaaagaaagagaaagaaagaaagaaagaaagaaagaaagaaagaaagaaagaaagaaaggaagaaagaaagaaagggaaagaaagagaacgaaagaaagaagggagggagggagggagggagggagggagggaggaagggtgggtgggttgtgaactcttgttgattgtttcctcagctgaaatgtgggctgcagggctattgggggagaaacaataagaaagtgcaccaagcaccaagcacatgctaagaagtccatcatggcagctcctgataataatatggaatagagttgtatctaacatgactctttcttgcaagtgacagaaaatgcaacttaagttggattaagcaaaaaagagaaatcattagtgaactgaaaattctgcaggctcacatcatggccccagaccctgtccattattcttgggcacaaatgtgacattctcgtggctgcagatgctgtggtggctctggctctgccaggaaaagaaataaggaaggccactctccccattacacaaacaatagtcttccagctctgagaggtcgaacttgtgtcaccagcctgcccctaaacccgtcactgattaactccaacctgcatcagctgttccatgctggaggtggacgcaggaccacactcataccaagatgggggcaaagtgtagttccctcaacaggattataggatatagtgtgataggctgctgggcagccaaaaagcaaacagatcctctacaattcctcaactgatgaaagcacgaagctaaaatcataaagatctgtgtgtgagttctggctctcccatcttccttgtgagattgagcagttagttaatctcttttagcctcagctttctcacctgtaccaacatataaggtcattgtgaggattaagattatgcctcatgatcatcattatcatcatcaccatccacattgcaaccacaactaccatcatcatccccaccaacatcatcaccaccaccaccatcacaattatcattaccaccaccaccattgtcaccctcaacatcaccatcatcactatcaccaccaccatcatcatcactaccactaccaacaccatcactctcatcattccaccaccatcaccattaacattaccatcactatcatcaccaccaccaccaccaccacccccatcattactgccatcaacatcaccatcaccatcatcaccaccatcaccatcattatcaaccatcatcaccaccattccaccaccatcaccattatcatcactaccattatcaccaccaccatcatcaccaccaccactaccaccaccatcaccaccatcatcaccataaccatcatcaccactatcaacatgatagtaattatgattaccaccaccattagcattatcattaccaccaccagtaccatcaccatcaccaccgccaccacctccatgatcattactacccaccaccatcaccgtcaccatcatttcactaccagcacaattatcattaccaccaccatcactaccacccttatcacaaccctcatcatcaccaccattccaccactgccaccaccaccaccaccatcactatcattaacaatagacatcacataaccagtttgtagctggaccttgagcccagagcccactcactgtttcttcagtcccaccgccaaccaccaggatgagtcacaaaacataactcaggcctgctcctcaattttctacatgtcaataatgacattgaagcaatgggtgttctctgcttctcagagggaagttgaaattctcctgctcttcccttcatgtttccagatgttccctgacttggatattccaaacgcagagtttggaggtgttgaggccaaggggtttttccaggtcagccatcatctgcaatcactgagctgatcctgctgctggactttccctgttgccctctccccaacgccccatcggggagggcttcaatcctcaggtcacctgtggcctttctgccctcagaggtgccatctctacatctaccactggaaggcagcacctactcacagattgcatcaatttcccagcaactcatggtgggttttcccccttatcagcgtgtttgccttgctcagagagcagatcccagagcagtgacacctaacttaattttcagcaaaacattttgagaagggtgctccctcacacaactacacagtccaggtgatgcacccactgcccaatgcttggtagtcaagaggagcttcctccctgcagctctgcccagatagggctgagctgggctctggagccaggcgctgggatgagcctcttccatgctgctcatgtaaactccagattcagtgtcggttttctgaacccgagacaatgatctaaatgcagtcgaaggctttggggaaagagagagtgcctcggttcttacctgtgtcatgctcgcaaagcaaagagttttgcaaaattttaatgaaacctgggcttgcaaaattggaaaactagattatttgtgacgacactgagacatccctgggcatgtctatctggaaaaacggcattttctctggcaattttgcagacattctatttcaatttggcaaagaaaataaagcagtttttcacaaaggcagaaatacaactagaatgttcactctccctaattgtcaaagaagtgtaaattagaaaatgaatcaggacaatttcaacctattagattagctaatattttaaaaattgaagactcatacaagtgaggtgaagtgattgttttctagtggcacggtacactgtcacacccttttagaaaataatttggcaacgttattgggagacagaaatatgtctatgtaatttatgggaacttagactcagaaaatgttaaggaataagaatgaactttatgaacaaagatgtggaaagctggaagcaagagtggggccaacacgcatggggaggaagcatttgggcagtgactccacagacccaggctcaggctgaactacacaacctccttacgcctcagtttccttaacagtagaacagaaatgataaaagtgcctgtttcacaggactattgcgaggattaagtgagatacatcgcattataagcttgtgtctggaaaggttaattcttggtaaatgatgactattcttttttattgcaataaaatatacaaaacataaggtttactattttaaccattttggaaggtaccactgagtggcatttagtacattcacaatcatgtgcaaccatcatcatatttccagaacattttcctcattcccaaaggaaacctcatgttcattaagcagtagctccccttaacatattagttatgaagatcatagcattatacaaaactcatgacacaatgatgagtgaaaaaatcaagatgtgaaattttgtgttatgatgtaattagtaaaagaagcatattaaaacatctgaaaaaagagtatataaaaatagcaattgcatttttcagactctacattttaaacattattctttatagttttaaaagcaaaaagtaaagaaacaacaaccaaccccaaaccaacacgacaaagccgagattgttaattccagggctcaggaacacagaatcatatatgatgtttacactctgcagggtcagagactccagcggcattgggagctgcctcgtgttctgcagcctcacagacaggaggtccagtgccgctgctctgttctggaatatcctcctgaatgtgttttgggtgcagttgccatttctttcatctttttaaacacaggtacttttggagctggccttctcaaggaagcccagctccctgtgattgagaataaagtgtgcaatcgctatgagtttctgaatggaagagtccaatccaccgaactctgtgctgggcatttggccggaggcactgacagttgccaggtaagcaaagatcaagagaccaaagttagtcttgtgctctcttgtctcagtctcagcccctcagacttcattccccaggtggcaaattcaaggattttcaaccgaagaccccagtctaagtgttgtttagaaacttcctagatctgtccctgaatgcgtattcagatcatctaaggggatgtcttggggcttgagttccaaatcagtagcaagcgagttttaagtgccataactacctcaggccactcaccctcctggggtgtgctggtggccagggactaaagtggtgacttttccggtagggaaggaggtagagggtacaggacagagaccaactgcacacactttacactgatgcccaggctagcccagtctaaaggaaacaccaacataggaagggatgtgtgcaggattcacaaaagatcttttctaccccccggaaaaactaagtggtgtggtttcgctaaacagattttgctaagtacttaagcactgcagatgcttgagtaatatgctcataagttcctttctgatttcaattactgggaaaatgtatatatggatagtagaaggatggcatcccataataaaaggcaggcagcctaaccctcacatgcatttttctctccctctgtatagggtgacagtggagggcctctggtttgcttcgagaaggacaaatacattttacaaggagtcacttcttggggtcttggctgtgcacgccccaataagcctggtgtctatgttcgtgtttcaaggtttgttacttggattgagggagtgatgagaaataattaattggacgggagacagagtgacgcactgactcacctagaggctgggacgtgggtagggatttagcatgctggaaataactggcagtaatcaaacgaagacactgtccccagctaccagctacgccaaacctcggcattttttgtgttattttctgactgctggattctgtagtaaggtgacatagctatgacatttgttaaaaataaactctgtacttaactttgatttgagtaaattttggttttggtcttcaacattttcatgctctttgttcaccccaccaatttttaaatgggcagatggggggatttagctgcttttgataaggaacagctgcacaaaggactgagcaggctgcaaggtcacagaggggagagccaagaagttgtccacgcatttacctcatcagctaacgagggcttgacatgcatttttactgtctttattcctgacactgagatgaatgttttcaaagctgcaacatgtatggggagtcatgcgaaccgattctgttattgggaatgaaatctgtcaccgactgcttgacttgagcccaggggacacagagcagagagctgtatatgatggagtgaaccggtccatggatgtgtaacacaagaccaactgagagtctgaatgttattctggggcacacgtgagtctaggattggtgccaagagcatgtaaatgaacaacaagcaaatattgaaggtggaccacttatttcccattgctaattgcctgcccggttttgaaacagtctgcagtacacacggtcacaggagaatgacctgtgggagagatacatgtttagaaggaagagaaaggacaaaggcacacgttttaccatttaaaatattgttaccaaacaaaaatatccattcaaaatacaatttaacaatgcaacagtcatcttacagcagagaaatgcagagaaaagcaaaactgcaagtgactgtgaataaagggtgaatgtagtctcaaatcctcaaagagctgtgtttatttcattgacaaatagattatttgtattcaattctgatgtgctttaaggatgaagtttctcattttacaattagcacacacttcgtatatgttgtcacctgttctccttacacaaatgttgttccccattttgaaggattccctttggtaccagttttgcctgtccacataaagtatttcatttaaaaagctcagcataaaatatagactgcatctgaaaagatattgaatataatatacatagcagaacacacacgttccacatttcaaaagcctcgataacaaaaaagaaagatcaaagcccttattagtcgctgtaaagccatttataaagctcctgctgatcctgttaagcatggatataattgacctttcttttaaattaaaatgtaagcttttccccaagacaactcaaagtgccaagactgaatgggaactgtccatgtttctaactcttggccacgggcaccatcagaactgaacttaacaaatatatgaaaaatatctcttcatttttaaaatcctaagacccagaaatcataatccatgggatttgtttagtaaagaagaaaatctgtggctctaggtgtccactaaaggagagccaaaaatgtcccgaataatctcaggaccacagcatcattttatgaataacagaaccaagacctcagattgtacaacagattggttcttattgctggaatggggcataaaccatgcctggaaccccagatgctacagagaaggtagatgggagagacttctgacctgttcatgttgcaaaggcgtgcggagaccaaggtgagcagaggacacgaatgctcacattctgtggcccaggaacctgtgattcaatctcctcattaacaggattcccaaattttcatcctccctgcaatttttcaaatgctcggttatgggcttagtcccttgactgatcagatttgatgaacatttctgcaca

SEQ ID NO: 24927 - DNA, 1063 bp, Homo Sapiens
gattgctggagagaacgcggcgatggagccgggcaggacccagataaagcttgaccccaggtacacagcagatcttctggaggtgctgaagaccaattacggcatcccctccgcctgcttctctcagcctcccacagcagcccaactcctgagagccctgggccctgtggaacttgccctcactagcatcctgaccttgctggcgctgggctccattgccatcttcctggaggatgccgtctacctgtacaagaacaccctttgccccatcaagaggcggactctgctctggaagagctcggcacccacggtggtgtctgtgctgtgctgctttggtctctggatccctcgttccctggtgctggtggaaatgaccatcacctcgttttatgccgtgtgcttttacctgctgatgctggtcatggtggaaggctttggggggaaggaggcagtgctgaggacgctgagggacaccccgatgatggtccacacaggcccctgctgctgctgctgcccctgctgtccacggctgctgctcaccaggaagaagcttcagctgctgatgttgggccctttccaatacgccttcttgaagataacgctgaccctggtgggcctgtttctcgtccccgacggcatctatgacccagcagacatttctgaggggagcacagctctatggatcaacactttccttggcgtgtccacactgctggctctctggaccctgggcatcatttcccgtcaagccaggctacacctgggtgagcagaacatgggagccaaatttgctctgttccaggttctcctcatcctgactgccctacagccctccatcttctcagtcttggccaacggtgggcagattgcttgttcgcctccctattcctctaaaaccaggtctcaagtgatgaattgccacctcctcatactggagacttttctaatgactgtgctgacacgaatgtactaccgaaggaaagaccacaaggttgggtatgaaactttctcttctccagacctggacttgaacctcaaagcctaaggtggatggcttggacaa

SEQ ID NO: 24928 - DNA, 25423 bp, Homo Sapiens
atcacatagtataatcattattacagcagtagaagtagctaccacttactcatcccctacgactctcttcctctcctaatctgttccagccacactgacatctcttctgttcctagaatctcatcaggcttccacctcaaggcctttgcactggttgttcctgctccttggaaaggttccctgcccatctgccctacttcttccctcactgcattcagcctctgcttgaatgccacttgctcagggaacccctcctggatcacccacctaaaacagctcacacctcatttgcacccagatacttccttcagcctgctttgttttctccagtttgcttatccctctcagacagtgaaagattagataacacatatctgctccccactgtcaacacaacaaaaggtgggaactttgctttgcgtcctgctgtgcccctagctcctggaccagtgcccagcacaaagtaggtccttggtagatgttaaaggaatgtgttgagccctccatttcggccagcagctattccaggcattgcacctacattaaattgctctgtttagttagatgcatcctaagacggggagacaattttatctttagtattttattttacttaaaaaaaaaaaaaacttggccaggtgcagtggctcatgcctgtaatcccagcactttggaaggacaaggcaggtggatcacctgaggtcaggagttcgagaccaccctgaccaacatggtgaaaccccatctctactaaaaatacaaaaattagccgggtgtgctggcgtgcccctgtaatcccagttactcaggaggctgaggcaggagaattgcatgaacccaggaggcggagattgcagtggccgagattgcaccactgcactctagcctgggtgacagagtgagacttcgtctcaataaataaataaataaataataaaaagaaagaaaaaacttattataagccttttcaaacccacagaaaaggagacagaatggcataatatgcccttatatactgattacctttatataattgatacaaccatttggctattttgcctttattttctactcaagtatttatttatttattatttttttgagacagggtctcgctctgttgcccaggttggagtgcagtggtgcaatcatagctcactgcagcttccagttcccaggttcaagcggtcctcccaccttagcctcccaactacctaggactacaagtacgggccactgcacccagctaattttattttatttttaatttcttttggaaagatgagggctctttatgtttcccaagctgatcttgaactcctggccccaagtgatcctcctgccttggcttcccaaagcattggtgttacaggcatgagccacctcatctgacctcttctaaaatattataaaataaatacagacatcaaaatgaaaacaaaagaaaaagaaaaaacaaaacaaaaatccccaaaacaacaacaacaaaaaatgcagacatcaataacattcaccactaaatactctagtaagcatctgcaaaaacaaacaaacaaacaaaaaccagaatcccacctaagcatacagccattgtcgtaacagtgatatctacttttttggctgaagtgtctttttttttttttttttttttttctgtgagaaggagtcttgttctgttgccaggctggagtgcagtggcacgatctcggctcactgcaacccaacctccgcctcccgggttcaagcgattctcctgcctcagcctcctaagtaacacacacacgccactacgcccggctaatttttgtatttttagtagagacggggtttcaccattaagtgttttaatgtaggtgcaatgcctggaatagctgctggccaaaatggagggctcaacacattcctttaacatttaccaaggacctacttcgtgctgggcactggtccaggagctgggggcacagcaggaagcaaagcaagggttaagtgttttaagtgtttaagagatgcatatttcaggatgcatctctagataaggacattttccaaaataccagtatccctcctgacaaaactaacaaaaatcctgttagccaaataatcagccacattcatatttaccgtcaaagtttttatcctcattttacagcagtggagagcgattgccccgggtcccacgttaggaagagagagaactgggatttgcacccaggcaatctggggacagagctgtgatcacaactccatgagtcagggccgagccagccccttcaccaccagccggccgcgccccgggaagggaagtttgtggcggaggaggttcgtacgggaggagggggaggcgcccacgcatctggggctgactcgctctttcgcaaaacgtctgggaggagtccctggggccacaaaactgcctccttcctgaggccagaaggagagaagacgtgcagggaccccgcgcacaggagctgccctcgcgacatgggtcacccgccgctgctgccgctgctgctgctgctccacacctgcgtcccaggtaggggctgggtcccgaacgcctgcgcctggaacagggtctaattgagggggttgggggttgtcagaggatgagttggaggaatgcggttcagtcctcagcatcctccctaatcaaataatagtaattctcgtgctttgtgcaacgccacgcggcgcagtacctggcactcagtagctaaggaaatattagtggagcaaaggcatttagctttacataatttagtgagtgcttttttttttttttttttttttttgacagagtctcactctgtcgcccaggctggagtgcagtggcgcgatctcggctcactgcaacctctgccgcccgggttcaagcgattctcctgcctcagcctcctgggtagctgggattacaggcgcctgccatcgcgcccggctaatttctgtatttttagtggagaccgggtttcactctgttagccaggatggtctcaatctcctgacctcagatgatccacctgcctcggcctcccaaactgctgggattacaggcgtgagccaccgcgcccggcccaagtgttctttttttaaatggagttcttcgaagcctcttccttgcaatttcaaactaggcgatgggactttattaatttcgtttcgcagaggaaactagggcacagagaggttagataactggcctaaaatcacacagccagtgcttgaatacgcaggatctgaccctgcagcgccccccagcgctctccacgctgctgggtctccccctctgagaaacggggggacaggacccccttttacaaaaggcccaaagggaggctgactgagcggcgcagagccagtgctggagacccgggactgtccctcaggacctttccctctcactgaggcgactctcacttacttccccggaaaatgtggggggctctgggtcgaggaattcgagaaggaactgagtcagggcgggtggccacagggtgttggggccgcgatgaataacccggaaagcgctcgagaccgcgggaggccgggaatgagtaacagctccgggatactccgaacgcgcagctggaaagggatgtccgggaaggcccggaggtcggggaccgggcctagggactgggctgcaatctcggggcggagcctggggcggggagagagtgtcggggaggagccagagggcggggctggaacctcaaggaagagctacgggagaggttacagaccgaggaagagctaggagcggggctagaacctcgaggcggagccagagggcggggttataacctcgaggcgtaaccagagggcggagttataacctcgggaggagctagaaggtgggactagactcttgaggggcaggattataacctcggggaggagctagagggcggggctggaacctcaaggaggggctaggggcggggttataagcttggggaggagctacggggctgggctaggacctcaaggggccaaggggcgggggttacgacctcggggaggagctacagggtggggctgaaacctcaagaagggactggggcggagttatgacctcaggggaaaactaggggcggggagagctaaagggcgaagttagaatctcaaggaggagctagagggagggactaaagcctcgaggaggagctaggggcggggttatggcatcggggaggagctagggggcgggaagataaggtcaggaagagctaaagggcggggctagaacctcgacgatgagtctggagcggggccaaaacctagttggagagctggagggcggagacagaacttcgcgggaaactagagtatctaacaatagaaactccggagggctgatggggccgggcctagaatttgggaataaattagtgggccgggagaggctctggagccgggtagaaccagggggagtgagtggagggatagttccattagggcactgggagtgacggtataacataaagatcgacgcgggtggggcaaggctagaacgtccccagcagaactggagaggcgtaatcgaccgagggccggtgcggtgagaaggacctaataggagcaggaatagaacgtactgatagagagggcggggatacgactgtcaggatatacgcctcacgaggacagaatgaaaggaaaaacgggccaaggcaggactttgggaaaggacttgtgggcagggatagaacgttcagttagtggggtggaggtagaacgtggacaacggacagactggaagtaccgccggccggaacccagcagaacatggacacgaatctgaatggacggggcctggagacttggtgttggtattgggacatgcaggggtgagcgggggtcttggagctaagcgtagttaacctctcctctcctctccctccttcccccagcctcttggggcctgcggtgcatgcagtgtaagaccaacggggattgccgtgtggaagagtgcgccctgggacaggacctctgcaggaccacgatcgtgcgcttgtgggaaggtgagcttccccccaacccacacacccctccagcgcagcatggaacgcgagtgattgagaaaccttcctcaccagtaactgggacatgcaaactaaaaacaaacaaacaaggagagcccatttcacacccaccagattggcaagcatttaaaaatctgacaatacccgggttagtaaggatgtggagttgcagaccgtgtctgtggtgggggagtaaattggcacatcaaccacttagagcgattcggcaatatctagtccagatgaagattaacatatgctacagctcaactcctcgccatgcagaaatgccaaagaaccttggccacatatacccagggacacatgtatacgaatgttcttagcagcaatgtttgtgacatagaaaattggaaacaggctgggcactggctcacacctgtatttccagcactttgggaggcagaggcggatgaattgcttgaggtcaggagttcaagaccaggctggccaacatggtgaaacacccgtctccacacacacacaaaaaaggaaaaattagccgagtgtggtggcacgcacctgtaatctcagctacttgggaggctgaggcaggagaattgcttgaacctgggaggtggaggttgcagtgagctgagatcatgctactgcactccagcctgggcgacagagcgagatcctgtcaaaaaaatgaacgaaagagagaaaggtgggccgggcatggtggctcacacctgtaatcccagcactttgggaggctgaggcaggtggattacctgaggtcaggagttcaggaccagcctggccaacatggtgaaaccctgtctctactaaaaaatacaaaaattagccgggcttggtggcaggcaccagttatcccagctactcgggaggctgagacaggagaattgtttgaacccaggaggcggaggttgcagtgagctgagattgtgccattgcactccagcctgggcgacaagagcaaaactccatctcaagaaaaaaagaaagaaagaaaggaaaggaagagagagagagagaaagagagagaggaagggagggagggacggagagaggcagggagggagggagggaggagggaggaaggaaggggagaaagaaagaaaagaagaaaatggaaacgactttaagtcagtcagcaagtcagcagcagaagagaaacactgtggtaataattacataatggagcgctctactgcagcttaaagaaggaaatagagctgcagataccaatgtggacacatctcagaaacctaaggttgagagggaaaaaaatgttgcagaatatgatacgttttttataagctttaagaacacatgaaacaacagtatatgaagccaagcacagtagctcacatttgtacccctagctactcaggaggctaaggcagaaggattccttgagcccagaagttcgaggttgtggtgagctatgattgccccagctgggacaacagagaccctgtttctaataaataaataaataaaataaagttacatttgaggcatctcagtactgagatcactaagctgagggtgtgggggagggatagatggatccagaaagtcccagttgtagtgctgtcactacaagagcaggagtgggacacagtggctcacacctgtaattccagcactttgggaggccaaggtgggaggatcacttgaggccaggagtttgagatcagcctgggcaacatagtgagatgccatctgtataaaaaatttaaaaattagcagggtgtggtgatgtaagcctgtggttccagctactcgggaggccgaagcaggactgcttgagcctgggaggtcaaggctgcagtgagctatgattgcaccactccagcctgggtgacagagcaagaccctgtctcccggaaaaaaaaattaattaattaattaattgaaataaaatagagcaggctccttgttggggtgggggtggaggcaaggttaactctagaaaaagacagagttggactcaaataacagaagaggcctagcagagatcagccctgggagtggatgaccttgagaccaggagtgtcagaggctggttgagctgagaggagcctctggggtaatgaagatcccctccttgcagaaggagaagagctggagctggtggagaaaagctgtacccactcagagaagaccaacaggaccctgagctatcggactggcttgaagatcaccagccttaccgaggttgtgtgtgggttagacttgtgcaaccagggcaactctggtgagtagggcagcccttgccatccccaaccccaagccatccccagctcaacctcatcatcatcccaatcctattcttaactttacatcagctgaaccccaactccatgccttatccaagtcccaaccccaacccaacccatctctagctcagctccatccccaactcattcttgaccccatatccaaccccaactcaacttcacctccaatcctatgcccaacttcatgttaccctaacactgttcccaactcaaacccagccctgttccaagcacagttccaaccccatccccaaatcaaccccatccttatctcagactacccaaatccccaccccaacgacacaattactttcatccttaacccaatccccatcctgcatgtttgtatgtatggttgttatgtataacttgcaactctgcccttaacaagctcacacgcatgcatgagacatagatgagatgtctcagtgatgtttgtccatctgactgggcaggagatggtcctgcccaatccattgggacgggagatggtccaagcaatagatactgaggggccaggattcaagcaaagacttgacgttcttaagggaagtcgaaagaggggaagattaaatgggccgcagtaggctgggagaatcctctgcaatagatggtctctgacttgggcagtgaaaaaacaaatgtgaggaaatgtccataataggctgggtgtggtggctcatgcctgtaatccaagcactttgggagaccaaggcgggagaaccgcttgagcccaagagtttaagaccagcctgggcaacaaccataagcccctttgtcgaatttcatggcttcaggctctgatcattttaagaaaaagacttagaaaaggtcaaattttcctaaattcccacaggagaggaagggtggggaaggaatgggtccatggtgcatggatccatccgtgaaagagattcctctttctggacctggtgaggaaggaaatagggtaaggccagtctagtcatggttggtgacatcagtgagcagagtgctgcgtttgcactgggttttctttgttcttcattcatcctgattctgcctggttttcatccatcctgacctcaaacactaatccgctggtggggccaaatcagatgtttgttttgaggaagtgacgagaggatgtgggcttcccgtctcggtgagatgtgcttaaggaaagcaccaatacttgggtctaagtagtgcattcaatcagagatgatagcgaaaatatttaacaatattggtcagtgctgggacaaactcctggagtccgctgctgggcctggtgttgcccctttccatgatgggtcacagggacatgaagggtcctggggagagagttggcagtggtcagggatccaccaggagcttagagcagcagctatcaattcaggaatctaataactgagatacctatatcatccctttttcttttcttttttctttctttttttttttgtttccttttgtttttgttttttttttttgtttgtttgttcgtttgagatggagtttcactcttcttgcccaggctggagtgcaatgccacgatctcggctctctgcaacctccgcctcctaggctcgagcgattcttctgcctcagcctcccaagtagctgggattacaggcatgcgccaccacgcccagctaattttgtatttttagtagagatgaggtttctccatgttggtcaagctgatcttgaactcctgacctcaggtgatctgcccgcctcagcctcccaaagtgctgggattacagacgtgagccaccgtgcccggcctcatccccatttctaatgccattgtaccctgcttgtggcaacttgcatagttggttaaactgcactcagtacttacatgatgctgggaacacagcagggaccaagacagccttgtgccctgcctgactccatgggactcacagtcctgtgtgtgtgtgtgtgtgtgtgtgtgtgtgtgtgtgtgtgtgtgtgtgtgtgtaggggtgacagacccatccatcaccagacagtgactgattattaggttaatgcaaaagtaattgtggcttttgccattaaaagcaatggcagaaaccacaattacttttgcaccaacctaatagatttgtctgggctatgaagggggaaacacaggcagaggggtcagggctgggatgagggaagagtaggagctgtgggaccctagaggagatacctgactcaggtcagggaaggtttcctaggggaagcaacagctaagctggatcttgaaggatgagtaggaatcagactattaaacagctaatggaggctgggtgcagtggctcacgcctgtaatcccaacactttgggaggcccaggtgggaggattgtttcagaccagcctaggcaacatgactctacaaaaaaattaaaaaattagccagatgtgatggtacatgcctgtgatcccagctccttgggaggttgaggcgggaggatcactatagcccaggtggtggaggctgcagtaagctatgatcgcaccactgtaccccagcctgggtgacagagcgagatcctgtaaaaaaaaaaaaaaacagtggaaagggttttccagcagagggagcagcagatacaaaggtggccaaaagcagtgtggctggacaaaggaaacagtacagtggggcgagatgagctggaaagcttggcaggggcatgttacacaggggtttctagacattgtcctgggagcactggggcatcacagaagattttaaacagcgaatgtcatgatcgcaattatttatttatttatttttgagatggagtttcgctctttttgcccaggctggagtgcaatggtgcgatctcagctcactgcaacctccgcctcctaggttcaagtgattctcctgcctcagcctcccaagaaactgagattacaggcacccgccaccatgcccggctaatttttttgaatttttagtagagatggggtttcaccatgttggccaggctggtctcgaactcttgacctcgtgatccgcccacctcggcctcccaaagtgctgggattacagacgtgagccaccgcgcccggcccccatttatatttttaacaaattattctgacctcaggacagaagatagactgaaaggaagcaagagtagatgaggggaaaccaacttgggggtgggcgaggttgtccaggtggagaagagggcagcaggactagggtgtcaggtgtgcagaggaagaaaagtggatagatttaagagctattcaggctaggcacagtggctcacgcctgtaatcccagcactttggaaggccaaggcaggaggactgcttgatcccaggagttggaggctgcagtgatcacgccactgcactccagcctaggcggcagagcaaaaccctgtctcaaccaaagccgaacaagagctattaagaagcaggccttagtggtggattagatgtgggaggggacctgcaattctggtcatgatggagtcacttgtatcagaccaacccttctgccaatgacagttgcaaatgctggacaaataataaacaattattggaagtcactggagagcagcaaatgaaaggagaaacttggctgggcaaagtggttcatgcctgtaatcccagcactttgggaggccaagacaggtgaattgctcgagctcatgagttcaagaccagcctgggcaacatggcgaaaccccgtctctactaaaaatacaaaagttagccaggcgtggtggcacatgcctgtggtcccagctacttgggtggctgaggcacaagaattgcttgaacccgggaggtagaggttacagtgagccaagatcacacgactgcactccagcctgggcgacagcgcgagactccatttcaaaaaaaaaaaaaagaaaaaagaaagaaaggagaaacttgaggcgctacaatctctgaaataacagaagtgtagaatttgggttccacagacaacctggctttttcccggagcgcacttgccaatctgctgctgtggaagggaaatagagcccagacggaaagagagtcgctagactgagaagacggaggttggagtttggggctgccagaatgtctggaagatgagagttaaaatcctggaatggatgggaccacagaaaagggagttcccaacctgcaaacaaatctccctcaagtcattggcaagctctacatgcacagggtgagagtccaagaaacttggaagagaaaaatagcaactgggaagctacaaaagcgaacaaggcttccagcagacatgtgatgctggggacacaggttgccaagctgaagaggccttggtaagcatctcaggctttccccctaagaccaccccaggggtaagggccaaagtgaaatagaccagccctaaacaagcctaggtccagtccttgacaggaatgaaaacctgactctctgtggaagaagaaaacatcgtttaggcccttgacagatttttatctagaatgtctggcgtctgatcaaaatttacaagatagctaggcatggtggcatgcgtctgtagtcccaactacttggaaggatttcttgagcctgagagttctgggctgtagtgtgctatatcaaccgggtgtctgcactaagtttggcatcaatatggtgatctcccaggagcaggggaccaccaggttgtctaaggaggggttgaagcagcccaggtcagaaatggagcaggtcaaaactcctgtgatgatcagtagcaggattatgcctatgaatagccactgcacaccagcctggacaacatagcaagaccccatctttaaaaaaaaaaaaaaccaggccgggcatggtggctcaagcctgtaatcccagcactttgggaggccgaggtgggaggattacaaggtcaggagttcatgaccacactggccaacatggtgaaaccccttctctactaaagatacaaaaaaaaaaaaaattagccgggtatggtggcacacacctgtaataccagctacttgggagactgaggcaggagaattgcttgaaccagggaggtggaggttgcagtgagccgagatcacaccattgcactccagcctgagcgagagggcaagactctgtctcaaaacaaaacaaaacaaaacaaaacaaaacaaaacaaaacgcaagactctgtctcaaaacaaaacaaaacaaaaaacaaaaaataaaaaacagtaacaaaaaaccttacaaggtatcctgaagaaaataaaagggaccaattgaccagaaaccaagagaaaaatccaactgtagaaacagaattgtagcaactcagatattggattataggacaggaaacatgaaaattgctacaatcgatatattcaggaaaacagaagaaaggatatgttttagcacctggaatccattttttaaaagagtccaacagaaaatatagaacagtgactcaaatgaagaactcggcagttatgcttgatagaggtcagaaacagcagagcaaaaggattaaggagctagaagacagaacagtagaagcatgtcggttgatgcacagatgtggaagataagggggtctgccaggtttctgccccggggactggatggggccgccttggacgcgtggacttcaagaaaaagagcagttgtgggagaagatggggagttttgtttaggacaggtgtttgaggtatagccatggggcctcgaagagacagttgcgtgtctggagctcagagagaagtctagactagagagagatttgtgagtgatgagcagatagatggaaatgaagtcatgtcaatatttaccccatgagagagtctatactgtgagagataaaaagggcttaaaacagagccctggccaggtgcggtactcacgtctgtaatcccagcactttaggaggccgaagcggcaggatcatttgagtccaggagttcgagactagcctgggtaacatagcaagaccttgtctctacaaaaatacaggaatcagccaggtgaactggcacatgcctgtagtctcagctactcagtaggctgagatgggagaatcacctgagctcagggaggtcgaggtggcagtgagccactgcactccagccttgggacagagcaagaccctatctcaaaaaaaaaaaaaaagaaaagaaaagaaaaaggaaaatagccctaaggatcattggcatttacaagagttcacaccagagacccatgagtgaccacccagagtgggcagaactagaaatggggaattcaaggggcagtgggagctcagagcaggtacccgttccaggctgatgggtcagggagggcttcctagaggaggtgaaattgaagatgacagctgaagaatgaataggagttagagaaagtagggctcaaggaaaaggtgttctaggtatgaacagctatgttggcaatggtgagaatttgtgttttcattttcatggaagtttgtgtgagaagacgtgggtggccttgtagttatttttctttgagggggacgactgggctttggatgtaaatgattcgcctaattacagctagcggcctgccagttgagaaccttggctgacatggtcctctcacttttttaagacttggcctggactcagcttagatgtgtcttgggtcaggacggggagggcatgccaagcatgggaaatggtgtgagccaagggctgggtagaggaatgactctggtgtttccagggaaaagtaacggatccagttggccaacaccacaaggttcgtgcaaaaggcgaagtgatcaggaatcagtcaagtgagtctttgatccctgggacaattaggtagtgtattatctattgcttatctattatctattgctgcattacagattgcagcaataaaataagcatgtgttatttcacaaagtttctgaaggtcaaaaaccctggagtggcttagctaggtggttctggctcaggatccttcatgagcctgcagtcgagatgtcagctggggctgcagtcatctgaaggctcctaaggtagcttcactcacatgaatgctcccctcccatggctttggcacaggcctcagttctgccacgtgaactttcccatggtgctacttgagtgtcctcacaacatggctgctgcttgccccagaaaaagtgatccaagtgagagagccaggcatgtgttctatgatctagccacagaaggcatacaccatcatttccataatatccagttgactacatagggcatccttattcttttcttcttcttttttttttttaatttaaagacagagtcttgctatgttgcccagactagtctcaaactcccagactcaagcaatcctcccacctcggcctcccaaaatgctgggattacaggcatgagctgctgcacccagccagccctattctttaagggcatgaataccagggagcagagattattgggggccattttggagacaggctaccacagggaacaatagaagggttttaagtaattgctcattcattcattcatttaacaaatatgcattgaatatcttatctgtccctggccatgtgccaggtggtgttgggacacagtagtgatcaagacagcccctggccctgccctcctgggggctcacagtccagtagaggagacatacctgtcaccagacagtgaccacccagagtgggatgggggagtacaggggtgtgtgggagcctggtggatcaggaagggcttcctagaggaggtgaaattagagctgacacctgaagaatgagtaggagttagggaaggcagagagcaaaggaaaggtgttctagacagaaacaacggcatatgcaaaggcctggatgccagggaacatgtgtcgtcgcagactgtgggaagtcagtgtggagcagagtctcagggtgtagtggagggagacgaggcaggagaggtgctcaggccccagtatttgataggctttgaatcccatgctgaggatcttggaatttattttcagggcagtagggagctatggaagagtcttgagcagaggagagacagggtcagatatgagtattagaaatatccttctaagggcccgagtgcagtggctcatgcctgtaatcccagcactttgggaggccaaggcatgtagatcacttgaggttaggagttcgagaccagcctggccaacatggtgaaaccctgtctctactaaaaatacaaaaattagcccagcgtgatggtgcacgcctgtagtcccagctattcgggaggctgaggcaggagaatcacttgaacccggggagtggaggttgcagtgagccaagatggtgccactgcgttccagcctgggtgacggagtgagactctgtctcgggaaaaaaaaaaaaaaaaaggaaagaaatgtttctagggccatgtggagatgctgcactggggtgagtagggggtgacaagaatggaaacccagaggctagggaggtagctggagttgaaggaggtctgagctggactggtccatggggctggaaaggagggggtggattctagaaagattcagcaggcagaataggcagggctcaatgactggctgcagggtgggataaggaggaattgattttgagtgagtccttgcagagctggggctccaggactgtccccatggagtctcactcccctccccctcttccaaacaggccgggctgtcacctattcccgaagccgttacctcgaatgcatttcctgtggctcatcagacatgagctgtgagaggggccggcaccagagcctgcagtgccgcagccctgaagaacagtgcctggatgtggtgacccactggatccaggaaggtgaagaaggtgagccccaacctgctggcaactcctcctccctgctctgctcctccctaagactgcacttaacaaacaaccccaaagtaacagggatgtcagcaagggactaagttctctcatacacaagaggtccagtgataggaagtccagggccacaaggacaggtccagagtcaccaggaacccagatgccttctcatttctttttatttatttatttatttattttttgagacagagtcttgctctctgtcacccaggctggagtgcaatggcatgatcttggctggctgcaacctccgcctcccaggttcaagtgattctcctgcctcagcctcctgaatagctgggattacaggtgtgcatcaccacgccttgctaatttttgtatttttagtagagatggggtttcaccatgttggtcaggctggtctcaaactcctgaccttgtgatccacccgcctcaacctcccaaagtgctgggattacaagcgtgagccaccacgcccggccaccctcttgtttcttacacattacttccattctcaaaatgcctcatagtctaaaatggctgccagagctccgggtctcacatctaagttccaggaaggaggaagaaggaaagaagggacaaaaaagggggcactcctccttttgtaagggttctcctttctggaagtcccataaagcacttctatttatatcacattagtccgaacttcatcacatgactacctggagaggctggaatatgtagttttcgacaagatctatgactgttctagataaaatgagggtcttatgatgaagggtgaagtagagaatggttgaatgcctgctatttcgggcaaatcccatcttagtccctcattcacaatctgacatctgacctctgtcccctggcccccatagggcgtccaaaggatgaccgccacctccgtggctgtggctaccttcccggctgcccgggctccaatggtttccacaacaacgacaccttccacttcctgaaatgctgcaacaccaccaaatgcaacgagggcccaagtaaggaacgggagacacaggcaaggcctggggtcgggcaggggcatgcactcaggcagacagctgcgcagtcactctctggcaatcaagtcctctctgggcctctgtttgcttttctgaaaaatgggagtatcaggcctttttttttttttttttttttttgagacggagtctcactctgttgcccaggctggagtgcaatggcgtgatctccgctcactgtaaacttcgcctcacgagttcaagcgattctcctgcttcagcctcctgagtagctgggattacaggtgcccaccatcacccctggctaatttttctatttttagtagagatggggggtttcaccatgttggccaggctggtctcgaactcctgacctcaagtgatctgtctgcctcagcctcacaaagtgctggggtaacaggcatgagccactgcacccagccaggcctttcttcaaagaagaacttcgtaaggattcaatgatactatcagccctcgccaagacctgtgcttcctgtctcttttgtctctctcaaattttcccactcctcccctgctccactgccaccacctgggctgagccacgctgacttcttgcccaggttgttgcaatgacctcctctctggtctccctgcttccactcctgccaccctacagccaaggctcaacccagcagcgagtgattttttggggggtatgggggggacagggtctcgctctgtcacccaggctggagtgcactggcatgatcatggctcactgcagcctcaaactcctgggctcaggaattcttcccacctaagctactggagtagctgcgactacaggtgcatgccaccgtacccagctaattttgtatttttggtagagatggggtcttgctttgttgcccaggctggtcttgaactcctgggcttggcctcccaaagtgttaggattacaggcatgagccaccatgcaccaccaattttttattttttaatgtaaatcagatcatgtcaccctcctttctcaggcacttcaatgacttccccttcctcttagaataagatccaaagaccttattctgttggcctatgtaatctggcacctgtctgcctcacagtctttgtttagattcgtttttggggttttgtgttttctttagacatagggtcttgctctgccacccaggctggggtgcagtggcacaatcacggctcactgccacctcaaactcctgggctccagtgatcctcccacctcagcttcccaagtagctgggactacagatgcgcatcattgcacccagctacattttttttttttttctgagatggagtcttgcgctgttgcccaggctggagtgcagtggcgcgatcttggctcactgcaagctccgcctcccgggttcacgccattcccctgcctcagcctcccgagtggctgggactacaggcacccaccaccatgcctggctaatttttgtatttttagtagagacagggtttcactgtgttagccaggatgatctcgatctcctgacctcatgatccgcctgactcagcctcccaaagtgctgggattacaggcgtgagccaccacgcccggccgcacccagctaaatttttaaaacttttgtagagatggggtctcactatgttgccggggctggtatcaaactcccaggctcaagcaatccttctgccttgacctcccaaagtgctgggattacaggcatgagccgctgcacctggccttcatttagtttctttctttcttcctttctttctttttttagatggagtctcgctctgtcagccaggctggagggcagtggcgtgatcttggctcactgcaacctccgcctcccaggttcaagcgattctcctgcctcggcctcccaaagtgctgggattacaggcatgagccgctgtgctgacgttcatttggtttctataatcaccaaagcccatctggtctcatggcccttgcagatgaatatcctcccttagaacacatcttccccaagagttcaccctgctggcaacttctcatccattaggcctcagctttaatgtatcatcttcagggatgctttcactgtccctcccctccagtgtaatctagatccctgtctctattacccagcactgtcaacagatagaaatgttccctatctgtcctgtccaatattacagccaccactgtatgtggtcagtgagcacttgaaatgtgaactgaattttaagattcgatttaatattaatttatttaaatgtaaacaaccacatgtggccagtggctaccagattgggtagtgtagctctaaattgtaaattctggctgggcacagtggctcacacctgtaatcccagcacttttggaggcggaggcgggagggtcgcctgaggccaggagtttgagacaagcctaggcaacatagcaagactccgtctcaaaaaaaattttttagtaataataatagtaataacttgtaagttctggccaggtacagtggctcacacctgtactccgagaacattgggaggctgaggcaggcagattgcttgatcccaggagtttgagaccagcctgagtaatgtgtcaaaaccccatctctacaaaaaacagaaaaattggctaggcatggtggtgcacgcctgtagtcccagctactcaggaggctgatgtggaagaatctcttgagccggggtggtcgaggctgcagtgagctacaattgcgccactgcactccagcctgggcaacaaactgagaccctgtatcaaaaataaataaataagttgtaacttttgtgagagcaaggacagtttcatcttacatagttttacccagcacccagcacggtgcctggccagaaatgggactcatggggagttgaaagttggggtttctctcaagccctcgaaaaccatccccctccaaatgccattcagacgcctgaccacaaggtggctccatgacatctctggctcggagtggaagtcctggggaggtcattcaaggaagtggagatccaagcactaattttcttggtctctgtgtctctggtcttctcctaagtcctggagcttgaaaatctgccgcagaatggccgccagtgttacagctgcaaggggaacagcacccatggatgctcctctgaagagactttcctcattgactgccgaggccccatgaatcaatgtctggtagccaccggcactcacggtgaggccctctccgaggctgggagggaacacttattgggggtggagagttccgcaagagattgacttccagttaagctggagttaactgtggtgggtctccctgtggaaaaggtgggatttccttcaggtgggtgaatattattgtaaggaattaggacttgtccatcaggatgtggacatttttgccatggaaaagtggaattccggctgggtgcggtggctgaagcttgtactctcagcactttgggaggctgaggccggaggatctcttgaggccaggagtttgagaccagcctgggcaacatagcaagacccccatctctacaaaaagaaaaatggaattctttggtggatttctcgtgggttgtggggatttgctgaagacatcttgggctttcatcctgtggtgtcctggaaaggtctctgtattccagtggttctcaaactttttggtctcaacttcttcatgcttttaaaaattatttttggccaggtgtggtggctcacgcctgtaattgcaacaccttgggagggtgaggaggagaaccacttgaggtcaggagtatgagagcaagcctggccaccatggtgaaaccctgtctctacaaaaaattacaaaaattagctgggtgtggtggcgtgcacctataaccccagctactcagggggctgaggcacgagaatcacttgaacccaggaggaggaggttgcagtgagtggggatcaccccactgcactccagcctggatgacagagggagactttgtctcaaaaaaaaaaaaaaactctttattgtttatatcagtgatttctatagataaatgccacattaaaattaaaactgagaaccaggagtggtggctcacgcctgtaatcctagcactttgggaggccgaggtgggtagatcacctgaggtcgggagttcaagaccagcctgaccaacatggtgaaaccccatctctactaaaaatacaaattagtcgggcatggtggcacatgcctataatcccagctactcgggaggctgaggcaggagaatcacttgaacctgggaggcagaggttgcggtgagccaagattgtgccattgcactccagcctgggcaacaagagtgaaactccgtcccaaaaaataaaataaaataaaattaaattaaaattaaaactgagaaatcttttttttttttttttgaaatggagtcttgctctgtcgccaggctagagtgcagtggcatggtctcagctcactgcaacctccccctcctgggttcaagcaatcctcctgcctcagcttcctgcatagctgggattacaggcatgagccaccatgcccagcttatttttgtaattttagtagagacggggtttcaccatgttggccaggatggtctcgatctcctgacctcatgatctgcctgcctcggcctcccaaagtgctgggattacagatgtgagccaccgtgcccagccaaaactgagaaatctttaaagatttatttatgaattcatcttataacaataaaaactcattacacattaagataaataacattttaatgaaaaataagtatagtttccaaagaaaaaatgtaatgatagccaggcatggtggctcatgcctataatcccaatactttgggaggccaaggtgggcgggtcacttaagcctagggatttgagaccagcctgggcaacatagcaagatcctgtctctacagaaaatacaaaagttagctgggcatggtggtgcatgcctgtagtcccagctgcttgggaggctgaggtgggagggtcacttgagcctgggaggtggaggttgcagtgaacggagattgcaccactgcactgcggcctgggcaacagagcgagaccctgtcttaaaaaaacaaacaaagaaacaacaaaaaaaaaaccagccaggcgcggtggctcacgcctgtaataccagcactttgggaggccaaggcgggcagatcacaaggtcaggagttcgagaccagcctggccaatatggtgaaaccccgtctctactagaaatacaaaaattagctgggcatggtggtcgcgcctgtagtcccagctacttgggaggctgaggcagaagaattgcttgaacccgggaggcagaggttgcagtgagccgagatcgtgccactgcactccagcctgggtgacagagtgagactccatctcaaaaaaaaaaacaaaaaaaaagcgtaatgagaaaactggcattattttgctgtgttgcacatctctttaatgtccagcttaatagaagacagctgggtcctcatggaagcttctgctttcagtctcttgcaatatcacatgtcctggagtttttggaaaagcccattgtacacttatgagagtgaaaaagccatgtgaaatcacagatctcctgaaagggtctctggggtccctgagccacactttaagaaccgctgctcgcttcctttctttctttttttttctttccttttctttctctgtctctctttccctttctttctttctttcttccttccttcctcccttccttccttctttcccttctccttccttccttcctccctctctctctctttctttcttttctttcccttcttcccttcctcccttccttcttccctccctccctccctcccttccttcctttctttctttttatttgttttttgaaacagggtctcactctgttacccaggctggagtgcagtggcgtgatcataactcaccacagcctccatctcctgagctcaagtgatcctctcatctcagcctcccaagtagctgggactacagctgtttttttcttttttatgtttgtagaaacagagttttgctatgttgtccaggctggtctggaactcctgggctcaagctatcctctctccttggcttcccaaggtgttgagattacaggcatgagccaccacacctggccctgagaactgctgctttctctaggtggtagtgaaggtggcacccactgcaaggtggcaggtcacctactggagaattccagtcctgggcccaggagctggaagtctcactccgtcttctctttcctcagaaccgaaaaaccaaagctatatggtaagaggctgtgcaaccgcctcaatgtgccaacatgcccacctgggtgacgccttcagcatgaaccacattgatgtctcctgctgtactaaaagtggctgtaaccacccagacctggatgtccagtaccgcagtggggctgctcctcagcctggccctgcccatctcagcctcaccatcaccctgctaatgactgccagactgtggggaggcactctcctctggacctaaacctgaaatccccctctctgccctggctggatccgggggacccctttgcccttccctcggctcccagccctacagacttgctgtgtgacctcaggccagtgtgccgacctctctgggcctcagttttcccagctatgaaaacagctatctcacaaagttgtgtgaagcagaagagaaaagctggaggaaggccgtgggccaatgggagagctcttgttattattaatattgttgccgctgttgtgttgttgttattaattaatattcatattatttattttatacttacataaagattttgtaccagtggacaaggccaggtatgcccttctttgtagtgtctatctttgggaggataaatggtgggggacaccttttcacaggctcctggaatcaggggtcatgtttgaggcccctgcctaggttggaagtcctcctgggggctgcctccacatctatttctggactccaaatgctgacagagcaggagcactgccatcttgaacaaacaccaccattcttagttcctcttgattaaaaatcggctaaatccggacgtggtggcgggtgcctgtagtcccagctattcgggaggctgaggcaggagaatggcgtcaatccgggaggtggagcttgcagtgagccgagattgcaccactgcactccagcctgggtgacagagcaagactctgtctcaaaaaaaaatcagctaaatccagccccaaaacatcagcctaatggctaccatcagcataaccagaaacattccaaccctaagataaacccctctctgaccagaaacatgccaacccccagatagcctcccttccgaccagagactttccaaccccacaataaacttttcctcacatgaaaacattccgaacctagataagcacccccttccaaaactcttaaatatccttagtctgtaaaaaaaaaaaaaaaaaagggctctctaacctaactcagccaaaagcccccctcaggttggttttctctaaaataaacctgtccttcaccgtcaagccacatttcatgtttctttccttttcctttttcttttcttttcttttcttttcttttctttttttgagatggagtttcactcttgttgcccaggctggagtgcaatgacacaatctcagctcaccacaacctccacctcctagttcaagggattctcctgcctcagcctcccaagtagctgggattacaggcatgcaccaccacacccggctaattttgtatttttagtagagacagggtttctccatgttgttcaggctggtctcaaactcccaacctcaggtgatctgcccaccttggcctcccaaagtgctaggattacaggcatgagccaccgtgcctggcctcctctttctttaattcttacaaatgcaagcttccagatcacacactgaacactaaccttctagtcttctcctaaacttcaaaggttgcaactattttgttgttctaaggagacatccccacatttcccagcatgctttgggaaaggagacggatagaagataacctgatggccagaactccctgcatgcactgcagtgaggaataaggacaggagtgcacttcccctgatgtgctggggaccggggataaaggctgggctctatttcccgggatgcctcaggactgtcagaaaaagagacagaactaccatttcaatggc

SEQ ID NO: 24929 - DNA, 19942 bp, Homo Sapiens
agagctggtccatcactcaataaaattattctctgcccatcctcacccttcaactgtcagcgaattctcattcttcttgaacacaggacaagagctcaggaacaaatgaaggtacaaactacaatacaggcagggtggggtatggccgggtgggtggggcagcaggcctggagtggggccttgctggccagaaatgtcctgagcccctcttctttggtttgtctgagaacaagggcagggcttgagggatgcacacacagtcccaaacacacatatgcacttggcaaacagacaacgttctccacaccacaatgaaatccaaatccacagactggccactgcaaatcatatatgactgcaagtgcacacacacacacacacacacacacacacacacacacacactttgaagcaggtgtcagcctccaagaaaaagtgatggacagtctgtctctcatatcctcacatatttggttcacctggagatggcctcagatgagccaagtgacacagaggtgcgagagactgaggatgtgctgaggtgttacccagcactccagtagtgctattacccaacacaaaaattggtctgaatatcagatttcaagcaagcaagggaaacccagaagagactgggagaagtccttatggaggctaaagcaactccatgttggatgctaatccacagttttggccgtgttggctttggagcctcccagaagacctctgagattcccaatttatcaattgctccttgtgtaagtgcaaacacttactgtaaatccggcccttaggtcaaacaaccttgatgttatcatacttcaactgtcctacacatcttttctgaatcacccttcccctgtggtctataagccctggtcctgggggtgaatcatggagacacaaacgtagcttctgtttataagtccttattaaatgtttttttcgaagaaactggatgtgtcagcctgtaacctgcaaaaggatctggctgctctctgcttgtagaaagaatggataataaaggaaaatctgctagctgccatgctagcaggggaagagcagcaaacaattccactcttcaattcatggggggaacgcaggggttttttaagaaaggatctgaaatgcagaaaaggcaagggggaggttaggaggtaccaggtggtgtgacttgctccagtggtcctctttaattatcgtcttatttggtggaggggctggtgcaatcgtggatcctgccaggttataaattagttactcttcagcagggtatatgttcaactcctgaagtaagcttttgttggagagagaattccggaggtgcctggtccctatcaggacgcagctcctgaggcatctaaggaaatatatgaccaggtaagagcatagcgtgtgcttaacaagcacgtaggtaaataaacgtgcgtaaggcatgggagtacagtatgggacaggaaagggagtggaggtcacagcacgtcctgaggctgtgttttaagatgagaggtaacatacatgcagtttgtctcaaaattatatcttgaggcccagaggaggaagagaaaaaaggaaagaagagaaactaagtttaaaacacggtttaaggctgggcgcggtggctcacccctgtaatcccagcactttgggaggctgaggcgggtggatcacctgaggtcaggagttcgagaccagcctggccaacatggtgaaaccccgtctctactaaaaatacaaaaattagcccaggcgtggtggcacatgcctgtaatgccagctactcggaaggctgaggcaggagaatcgcttgaacctgggagacgaaggttgcagtgatccgagatcacgccactgcattccagcttgggcgacagagcgagactgtaaaaaaaaaaaatagataaaaaaattttaaaaatcgcggtttgaggctcagctgctgagctgctggttaaaagcctctttcttgggtctctcagcttcctgggactttgggggcaggtctgcataaactgcttagttgtggacccccctccaacaattaggtaggggactactcagtattcatccatcggtgtcctcagacccccagacggggaggccctggggcaacgccaagactcacaccggcgtcctggcgcctttgccctcaagggcctgcaactacctcctccccattcggagcggccgcggccacatccttaacgccaagccggcacgccaggcaaaagcggctcggacgccctcaccccaccttccgcactcagggccgaggctgtgcctggccacctgcttcccagcacatgcacacacgcgcgcgcgcacacacccacacacacgtacccacggccggccgggctacccggaccactttgatccgaaggcactggaggcccagagggaaggaaagggaggggtggccggagcccgctagcgccccaggacagcctcgggttgccccaggcggtagccctgtgggacagtggttccccgtccgcggcctcgggggcggggcgtctgtaggcctcgccccgctgacgtcagccctgcggggcgctggcggagcgggcggcggagctgtcagtcccagcccaagggtagctggaggcgcgcaggccggctccgctccggccccggacgatgcggcgcgcccaggatgctgccgtgcctcgtagtgctgctggcggcgctcctcagcctccgtcttggctcagacgctcatggtaaggctccgggacgcggcccttccctgccctgccctctccgcgcccgctccattaaagttctccatccagtggagagccctggctggctggccctctggcagagcggtgcccgggtgctcccttactctggcaaacctggatctcaggctcacctgttgtggaagtggaagaggctgaaattgacaggaactgacggattgggaaggatagagaagtatgcgcaaggccaaacccccaacccgcaaacctcatcatccacccacttctagatgagccgtaagtttagctctaggttttttgctgtttaggttcaaatgatgggacttcttgtccccttggggaataattttgatctcctgactctcccttctcttagtcgactcttcaactaacctctgtctgtccttctcccatctcaccttcatccctcactgatcaccccgatctgatcccccttgctccacctgtagcccccaactcactcccactgccccctgcctctctcctcctaacccagccagttcaggcttctaacccagttcaggctcctaacccagacagttctccggcaaggtttctgcaactaagaaaagtaaaccccagagacagaatgaaagagccgggagttggaaggaccaagagcagagacagagagcaaggaccgaaactgcttcttcatgacaccaaaatacaaagtaaaacatgcagtcagccattcacgtgatcgagagctgagtcggagatgtgcagcccaaataccacaacgactcgctgcatttttcactttccgtctaatgtttcgaaatcaaggcactgacgtgaagatcaaagacggtataagaaagaaagcaagagacagatgacagagtcctcccccccaaaaaataaataaaaaacaggtgcatgattagagagatgtagagaagttagaacactagggagcgggagcagagtcgctgtcaaatggagagaacttagaggatcaaggaggagagaaagggaaccaaccagccgttggccttgcacatacttcagtctgcttgatcaacaagactcttaaagtagaaatgtttgttgcattcttacaaagaagacaatgccttcagcagtgtttcccatggtgaatggtgtgtactgggggtaaagggagagtagagctaggaattggtattgagtatctctcctcggagctacaggtgccagctcttgtggggatgtcctcagccatgtgtagagccagagctgatttattccatctgtccttgcccagccagaggttggacatctggctataggcaaagccctcccagaaactagggaatgaggcaagcacttagcttggggagcccaggagacctatgaagagaaggaggcagatgtcagcaagcaggctgtctgtgtacttagtgaggtggctttgagctggagcctgggccaagccagggtggggatcaggtgtgtggatggggccaagcctaggaatagtgctagagcagggacagggattgggcagagccagggactaacacatctgagagctcattgccaacttgcttagccctcggcccctgccttcttccctggtaggcatcagactcagcttggctcttctcagcccccactgcagcttctgatcacagagagcacagggcagtgatttagggagacacactagctctagaatcagacacatgtggattcatgtgcccactctgccccttacgggctccactggcctcgggcgagtcatagcctctctgaacctccctttcttctttggtaaaattggggtcatcaatgcctgccccccctcccagctgtggtactgacactcttctccccagggacagagctgcccagccctccgtctgtgtggtttgaagcagaatttttccaccacatcctccactggacacccatcccaaatcagtctgaaagtacctgctatgaagtggcgctcctgaggtgaggaaaagggaagagggagggggagggaggagtgaatccccgccttgtcctctactctcctagcatgggaagatacctgccttgttaatgaagtgagtgcctgagggcccctaacacatagccagcagttgacaagtactgactgagactcccttgctgagcaatgtgccgggagctctgggtgaaaaggccagagcctttgctcactccagagtaagaaaagccttgtgccaaggcttttctcttttttgttttgttttgttttgtttcgttgagacagcttctcgctctgtcacccaggctggagtgcagtggcgcaatctcagctcactgcagcctctgcctcctgggttcaagcaattctcccatctcagcctcccaagtagctgggattacaggggtccaccaccatgcctggctaatgtttgcatttttagtagagacgggttttcaccatgttggccaggctggtctcgaactcctgacttcaggtgatccacccgcctcagcctcccaaagggctgggattactggcgtgagccaccacctccggcctccaaggcttttctatcttactggaaaaggagaagcatccacagtacagccagacaacaggggaacactaatgactgtaaaggcagtggggagaagggagagaccaggctgtgctgtaggagccagaaagaatttctggaagagctgggcctactcgtattcctatctaaaaatctgctagaccacatggaaattggtacggggtcccaagaccaagggagacccctcacaatgagctgccgtggactagaggatatagcctgagggctgtcccagtttctcccaatgtgggagctctcttcctggcctcttgcgtctcccttaaaggaggtaggattgagcacaagctcgtttccagtgcctaacctggtatctcctcaggtatggaatagagtcctggaactccatctccaactgtagccagaccctgtcctatgaccttaccgcagtgaccttggacctgtaccacagcaatggctaccgggccagagtgcgggctgtggacggcagccggcactccaactggaccgtcaccaacacccgcttctctgtggatgaaggtgcttttcctcccttgacttagaacatggctctgaagtcccttccagccaggaactctagtctagagcttttctgtctattaccatagctcaccatgtctgccagcctccctggccggagaactagttgcccaaacagggcaggactttggagaatgttagataaaaatagcccaagttgtttgagatttaaaagggaactggagttgtttatcctacagaagagaggtcttggggtgggttggggcagctgagtcaccaggtccaggcctgtgaacttgttttttcagggagggttcagggagaggaagcgaatccatgaacactcagcatagggcagcaagcagtaggcagaatttgggtgaacgccccgcttctttaggggtgaacacccaggggtcatccctttgaaatgggaagtgctactaaagagaagttatggatccctctctggagaggtaagaggaaaggataagcccccaactcagtgggatttttcatcccaccagttgggattgagaaagttttgtgtgcatggagacctcgctctgtaggattcagagttagagccgatggtctaggaggtcattggcttccaaatgcctgcccacaggccactgctcagctggtgcagaaacgtttcccagcaagtgtgtttaaaatatctatttccagggcccagcctcagaaattcagaccaactgtgtcttgaatgggcccagggcatctgtattttttttttttttaacattttgttcttctttgtattttgatttgagcaaggcaattataaaaagacatttttgaggaaatcaccatatttgtatatgaaatggtttttagggcatattactaggtatttgtttgttacatgtgataacagcatggtagttatatttacaaaggtgtgatatgtgagagatacatacttacgtaattaggaattaagtaatacagtgcttgggatttttctttaaaatgctaaagtaaatttcatggggggatattgatgaccctcccctgccaccaattacttcaaaattggcctagtgtttgcaattactaaagctgggactttggaaatcattatattctcttctacttttctgtctattggaaatttctacataaaaatataatcaatgcaatttatcacattaaccatttaaaaaagaaaacaacatttaaaaagaaactaagcaaagttaaagtagaaagaaaatgtcctaacctgtagaaaggtatctatctacacatatctaccataaatattatgcttaacagtaaagtgttgggctgggctcggtggctcacggctgtaatcccagcactttgggaggccaaggtgggtggatcacctgaggtcaggagtttgagaccagcctggctgacaaggtgaaaccccatctcttctaaaaatacaaaaattagccgggcgtggtggcgtgcacctgtagtctcagctactcagggaggctgaggcaggagaatcacttgaactcaggaggcagaggttgcagtgagccaagatcaagccattgcactccagtctgggtgacagagcgagactctgtctcaaaaaaacaaacaaataaacaaaaaacagtaaagtgttgaaaacgttttataaaaaagtttttcttttaattgacaagtaataattctacatgtttatgaggtacagtgttatgtatacataatacatgtataccttgtggaatgatcaaatcaaggtaattagaatatctatcacctcaaatatttagcatttctttgtgccaaaaacatttaaaatattatctttcagctattttgaaatatacagtccattattattactacagtcaccttgccgtgcaataggcaccagaacttattcctcctgtctcactgtaacttggtacccctctccttgttccctatccacttctcccacctgcctccttccagcttctggtaaccgcttctactctctacttctatgaattgaattctaaaagaattctacttagattctatacataagtgagatcttatggcatttatctctttgcacctggcttatttcgctcatgatgtcctctaggtccatctgtgttgtcccaaatgagagtttccttttttttcaatttgagacaaagtcttgctctgtcacccaggctgcagtgcaatgtcttgatctcatctcacttcaacctccgcctcccgagttcaagagattctcttgcttcagcctccttagtagctgggattacaggcacgtgccaccatgcccggctaatttttgtatttttaatagagatggggtttcaccatgttggccaggctggtctcggactcctgacctcaaatgatccacccgcctaagcctcccaaagtgctaggattacaggcgtgagccactgggccgggcctcagtttcctatttttcaaggctgaataggattctgttgtatatacataccacatttaaaaaacccattcatccattggtgggcatttccatatcttggctgttatgaataatactgcaatgaacgggggatacaggtatctcttcaatacactaatttcaatatctttcgatatatacccagtagtgggaattgctggatcacatggtagctctatttttagattttcgaggaacatccatactgttttccataatggctgagaaattcaccaccagcgacgtgcaagggtttcccttttcaccacatccttgccaatgcttgttacttccatcttttggataatagccaatctaacaggtgtggagtggtatctcattgtggttttaatttgcatttctctgatgattagagatgttgaccattttttcatgtatctgttggtcatttgtatgtcttcttttaactgtctattcaagtcctttacccattttaaaaacaggtttatttgttttcttgttattaagtagtatgagttccttgtatattttggatatgaaccccttattcaatgaacatttgtaaatattttccacccattcatagattgtgtcttcactctagtggttgtttcttttgctgtgcagaagctctttagtgtgatgcaatcccatttgtctatttttgcttttgttgcctgtgctttagggatcgtatccaagaaatctttgcccagaccaaagtcttagaactttgccccaggttttcttctggtggtttttatagtttcaggtgttacatttgtctttaatccattttgtgttgattgttgcgtaagaggtgagacaaagatctattttcattgttctgtttgtgaatatccagttttcccaacaccatttgttgaagagactgttcttttcccattgtgtgttcttggcccctttgttgaaaatcaattgtgggtttatttctgggctgtccatcatattccattggttgatgcatctgattttagggtatatgtatttttaatgtgctccccaagaagtccttacattctgctgcattgacaaacctgtggccaagttttaggcctaggttctaattaagcttaattctggaggcaaagtctcggcggggacacccaggccctcctcagccctcaagtctcatggtattcccccccaccccaactccatttagtgactctgacagttggcagtgtgaacctagagatccacaatggcttcatcctcgggaagattcagctacccaggcccaagatggcccccgcgaatgacacatatgaaagcatcttcagtcacttccgagagtatgagattgccattcgcaaggtgccgggaaacttcacggtatggggttccccaaggccccagggccagaactcccttggcttccctgtcccctgggctggaagcacccttgtgtgccattgggaactttgcttatggactaaagggagggtctgggatggtgggtgggcagaggagggagtagaaaccacctcagccctcagagctatgctcttgtgagatgctcctcaaaggaattgcctactagggcaattgggcaccccagagcccttgtagatgaagcaataaggctctgagaggctgtgtaacctaccagagggcgcccctgttatgggagagctggcatctgcaaaatccaccctctctcctctccaccactgttgattccagccccttctgggaagatcttcagcatctataaaacaccgctttttcttttaaaatacaaaataaaattgtggtcattacagagatcatgtgctgcattggtaattgtggggtttgtcatcttagacaaaggatactgaagggggttggctgaaatcacctctaaaggcccaccagctctcagtgtccgtgtgccatgaaataaaaggattttgttaattgctatcatttttgtttcagttcacacacaagaaagtaaaacatgaaaacttcagcctcctaacctctggagaagtgggagagttctgtgtccaggtgaaaccatctgtcgcttcccgaagtaacaaggggatgtggtctaaagaggagtgcatctccctcaccaggcagtgtgagtcagctgggctgctctcagcatggggagggagactgggagggcctggtgcaatccaaaacgcgtgcacctgggatgctggtgccagccactgtgttaggtgctgcttcacatagctctgcatccttaataggagagaggtcctactgtcctcattttagagatgagggaactgaggctcagtattagcaacttcctagggttgcacagctaggacttggtggcagaaccaggtctcttggatctagggtcctcccactggagcacagcggtgtttcccaacaacatccccctcccccggggccatcttcagtgagctgtgctagttcctgttgttacagtcttctgctgttcttcctcagagccagggatacaaagggcttctccttacttcccctactctgctctgctcctcgccagagctgctaaagtcagcaaatactgctccaggctgtcagtcaggtgccggggctgtagggggagggagataatagaggacatggaggccacggtcttgcctaggaggatcttgcatcctggctggggagatagagtgtgcacagaggagactgtaacaagcaactcttattggacagcagatgagatgtccagtgcccaatgaaacatgccaacagtaagtgctctgggagggcccagtccagtgtgggcagagtctggcaaaggtgaaagtgactcctgctagatctgcaacaaatttcagtttgtgaaggacactcaacagctcagtgtcatttaagtctcaatgcagaggaaggcactaagtgggtatcaggcagtcttaagagtttttcatacattcattcactgatacatgaaatagttccaaatctcagctttacaacttttgaggtatatgactttgggcaaattacttaacttctatgtgcttcaggatcctaatatgtaaaaatggggctgatgatagtatttacctcctataagtataaaagttaaaagaatctgatggtattggtacatggtcagtgctgtgtacttcacaactaccttatgaggtcagtggctctgacagagtaattaatttgtccacaattgcacagctagtaagtggtgaagctgggacttgaacccagatctagcagcccccggagcctcgattcttacctgctgtaccatcctgcctcactgttctgtttgctgtgatgggagtcatgtgcagagagctggaagcagttagcgcatctcctgagggaatccttcagggcatggtttggaaggccaggtagggattcgcagaaacctagacacatctagagttgtggcctgtagtttgccttgggccactcactgaatggttcctgacagtgggcaatggatttcatgggaccagagtcctatgtccagaatcaccgtgccccatggtgacaggccacaaacacatctctctgggcctgcagatttcaccgtgaccaacgtcatcatcttctttgcctttgtcctgctgctctccggagccctcgcctactgcctggccctccagctgtatgtgcggcgccgaaagaagctacccagtgtcctggtgagtcttgcaaggaggtcactgccccgtccttcccagccacacccgagcttccaggagggcagggagctcttttcctcccagccagtccattgccttagcttgcctctgctctcagccctgatgtgattgggagataccttcatcaagcgctgtggggacagagggaggaagtgagcatgaagcccagtaccgagaatgttgccatccagtagctcagatgagacacatggaatcacaaatctcaatgaccacgagccattttgatatgatctactagtagttggccatggactagcccctgtgcattgcatctctgattatgaggcacagttattatccccatttcataagtgaggaaactgaggcacagagagattgttacacacagagggccacacagccaggaagagtcagggagggaacccactttcctactgctattagccatgggtgttccacaagagagaaagaaggaaaggccagaagtgctggtcctcgggctgctgccagagtgggccagaggagagaggacactggggggcggtggggatgctgcgccactggagaggggatgctggcgggggacagggaggggctcatggaggaggccaagccctcctcccctcccagggtgtgtcctcttgctacattgtactgacaaatgatacatttgtggcaagccagtctccaaaactcagcttgcaaagattgggcagcattttccaaacctcggcctggtctctggcctggagttcaggccgcattgaagattgcccaccatagcctccatagctggcactattgcatgatggctgagggatcagctgggaaggaaccagctccgtctgcaaggcaggggccccacaactggaaggggaatctccagagcgatcctgggatctctagggaaaacaagacgagagacaagtgcagtggcacaatctcagctcacttgcagcctcaccctcccaggttccagtgattctcctgccttagcctcccgagtagctgggattacaggcatctgccaccatgcctggctaatttttgtatttttagtagagacggggtgttgaccaggctggtctcgaactcctgacctccggtgatatgcccacctcggcctcccaaagtgctaggattataggcatgagccaccgcaccctgccccttctgtacttttggatcacagaactgacttgtccttgagggttttttctcttcaggataaatatagctcaatcccttcatctgatgatcgtagtcattaccacatgaataaattataatgcacagagcactgacacattcattagtttgttctcattcattagcttgtttgatttgatctttcaacagttcatcaaggtaagtattattggacaaggaagggatttcaaatcaggacagttgaggatgaattccagatgtgttctttactgttgtgccactttgtgcaagtcatttaacttctctgagcttcagttttctcctctaggaaatagaggtaataatacttctcttacagaattattggagggtaaagttcaattcaacatatatttattgagcaccttctatgtaccacactttgttctaagcactgtagacacattacaacataaggaggcaggtactgtcattatttccatgttacagatgaggaactaaagcacagagagggtaagtaatttggtcagggtgacaaagctgataagagtcagagctgggatttgaacccaggaagtctggctctagaggacacatcctaaatcaccaagcaatgtgataggaatagggactcaaccaataagagctgcatttgaatcatcatgtaccaaggaaatgagggcagatgtgcaacagtgagtcagtgagtcagtcggcagaccttaggagggcctactgtgtgccagctcagtttagactctggagacagggtagtaaacaacactagacagttcctgccctcaaggagtttgtgttcttttgggaatgtggagtaagtgagtgtgtgtatggtgagagacgaaaacaaacaagtaaaataattctaggaacaaagtgctaggaagaagtaacagggttaatgtggagagagtggcaggagtactgctttaggcaaggtattcaggaaggctttgctgaagaagtgacatctgagctgagacctaagccatgtacaggacacagccatataaagtgccgagagcatttcaagcaggagggagagtgtgtgcaaaggccctgaggcagcacggtgcttgatgtgttctgggacagaaagaacaccagtgtggctagggcagaggggttatgtggcttccttgaaacccttggcaattaacagagagcagccccttcactgtgagttccacacttgtgccactgccccacgctgcagccaccatgttcgcgtgagtcactactcggggaatagaaaacttaatttggtgtcttacatccagaattttagaaaatgaagtaggcaggagggcatagactgggatacaatagaataagaactgcagaaatatcgtggcacagctcataatgatgagtattattttgtgaaactggtttcagttatttacatacgggttatatatacaagtcattatgcaacttatttctgattttgagtcatagtcaaaaaagtttgaaacatgcttctagatgggtctagcctgctttcaggtttgaaaagcactgtggatggagccacctgagagttttcaccatgctcagcagaccttggttctgcctgttactccatctgggcctgagaatacaagtttcttgtgtatctggcctgagccaaactgggaattgcattaggaggaaagctggattcgaaaacaaaacagaatacattccagtgtaatttagactgtagtctcctccatcgagctctcctcctgggcctggccttccccggcagcactgggatgggtgctggaaggtgactcctgcttctctcactctgccctctcttccccagctcttcaagaagcccagccccttcatcttcatcagccagcgtccctccccagagacccaagacaccatccacccgcttgatgaggaggcctttttgaaggtgtccccagagctgaagaacttggacctgcacggcagcacagacagtggctttggcagcaccaagccatccctgcagactgaagagccccagttcctcctccctgaccctcacccccaggctgacagaacgctgggaaacggggagccccctgtgctgggggacagctgcagtagtggcagcagcaatagcacagacagcgggatctgcctgcaggagcccagcctgagccccagcacagggcccacctgggagcaacaggtggggagcaacagcaggggccaggatgacagtggcattgacttagttcaaaactctgagggccgggctggggacacacagggtggctcggccttgggccaccacagtcccccggagcctgaggtgcctggggaagaagacccagctgctgtggcattccagggttacctgaggcagaccagatgtgctgaagagaaggcaaccaagacaggctgcctggaggaagaatcgcccttgacagatggccttggccccaaattcgggagatgcctggttgatgaggcaggcttgcatccaccagccctggccaagggctatttgaaacaggatcctctagaaatgactctggcttcctcaggggccccaacgggacagtggaaccagcccactgaggaatggtcactcctggccttgagcagctgcagtgacctgggaatatctgactggagctttgcccatgaccttgcccctctaggctgtgtggcagccccaggtggtctcctgggcagctttaactcagacctggtcaccctgcccctcatctctagcctgcagtcaagtgagtgactcgggctgagaggctgcttttgattttagccatgcctgctcctctgcctggaccaggaggagggcccctggggcagaagttaggcacgaggcagtctgggcacttttctgcaagtccactggggctggccccagccaggccctgcagggctggtcagggtgtctggggcaggaggaggccaactcactgaactagtgcagggtatgtgggtggcactgacctgttctgttgactggggccctgcagactctggcagagctgagaagggcagggaccttctccctcctaggaactctttcctgtatcataaaggattatttgctcaggggaaccatggggctttctggagttgtggtgaggccaccaggctgaagtcagctcagacccagacctccctgcttaggccactcgagcatcagagcttccagcaggaggaagggctgtaggaatggaagcttcagggccttgctgctggggtcatttttaggggaaaaaggaggatatgatggtcacatggggaacctcccctcatcgggcctctggggcaggaagcttgtcactggaagatcttaaggtatatattttctggacactcaaacacatcataatggattcactgaggggagacaaagggagccgagaccctggatggggcttccagctcagaacccatccctctggtgggtacctctggcacccatctgcaaatatctccctctctccaacaaatggagtagcatccccctggggcacttgctgaggccaagccactcacatcctcactttgctgccccaccatcttgctgacaacttccagagaagccatggttttttgtattggtcataactcagccctttgggcggcctctgggcttgggcaccagctcatgccagccccagagggtcagggttggaggcctgtgcttgtgtttgctgctaatgtccagctacagacccagaggataagccactgggcactgggctggggtccctgccttgttggtgttcagctgtgtgattttggactagccacttgtcagagggcctcaatctcccatctgtgaaataaggactccacctttaggggaccctccatgtttgctgggtattagccaagctggtcctgggagaatgcagatactgtccgtggactaccaagctggcttgtttcttatgccagaggctaacagatccaatgggagtccatggtgtcatgccaagacagtatcagacacagccccagaagggggcattatgggccctgcctccccataggccatttggactctgccttcaaacaaaggcagttcagtccacaggcatggaagctgtgaggggacaggcctgtgcgtgccatccagagtcatctcagccctgcctttctctggagcattctgaaaacagatattctggcccagggaatccagccatgacccccacccctctgccaaagtactcttaggtgccagtctggtaactgaactccctctggaggcaggcttgagggaggattcctcagggttcccttgaaagctttatttatttattttgttcatttatttattggagaggcagcattgcacagtgaaagaattctggatatctcaggagccccgaaattctagctctgactttgctgtttccagtggtatgaccttggagaagtcacttatcctcttggagcctcagtttcctcatctgcagaataatgactgacttgtctaattcatagggatgtgaggttctgctgaggaaatgggtatgaatgtgccttgaacacaaagctctgtcaataagtgatacatgttttttattccaataaattgtcaagaccacaggaatcgtgtgaaactagtcagattgctgatggcacattggctcatggaggactcggttgttgataatgaggagggtaataatgtgtgggatgtgtgatgtcactttaaggaaacagggctgaggactcaggcttaaatctgacagacccagggagtcctcatgctacctgtattgtgaccttgggcccattacttatcctctccaagttttaatttccccacctgtcacgtggagttgacaactccccatgaggatgttgtgaggtgtaaatgaaattgcacataaaaagtttaacatggtgccaggcatgtggtactatgtgccactagctgtcattggctgttgaggctgtaaagaaaaatggacagcttttcttggaaacaagtgaaaatgaaagcgataaggagtgtgcagcgggactctttcagaagacagaaaaggaagaggtggaaagcacaatgcaacgttttggatgtgagttctgacaatgtggagagaagaacctggaaacccctcctttccaggaagacagcaaaccgggcctccctggagctctgttcccagagccctgtccctggctccccttgcccaggaggcatgtcccagtggtggttctcctaagtgcggaagccatctgcactctattctagaagcagcctgctccctccatgaaaaaccccatgtgggtttgaatttctccccatgctcagcccagtgggtagaacaaacccaggcccgcggcctgagcttcctgggtgtgcttttctcttcgtcctacctgaatcccctagaaggtgactggggacacctcacctcttttcccctgtgtcatctccaatcttgcctcaccccgttcattctgagaaaataactagttctgaggaagtgctgatcctatcatcttcagagaacttgactaatatcacgccatttcagacctgctcaggcttttgccctagagccctccttgtcaatattggaaagaaaagtagtgttggtcactttctcctggaaatgaggtgttagcgatggcttattccccatggaaaaggcccctaaggtctaaatataaagattcagagagtaaaaggaattacattcaaggaactgcagccagtttggttggatacgacagatcaaagagcagcttgcaggacagaaggaagtcagaagacgcagcccttggtgcaggccctgcctgctccgtttctgtggaatgagtaggagtttgcgctggttcatctctgctttgaggctgctctgtaaccactcaccacagacaggcccttgggagaaactgagcgagtccttccaagcagccggggctgatgagacacttgcagatttcttgggaatttggattacagcccccaacagaaggccccagctgttcttcaactgagcaatctccttcaagggcttttccaagctgaggaatgcgtaatgctgtctttgtgtgagctaatggaacttcctcttagtacagagagggggtaaatgggccaccattgagtgaagaggaaattcaataaactgtgttttcccaactttgtaaatagctatagtcagggtgtgccttgtctacccagcatatattcatcccccggcctcagtgttcacactttcacagaagacacacagtccctaggaagctgggtcccacccccagagcccatgctgctctgctgggtggaaggtctctgagccccacatgggaacagcacagcaagggaagctgtaggctgtgaccacctgggaccactgacaggtctgctgcctaagtggcaggtctgggcagtcagggctgatttgatcaagcctcaacctagaggaccctagatactaggaagcttgactcattcatttcctgttgtgctcatgggttaaaaaagcaaacccacagttttgggtttgaagtaaaccccaatttaaaattaaatgcattgttattaatgacacacagcacattttcccactatcatctcgatcctaacttcacttaatttcccataaacctccaaaaagggttgtgggacccaataaacactctgccgaagaaggactgggtaggataaaacttgtgttttaagaatatggctctatccaaagcatcagacatgaatcagaaaggatggggcaggaggcaaagagacctggctggagacttttattgtagtcagcatttcattttgtcaaaaaacattacgaagcacttgttatgtgttggacatggtgtgcagccctgggtacagagtggtgaaccaaacaagtg

SEQ ID NO: 24930 - DNA, 4951 bp, Homo Sapiens
gcgtcgccctcctcccattgagcgaggctgtgtcgcgtggcccagcgtcggcgtgacggttggacgcgggcgcggcactgcgggtcccgattgctgcagccgcttgtcagtgtgatgaagattggcaccccagacaccattcgcttttcacccaagatgatttgatgtcttataaaactctgatgaaccatgatggctacacagacattaagtatagacagctatcaagatgggcaacagatgcaagtagtaacagagttaaagacagaacaagatccaaactgctctgaacccgatgcagaaggagtgagccctccccctgtggagtctcagaccccgatggatgtggacaagcaggccatttataggcatccactatttccattattagctttgttgtttgaaaaatgtgaacaatctacacagggctctgaaggcacaacttctgccagttttgatgtagacatcgaaaattttgtaagaaagcaagagaaggaagggaaacctttcttttgtgaagatccagaaactgataatttaatggtaaaagcaatccaggttttgcgcattcatcttcttgagctggaaaaggttaacgaactctgcaaagatttctgcagtcgatacattgcttgtctgaaaacaaaaatgaacagtgaaactctgttgagtggagagcctggaagcccgtactcaccagtgcagtcccagcagattcaaagtgccatcacaggcaccatcagccctcagggaattgtggtgccggcgtccgcgctgcagcagggaaacgtagccatggcgacggtggcaggtggcacagtgtatcagcctgtcacggtcgtcactccccaaggccaagtggtcacacagacattgtcgcctgggacaattaggatccagaactcccagcttcagttacagttaaaccaagatctcagcatcttgcatcaagatgatggttcatctaagaacaagaggggcgtcctgccaaagcatgccacgaacgtgatgcggtcctggctcttccagcacatcgggcatccctacccaacagaggatgagaaaaaacagattgctgctcagacaaatttgacactactccaagtcaacaactggttcatcaatgccagaagacgaattcttcagccaatgttggattcaagttgttcagagacccccaaaacaaagaaaaaaactgctcagaaccggccagttcagaggttttggcctgattctattgcatcaggagtcgcacagccaccgccgagcgagctcaccatgtcggaaggagctgttgtcaccatcaccacgcccgtgaacatgaacgtggacagccttcagtctctgtcctcggacggggccaccctggcggtgcagcaggtcatgatggcagggcagagcgaggacgagtctgtggacagcacagaggaggatgcgggtgccctggcccctgcccacatcagcgggctggtcttggagaacagtgactccctgcagtaggggcaggagcagacgcacctgactttttggagtttgcacagcaaacattttacacagttttatttctaatatgttttatatgtagatatagaagagtgcacttttgtatttcatagtaagcttaaagcgcgtctttgccggtgcagcgacttctttcaagtgtgtgtgtgtgtgtgtgtgtgtgtgtgtgtgcgtgtgtgcgtgtgtgtggatttttaaagaaattctttaaaggtttaacgctagattgtgaggaatgacacaccactccctccccaccttgaatccctaattagattaaggaatagcgctgccattttctaaaccgtgatgcggttgtcacttagttctgtggttccagcagatctcagtgggctggttgatttgtgtggcccatggatttgaaagaagctgctgcacccgaaactgccagtgtgcggtgacaacggcacacgcctagactgagtgtggtttcgtcgtgagtggatggacggcaagcttagcaagcctaagtcccctcatgttcagtgagcctgtttcatttgctatatagaaaaagaaactcctatttttaccttgctggaattattggataaaaaagctatttttataaattcgttatgaattggatgatgactatattgaggataaaatttctagagaagaaacaatacatgcttgctattaatatttcaatttggaatgttctgaattgaccaaatttaatgaacctgcccaaagttagctaccgttccatggttctttgctctccccgggtagtgatgaacatttactactataaaagaaacagctatttaatgaaattttgatatctgcaaatttttgttgatatgtaatgctcagattgcattttacacttgatctaaacatatatcgaaagatatctgctaaacaggacttcaggtaagtgaggtgaaatggtagccagtgacccgttaggagctctcaccgtacatactccagtctaatttaaatctgaccacagttgcatggtcgctttaccatgttagctgtgtattgttttaaaagttttaacttcaaaatatgttatgcacagaatgtttattataaactaatataaaatgtgctctaccccattggctcagagctagggcaaacagcagatattcagactttattacttaactagcggacatccctggagtcccagcagcgagctggtctggcgagggcacctcggcagcccccacgggttggctcctacgtttgcgtttgtggctggtctcctggtgtcagtgttctcttgtacgttgttgctttcgacttttcagagccctcctgctcacttgaccacgtgagatttggaataactgtaggacttctgtttcctggtaacaagatgaaccgagagagtgggctgggttctgttttctttggttttgatttgttttcattgtttacttaggagtggtgctttttctcagaaaacaggccacggtgtttcatacagaatgtcttcatatcatctgaaatggtatggctgaagttcatttgtttacagggtcgggaatgtcttcagttcttgagagtcaacagtaatgattggttgtaagccaagggacattttaagctagtgaagagttttttctggaattgatttttcccaaaagaatatattaattgaggttaagaagtcagtgggaaacacacagaaatttgttttaaaatctttcaggagctttactgaaagacttggttatcaagtcttttggggagagaatgacattttttttttgagacagagttttgctcttgttgcccaggctggagggcaatggtgcaatctcagctcactgcaacctccacctcttatgttcaagcaattctccttccttagcctcctgagtagctgggattacaggcatgcgccaccacacccggctaattttgtatttttagtagagatgggtttctccatgttggtcgggctggtctcgaactcccgacctcaggtgatctgcctgcctcagcctcccaaagtgctgggattacaggtgtgagccaccgcgcccggccgagaatgacatcttaaagccaccattgcgttcctcatttgtgaactgtcttctcatattttaagtcaagtctataagatcatttttaacctaagttccaactttgttggactccttaaaataagcacccatgaaagccagccagcccttcctccttccctcaccaccctccgtctcttcggctgcttgctctttagtgtagattagtggaagccattcacagaatgtagactcatgtataggtcaccgtttctttcccccactagaaatcacattcactaagcagtggattgaatttaagagtgctgcccctgcccggcgcagtagggcgtgcctctagttccagctactcgggagtctgaggcagaggatggcatgtgccaggagtttgaggctgcagtgcactatgcttgcacctgtgaatagccactgcactccatcttgggcaacacagtgagacccccatctataaaaagagagcactgcctgaacctcggtggcactgggaagctctggcctgagagttaaacacccatgctgaatgatacagtgtgcattctctccagctgcaaactttcttcaactttcctaaattcttactaaattcagaggaataggataaagatcacttagagaaagggtgcttatggacatagcctgagtttcctttaacctctctgcaatgggtgcttttaactagcttctacatggcaagctgtttcagtttgcaaaatcactgcccagcatgtttgaggtcagttggcaccttaaaacacctgttctccagcccttggacagtggagagaatctgtaaaagtgtgaccccctctaagatttcgttttaaatgatcagattcggttccagttttattcttgttgagtttttccctatgaaggctccttttgaatgtgtcttgagacccaaattgagcatgttgctgttattcctgccctgcacctgtggagcaggagtggcagggctggctgtgctgggttccagctcgctcccaccgagggactagcttggcctttgcgctttgattccagatagtaagatgagtggaagtgtttatcgagcatgcaaaagaaaccctcacggctaagggctctgggagttgtgtctgtgtgacctgagagtgatccatctcctgcctgtgtgaggtagcagtgggcacttttcattgagacaaactccagggtgtccagagggggttctgccccttgtgaaggcccattcctggcacttagagacagaaagaactcagcaatctttcgttctagttatattcggtctttgaaactgacaatctttgaaatgtgaatactgtaacaatatgttttcttggattgttgtctttaaaaaggatttttgtgaagcaattgatttatcaaag

SEQ ID NO: 24931 - DNA, 2748 bp, Homo Sapiens
gcctcagtcggccccctggcttcaagatacatcaaggtccctgctacccgagccaaggacacctctcccacagtgcttccccaccctgctcccaacaagactccttctcacgggtggtcttgcacagctggagcccatagtgcagcaggtgctggctgaagagcccctggctccacactgccccactcctgaccagggtgatgcactggaggagggcttggaccctcagctcctccctcagtgctcccgaccacttccagggactatccccaagctggccagcactcctgcgccccaagaggagtgtttggggtgcttcctcttggctgcagtgggacacaggtgtgccttcctaggaactgggccctgactacttccagcccaacactcccgggcctgtgaactgtgacctgtgtgccgggatgggttttgtgggtctgccccatccccgcactgctggatctggccaagtgggtgaaggctaaggccggtcagagttgagtttctgccttgtcccctctcctgggctagatgccacaccaggcccagtgactcatagggcaggcagttgggaaataccaggcagagggcaggtcctggtctcagctggccagcctctgctgtctgccatcccaggggaggtggccaaagtcccaactgtgagccaggccccacattcactgggcctcctccagggtctgtatgccatggaaccctggacatggggctatgaaggaaggtgggtgttgctaagcccaggagcatgggcccctaaccttggccctgtgccccaggtgaggctggtgccaagttcattgaggtatctaaagaggcccggaagcggttcctgggccccctgcacccctccttcaacctggtaaagatcatccgcagtttcctgctgaaggtcctgcctgctgatagccatgagcatgccagtgggcgcctgggcatctccctgacccgcgtgtcagacggcgagaatgtcattatatcccacttcaactccaaggacgagctcatccaggccaatgtctgcagcggtttcatccccgtgtactgtgggctcatccctccctccctccagggggtgcgctacgtggatggtggcatttcagacaacctgccactctatgagcttaagaacaccatcacagtgtcccccttctcgggcgagagtgacatctgtccgcaggacagctccaccaacatccacgagctgcgggtcaccaacaccagcatccagttcaacctgcgcaacctctaccgcctctccaaggccctcttcccgccggagcccctggtgctgcgagagatgtgcaagcagggataccgggatggcctgcgctttctgcagcggaacggtgcgcggacccgggcgggagagggcggggtgggctcggctctgctaccccctgcgggccgcggccgcgctgatgaactgagaatcccttctctccccaaccccaggcctcctgaaccggcccaaccccttgctggcgttgccccccgcccgcccccacggcccagaggacaaggaccaggcagtggagagcgcccaagcggaggattactcgcagctgccgggagaagatcacatcctggagcacctgcccgcccggctcaatgagggtgcgcacctgggggacgggaggggaggaggggaggcaggagggaaagagagagaggagaggacggtgagcaggggagggaagccgagcggtcctgggcccccgtgcctccactggccgccgacctcccgcccacccgcagccctgctggaggcctgcgtggagcccacggacctgctgaccaccctctccaacatgctgcctgtgcgtctggccacaggctgatggtgccctacacgctgccgctggagagcgctctgtccttcaccatccgcttgctggagtggctgcccgacgttcccgaggacatccggtggatgaaggagcagacgggcagcatctgccagtacctggtgatgcgcgccaagaggaagctgggcaggcacctgccctccaggctgccggagcaggtggagctgcgccgcgtccagtcgctgccgtccgtgccgctgtcctgcgccgcctacagagaggcactgcccggctggatgcgcaacaacctctcgctgggggacgcgctggccaagtgggaggagtgccagcgccagctgctgctcggcctcttctgcaccaacgtggccttcccgcccgaagctctgcgcatgcgcgcacccgccgacccggctcccgcccccgcggacccagcatccccgcagcaccagctggccgggcctgcccccttgctgagcacccctgctcccgaggcccggcccgtgatcggggcccctggggctgtgagaccccgaccctctcgaggaaccctgcctgagacgcctccattaccactgcgcagtgagatgaggggactcacagttgccaagaggggtctttgccgtgggccccctcgccagccactcaccagctgcatgcactgagaggggaggtttccacacccctcccctgggccgctgaggccccgcgcacctgtgccttaatcttccctcccctgtgctgcccgagcacctcccccgcccctttactcctgagaactttgcagctgcccttccctccccgtttttcatggcctgctgaaatatgtgtgtgaagaattatttattttcgccaaagcacatgtaataaatgctgcagcccagcaaaaaaaaaaaaaaaaaaaaaa

SEQ ID NO: 24932 - DNA, 1388 bp, Homo Sapiens
gagcctgtggctccccctgcgggctgctcagcggcgtgcacagtcctgccggctggcttggtggggtgccgaggctcaggcagcatgacgacggagacctttgtgaaggatatcaagcctggctcaagaatctgaaccttatcttcattgtgctggagacaggccgagtgaccaagacaaaggacgggcatgaggttcggacctgcaaagtggcggacaaaacaggcagcatcaatatctctgtctgggacgatgttggcaatctgatccagcctggggacattatccggctcaccaaagggtacgcttcagttttcaaaggttgtctgacactatatactggccgtgggggtgatctgcagaagattggagaattctgtatggtttattctgaggttcctaacttcagtgagccaaacccagagtacagcacccagcaggcacccaacaaggcggtgcagaacgacagcaacccttcagcttcccagcctaccactggaccctctgctgcctctccagcctctgagaaccagaatgggaatggactgagtgccccaccaggtcccggtggtggcccacatcccccctcatactccctcccacccacccagcacccgaatcactcgaagccagcccaaccacacacctgcaggcccgcctggcccttccagcaaccctgttagtaacggcaaagaaacccggaggagcagcaagagatagcatgacattctttcttcctgccaccaaccacatcccaagtgtcccctggagagcaagatagccttccactgattggctggtgtagcagtattttagccactgaacttcagtggagggtggtgagcagtgtccttatccaccctaatctcatactccctcattgtccagctgaactacctgtcccctgggagtcaggaccctctgcctgctctctttcctctttagaaatggcagttactggctgggcgcagtggctcacgcttgtaatcccagcactttgggaagccgaggtgggcggatcacctgaggtcgggagttcaagaccagcctgaccaacatggagaaaccccgtgtctactaaaaatacagaattagccaggcatggtggcgtatgcctgtaatcccagctacttaggaggctgaggcaggagaatctcttgaaaccgggaggcggaggttgaggtgagccgaaattgcaccattgcactccagcctgggcaataagagcgaaactccatctcaaaaaaaaagaaagaaagaaagaaagaaagaaagaaatggcagttaccatctgtttcttctgtgtgagacatgggagtctaactgaagtctctccttcctaataaatgttaccactcttaaaaaaaaaaaaaaaaaaaaaaaaaaaa

SEQ ID NO: 24933 - DNA, 1934 bp, Homo Sapiens
gcccttgtgggggcgctgcactggggatcctcatggtcttcggcctggcacccgcccaggggctgagacagtggctgccctagagggacgcccgattctgcccatgtgctccgctgtctcttgggggtctgagtagtggggggttccctgggtagaagagtcaagctggggagcacgctggaggggaggccttctctatcctggtgcccagccagtgggctggcctcccaaggagggttgactttgtgtgtgtctgggaggctgtgccagccgggaggctgtgcctctgtcctctaggggagctgggaaaacactggggctggaagcatcagatgcataagatagagttaggtttaaaatgattgcctggtaactgtgaacagcagatgggagggtggccaagactggaggaggcagccccccttaggagcctgtgtcagctgtgcagggggtggaggttggcctggtctagggggtaacaaagcagacgggaaagcagcacgggggtcctcctggcagactgtggggaatggttgcgctagccacagggactatttaagtaaaattaaaaattgaatggcaatatttcccttccttttaaaactaccttgttcggttgatacttagtaactccgtggccagttgaagcgctggatgtttcctagaacaagaaccaccaaagcctgttcgcacagaagggcgaccttgcagggactcgccgccgcgacctcagtgtggcttttacaggactccccccgagcatcagcagggaccccggcggacgtgggcgggcgcgcgtgagctcgggctgcccggccgggcgtgcgggcggggacatggtaacctggtccacggagggcggccgccaccctcgcgtagctttcctgtggttttccaggactgtccggtacagcccgggctccgcgtgccccgcccgctggagcacacctgccaccgaggcgcgcgtggggccactgccgtggcggcggctgccctcctcacactcggctccgcgccgcctccggccaccgtgcgctcccgcgtggggcgcctcggacgggcccgggagggctgggggctcttccccggaggaagcggcctccgcttcgctggcgccgcctttttagcttggacttcagtcctccctcggggactcacctccggagtaaacggctcttcattagcttggagtggccgcaggtcccgtgaccagcacccgcgagaccctgtgcgacagctgggctgatgctccgtttctctgggaattggtgattttttactgtgaagatgaaattaccctaatagcatgaagatcgtgggtctgtgtgtccgtgaagtgagtcccgtctgccaggagctgacgaaccacgaatgcttctgcctgtgctgtgcattcccgggcccgcagctcccggtcgaggggactccgatgtgaatttgttgtgaatttgttgtgccacaatagcagttctggaatgaagctaggaaactcgagtgtgctttttgtttaatgagcgttcaccaagctgagccggagccatcctttcggtggtagttggggaaggctatgcagatttgctctgttgtgacgcgttggtgacggtgcccagcctgcggttccccacagcatcgcaggcgctcggaaatcctctcccgtgcctttagaggaaggagaggattcctcaggaatgcagggacgcctgtttctgtcctcacaccacagaaaaaaacctgagggaaaaatgagacgtgaggttcctgatttaagaagcctgggtttttttcatggtggggggccatttggaatgacagcctcacttccttttgatggctacatctggatacttttcctccctgtgtttaatgtttccctagggagaggaaataaagcagaaggaacgtgttaaaaaaaaaaaaaaaaaaaaaaaaaaaaa

SEQ ID NO: 24934 - DNA, 1083 bp, Homo Sapiens
gagccaagggtggcagtcacagagatgttcacacaaaggagcctccttctgctgagacaggcagcacagggtcccctccaggaagtggccatggtaatgagggtttctccctccaggccgggactgacaccactggccaggaagtggctgaagctcagctggatgaggatggggatttggacgtggtgagaagaccacgagccgcctctgattccaacccagcagggcctctgagagacaaggtacatcccatgattctagcacaggaagaagacgacgtcctgggagaggaagcacaaggcagcccgcacgatatcatcagaataggtgtggcggggcgccctgctcctggcagactacatcctgttccgacaggacctcttccgaggatgtacagcgctggagctcggggccggcacggggctcgctagcatcatcgcagccaccatggcacggaccgtttattgtacagatgtcggtgcagatctcttgtccatgtgccagcgaaacattgccctcaacagccacctggctgccactggaggtggtatagttagggtcaaagaactggactggctgaaggacgacctctgcacagatcccaaggtccccttcagttggtcacaagaggaaatttctgacctgtacgatcacaccaccatcctgtttgcagccgaagtgttttacgacgacgacttgactgatgctgtgtttaaaacgctctcccgactcgcccacagattgaaaaatgcctgcacagccatactgtcggtggagaagaggctcaacttcacactgagacacttggacgtcacatgtgaagcctacgatcacttccgctcctgcctgcacgcgctggagcagctcacagatggcaagctgcgcttcgtggtggagcccgtggaggcctccttcccacagctcctggtttacgagcgcctccagcagctggagctctggaagatcatcgcagaaccagtaacatgacccatcgcctccaccaggcgcggcgtctcgactgttcttagagtgtatttctagtaaaatcagaagctcaccaaagcaaaaaaaaaaaaaaaaaaa

SEQ ID NO: 24935 - DNA, 2471 bp, Homo Sapiens
gttcgtttagaacagaaactgttcatacttggtgcgctgtggactcttgtgataattaaccaagagtagctctatttgtccaacctcacacctaaagaagaaagaaaatggcttgtgctgagttttcttttcatgtaccaagtcttgaagagcttgctggagttatgcagaaggggttaaaagataactttgctgatgtccaggtctctgtagttgattgccctgatttgactaaggaaccctttacctttcctgtaaaaggcatctgtgggaaaactagaattgcagaagttggaggtgtgccttacttattgcctcttgtaaaccaaaaaaaagtttatgatctgaataaaattgcaaaagaaatcaagctgcctggagcctttattcttggagcaggagcaggtccatttcagactctcgggttcaattctgagtttatgccagttattcagacagaaagtgaacacaagcctcctggtaaatggaagttactttgcccatgtgaaccctgcagatggagggtgcctactggagaaatacagtgagaaatgtcatgattttcagtgtgcattactggctaatctttttgccagtgaaggccaacctggcaaggtaattgaggtgaaagccaaaagaagaactggaccacttaactttgtgacttgtatgagagagaccctggaaaaacattatggaaataagcctataggaatgggaggtactttcataattcagaagggaaaagtgaagtctcacattatgcctgcagaattttcttcctgccccttgaactctgatgaagaagtgaataaatggttgcatttttatgaaatgaaagctcctttggtttgtctaccagtttttgtctccagagacccagggtttgatttgcgactggagcacactcatttttttagtcgtcatggagaaggtggacactaccattatgacactactccagatatagtggaatatcttggatacttcttacctgcagagtttctctatcgcattgatcaaccaaaagagacgcattcaattgggcgagattaaatcagctgatacttatttagaaaaagaaataattaaggttaattaattgattgacttattaattaatactgatataaaaccaatagaaatgatcccacaggccaggcacaatggctcatgcctatatcccagcactttgggaggctgaggcaggaagcacactggagcccaggagtttgagaccagcttgggcaacatagcaagaccctgtctatttttttaaaaaagtaaaaaatagaaattatctcactacttaaatcccatttttttcacttcatatgaaagaacatattgatagtatattctatattatttcatagatctgtctgaaagagattgggaacaaaaatatctaattgagatattctttaattttttacatagcagctttattttttttattctgtagtatcagcgaaatcagtcatgtttataccttgaatataaatatcaggaatcatgcaattatttctactatgtatttagtagtatcttatatttgtataacattattacattttgcaaattagtatcacaactgctaagtagatgtttctgagtattagaaaaatcagtgttattacctgcaggatattaaaaaacatttgaaaaagagaaaaagaaaaatcagtgtttagaaatgttgatagttattgaatctttgaattgaattttaaaaatccattctagtaatcagagtatactttttttatagaacaaggtggcaggtggggagccctttacccttctggtgaagttaaaccatagaagtttacaatttgcctttcacaaacattagcagtccgggcatggtggctgaagcctgtgatcccagcatgttgggaggccgagtgggaggattgcctgagcctaggagtttaaaccagcctgggcaccatggtgagaccccatctctattatttaaaatgtttcttaaataaaaaaaacacaaacattagcaactagttggctagccataattcctcccttgtttcgattgccagttagaagcaatttttatttcactggttatttgcaagagaaggggtaaaaaaacagcatcagagtgcaacactgaagtgagcttactttaatttgtaagtgaagctgttgctgaacatgaccactatcgttgctgaaatataaaattatactcactgattgtaatggttgaaattttcctgaataatcattagccaaagatcaactctctaatggtgctaatggcaatctagctaatgtgcaaatttaggaagtcttcagtactaagtacataattttcaaataatattttttaattgtctactttggatgttagctatgtcttgtgagtataaattccaattttaagcactattttgatgcaaaaaaatgaataaaaaatttaatttatgaaaaaaaaaaaaaaaaaaaaa

SEQ ID NO: 24936 - DNA, 17209 bp, Homo Sapiens
ggactgagagcagggagcagcaggcatggggcatgccgggtgccagttcaaagccctgctgtggaagaattggctctgcagactcaggaacccggtccttttccttgctgaattcttctggccttgtatcctgtttgtaattctgacagttcttcgttttcaagaacctcccagatacagagacatttgttatttgcagccccgagatctacccagctgtggtgttatcccctttgttcaaagccttctttgtaacactggatcaaggtgtaggaacttcagctatgaagggtcaatggagcatcattttcgtttgtctaggttccaaactgcagctgaccccaagaaagtcaacaacctggcctttttaaaagagatacaagacctggcagaggaaattcatggaatgatggacaaggcaaaaaacttaaaaagactttgggtagaacgatccaacactccagattcttcttatggttccagtttttttacaatggatctcaataagaccgaggaggtaatattgaaactggaaagcctccatcagcagcctcatatctgggattttctacttttactgccgagactacacacaagccatgatcatgtggaagatggcatggatgttgcagtgaaccttctccagaccattttgaattccttaatatccctagaagatttagattggcttccactcaaccaaactttttcccaggtttctgaacttgtactgaatgtgaccatttcgacactgacatttctgcagcaacatggagtagcagtcaccgagccagtttaccacctgtccatgcagaatatagtgtgggatccacagaaagtccagtatgatctcaaatcccagtttggctttgrtgatcttcacacggaacagatcctgaactcttcagctgaactgaaggagattcccacagacacttccttggagaagatggtgtgttcagtcttgtctagcacatcagaggatgaagctgagaaatggggccacgttggaggctgccaccctaagtggtcagaagccaaaaactatcttgtccatgcagtcagctggctgcgagtctaccaacaggtgtttgttcagtggcaacagggtagcctgcttcagaagacactcacaggcatgggccatagtctggaggctctcaggaatcagtttgaagaagagagcaagccctggaaggtggtggaagctctgcacactgcactgctcctgctgaatgacagcttgtcagcagatggcccaaaagataatcatacatttccaaagatattacagcatctgtggaaattgcaaagcttgctgcaaaacctgccccagtggccggcactgaagagatttcttcagcttgatggagctctcagaaatgcgatagctcagaatttacattttgtccaagaagtcctcatttgcctggagacatcagctaatgattttaaatggtttgaacttaaccaattgaaactggaaaaggatgtgttcttttgggagctgaaacagatgttggcgaagaatgctgtctgcccgaatggtcgtttctctgagaaggaggtctttttgccgcctggaaactccagcatatggggtggtctccagggactgttgtgctattgtaactcctctgagacgagtgttttaaacaagctacttggttcagtagaggatgctgatcgtattttgcaagaggtcattacttggcacaaaaatatgtcagttttaatacctgaagaatatttggactggcaggaacttgagatgcagctgtcagaagcaagcctttcctgtactcggctcttcctgctgctgggagctgatccctctcctgagaatgatgtcttttctagtgactgtaagcaccagcttgtctccacagtgatatttcatacacttgaaaaaacacaatttttcctggaacaagcatattattggaaagccttcaaaaagtttatcaggaagacttgcgaagtggcccaatatgtaaatatgcaagagagtttccagaacagactattggcttttcctgaggaatctccttgttttgaagaaaacatggattggaaaatgatcagtgataattattttcaatttttgaataacttactcaagtctccaacagcttccatatccagggctttaaatttcacaaagcaccttctaatgatggaaaagaagttgcacacccttgaggatgaacaaatgaactttcttttatcatttgtggaattttttgagaaattattgttgcctaatctttttgactcctccattgttcccagtttccacagcctcccatctctcacagaggatattctgaatataagttctctgtggacaaatcatttaaaaagtttaaagagagacccatctgccactgatgctcagaaactcttggaatttggcaacgaagtgatttggaaaatgcagactctcggaagtcactggataaggaaggaaccaaaaaatcttttgagattcatagaattaatactttttgaaattaatcccaaattactagaattatgggcctatggcatttcaaaaggaaaaagagctaaattggaaaacttctttacacttttaaatttttctgttccagaaaatgagattctgagtacaagttttaacttttcccagttgttccattcagattggcctaaatcaccagctatgaacatagattttgtacgtttaagtgaggctataataactagtctccatgaatttggatttttggagcaggaacagatctcagaagctctgaacacagtctacgctatcaggaatgcatctgatcttttctcagccctttctgaaccacaaaaacaagaagttgataaaattttgactcacatacacctaaatgtcttccaggacaaggattcagctttacttctgcaaatttattcttcattttaccgatatatttatgaattattgaatattcagagtagaggctcttcgttgactttccttacacaaatctcaaaacacattttggatatcataaaacaatttaatttccaaaacatcagtaaagcatttgcatttttatttaagacagcagaggttcttgggggaatttctaatgtatcttactgtcagcaattgctttcaatttttaactttttggagcttcaggcccaatccttcatgtctacagagggccaagaactggaagtgatccacactactttgacaggcctcaaacagctgctcataattgatgaagattttcgtatttctttatttcaatatatgagccaattcttcaacagttcagtagaagacctattggataataaatgcttgatttcggacaataaacacatttcttccgtaaattattcaacaagtgaggagtcttcatttgtttttccattggcacaaattttttcaaacctctcagcaaatgtcagtgtgttcaacaagtttatgtccattcactgtaccgtttcatggcttcaaatgtggactgaaatctgggaaaccatatctcaattatttaagtttgacatgaatgttttcacatctcttcatcatggtttcactcagcttttggatgaattggaagatgatgtgaaagtctctaaaagctgccagggtatacttcccacccataatgttgctagactcatattaaatttgtttaaaaatgtaactcaagccaatgacttccataattgggaggacttcctggatctcagggattttttggtagctttaggtaatgcattagtttcagtaaaaaaacttaacttggagcaagtggagaaatcccttttcaccatggaagctgccctgcatcagttgaagacatttccattcaacgaaagtacaagcagagagtttttaaattctctgcttgaagttttcattgagtttagcagtacctcagaatatatagtcagaaatctagattcaataaatgactttctttcaaataatctcacaaattatggagaaaaatttgaaaatatcatcactgagctaagagaagcaatagtatttcttagaaatgtatcacatgatcgagatttgttttcctgtgctgatattttccaaaatgttactgagtgtattttagaagatggctttttatatgtaaatacctcacagaggatgttacgtattctagacacgttaaattccacattttcctctgagaacacaattagcagtctgaaaggatgcattgtatggttagatgtcataaaccatttgtatttgttgtctaactccagtttttcacaaggtcgtcttcaaaatattttggggaatttcagagatatagaaaacaaaatgaactctatattaaaaattgtaacttgggtgttaaatataaaaaaacctctttgttcatcaaatggctcacatataaattgtgtcaatatttacttgaaagatgtaactgactttctaaatattgtacttactacagtctttgaaaaagagaagaaacctaaatttgagattttattagctcttttaaatgattccacaaagcaagtaaggatgagtatcaacaacttaacaacagactttgattttgcatctcagtccaattggagatattttactgaattaattctaagaccaatagaaatgtcagatgaaattcctaatcagtttcaaaatatttggcttcatttaataacactggggaaggaatttcagaagcttgtaaaaggtatttattttaacatcctggaaaataattcctcttctaaaactgaaaacttgttaaacatatttgccaccagtccaaaagaaaaggatgtaaacagtgtaggcaattccatttatcacttagctagttaccttgccttcagcttatctcatgacctccaaaattcaccaaaaataataatttcacctgaaataatgaaagctacaggtcttggtattcaactgataagggatgtgttcaactccttaatgcctgtagttcatcacactagtccacaaaatgcaggttatatgcaagctttgaagaaggtaacttctgtcatgcgtacccttaagaaagcagacatagaccttttagtggatcagcttgaacaagttagtgtaaacctaatggatttctttaagaatatcagtagtgtgggaactggcaatttagtggtcaatttgcttgttggcttgatggaaaaatttgcagacagctcacattcttggaatgttaatcatctgctgcagctctcacgcctgtttcctaaagatgttgtggatgctgtgatagatgtgtactatgtgcttcctcatgctgtaaggctcctgcagggagtacctggtaaaaacatcactgaaggcctcaaggatgtctacagcttcacactccttcatggcataaccatttcaaatatcaccaaggaagacttcgcaattgtgataaaaattcttttggatacaattgaattagtatcagataagccagatattatttcagaggctttagcttgttttcctgtggtttggtgctggaatcacacaaattctggatttcggcagaattcaaagatagacccctgcaatgtccatgggctcatgtcttcttccttttatggcaaagtggccagtatacttgatcatttccacctgtctccccaaggtgaagattcaccatgttcaaatgaaagctcccgaatggaaataactaggaaagtggtctgcataattcatgaattagtggactggaattctattcttctggagctctctgaagtcttccatgttaacatttctcttgtgaaaactgtgcagaaattttggcataagatattaccgtttgtcccaccttcaataaatcaaactagggatagcatctctgaactctgtcctagtggttccataaagcaagttgctttgcaaatcatagaaaaacttaaaaatgtcaactttacaaaagttacatcaggtgaaaatattcttgacaaactaagtagtttaaacaagatccttaacattaatgaagacacagagacatctgttcaaaatattatttcctcaaatttggaaaggacagtacaattgatttctgaagactggagcctagaaaaaagtacgcataatctactctctttattcatgatgctccagaatgcaaatgtcacaggtagcagtttagaagcattatcaagttttattgaaaaaagtgaaacaccttacaactttgaagaactatggcccaagtttcaacaaatcatgaaagacctaacccaagattttagaatcagacacctgctttctgaaatgaacaaaggaatcaaaagtataaattcaatggctcttcaaaagataactttgcagtttgcccatttcctggaaatcctggattcaccgtcattgaagacattagaaattattgaagattttctattggtcacaaaaaactggcttcaggaatatgcaaatgaggattactccagaatgatagaaacattattcattcctgtgaccaatgagagttcaactgaagatatagctttgttagccaaagctattgctactttttggggctctttaaaaaatatatctagagcaggcaattttgatgttgcctttcttacccatctgctaaatcaagaacagctgactaatttctcagttgttcagctgctttttgaaaacatcctaattaatttgatcaataacttagctgggaattctcaggaagcagcttggaacttaaatgatactgaccttcaaataatgaatttcattaaccttatcttgaaccatatgcagtcagaaactagtaggaaaacagttctctctctgagaagcatagtagatttcacagaacagtttttgaaaacattcttctccctttttctaaaggaagattctgagaacaaaatatctcttctgctgaaatatttccacaaagatgttattgcagagatgagttttgtcccaaaagataaaattctagaaattctgaaactggatcaatttcttaccctgatgatacaagacagattgatgaacattttttcaagtttaaaggagactatatatcacctaatgaaaagttcatttatattagacaatggagaattttattttgatactcatcaaggactgaagttcatgcaagatttatttaatgcccttctcagggaaacttcaatgaaaaataagactgaaaataatatagactttttcacagtggtgagtcagttgtttttccatgtgaataagtctgaggacctcttcaaactcaatcaagatcttgggtcagctcttcaccttgtaagagaatgttcaacagagatggcaagacttctggatacaattttacactctcctaataaggacttctatgctttgtatcctaccctccaagaagttatacttgctaatctaacggatttgcttttctttataaataattcattccctctaagaaacagagcaacattagaaattactaagagattagttggtgctatttcaagagcaagtgaagaaagtcacgtcctgaaacccctcttagaaatgtctgggactctggtcatgctgttgaatgacagtgctgacctgagagatcttgccacatcaatggactccattgtgaaacttcttaagctggtcaagaaagtttcggggaagatgtccacagtttttaaaactcattttatctccaataccaaggacagtgtgaaattctttgacactctgtattccatcatgcaacaaagtgttcaaaatcttgtgaaagaaatagctactttaaaaaaaatagatcatttcacatttgaaaagataaatgatttgttggtgccatttcttgacttggcctttgaaatgattggggtagaaccttatatatcatcaaactctgatattttcagtatgtcacctagcatactctcatatatgaaccaatctaaggacttttctgatattttggaagaaattgctgaatttttaacatctgtgaaaatgaacttggaagatatgaggagtcttgcggtagcatttaacaatgagactcaaacattttctatggattctgtcaacttaygggaagaaattctgggttgcttagttcctataaataacatcaccaaccaaatggacttcttataccctaatccaatttccactcatagtggccctcaagatataaaatgggaaataattcatgaagtgatcctttttttggataaaatattatcacaaaacagcacagaaataggatctttcttgaaaatggtgatctgtctcaccttagaagctctttggaaaaacttaaagaaagataattggaatgtttctaatgtgttgatgacgtttactcagcatccaaataaccttttgaaaaccatagaaacagttttagaggcctccagtggaattaaaagtgactatgaaggtgatttgaataaaagtttatattttgacacacctttgagtcagaatataactcatcatcaacttgaaaaagcaatccataatgttttaagtagaatagctctctggaggaaaggacttcgttttaacaactctgaatggataacttccacaagaactttgtttcagccactttttgagattttcattaaagcaaccaccggaaagaatgtcacatcagaaaaagaagagagaaccgagaaagagatgattgactttccttatagtttcaaaccatttttctgtttggagaaatacctgggaggattatttgtattgactaaatactggcaacaaatcccactaacagatcaaagtgttgttgagatttgtgaagttttccagcagactgtgaagccctcagaagccatggagatgctgcagaaagtgaagatgatggtcgtacgtgtgctcaccatcgttgcagaaaacccttcctggaccaaggacattttgtgtgctactctgagttgcaagcaaaatgggataaggcatctcattttatctgctatacaaggggtcactttggcgcaggaccacttccaggaaattgaaaagatatggtcctcgccgaatcagctaaattgtgaaagtcttagcaagaatctttctagcaccttggagagcttcaagagcagcttggaaaatgccactggccaggactgcacaagccagccgaggctggagacggtgcagcagcacttgtacatgttggccaaaagcctcgaggaaacttggtcatcagggaatcccatcatgacttttctcagcaatttcacagtaactgaggatgtaaaaataaaagatttgatgaagaatatcaccaagttgactgaggagcttcgctcttccatccaaatctcgaatgagactatccatagcattctagaagcaaatatttcccactccaaggttctcttcagtgccctcaccgtagctctgtctggaaagtgtgatcaggaaatccttcatctcctgctgacatttcccaaaggggaaaaatcttggatcgcagcggaggaactctgtagcctgccagggtcaaaagtgtattctctgattgtgttgctgagtcgaaacttggatgtgcgagctttcatttacaagactctgatgccttctgaagcaaatggcttgctcaactccttgctggatatagtttccagcctcagcgccttgcttgccaaagcccagcacgtctttgagtatcttcctgagtttcttcacacatttaaaatcactgccttgctagaaaccctggactttcaacaggtttcacaaaatgtccaggccagaagttcagcttttggttctttccagtttgtgatgaagatggtttgcaaggaccaagcatcattccttagcgattctaatatgtttattaatttgcccagagttaaggaactcttggaagatgacaaagaaaaattcaacattcctgaagattcaacaccgttttgcttgaagctttatcaggaaattctacaattgccaaatggtgctttggtgtggaccttcctaaaacccatattgcatggaaaaatactatacacaccaaacactccagaaattaacaaggtcattcaaaaggctaattacaccttttatattgtggacaaactaaaaactttatcagaaacactgctggaaatgtccagccttttccagagaagtggaagtggccagatgttcaaccagctgcaggaggccctgagaaacaaatttgtaagaaactttgtagaaaaccagttgcacattgatgtagacaaacttactgaaaaactccagacatacggagggctgctggatgagatgtttaaccatgcaggcgctggacgcttccgtttcttgggcagcatcttggtcaatctctcttcctgcgtggcactgaaccgtttccaggctctgcagtctgtcgacatcctggagactaaagcacatgaactcttgcagcagaacagcttcttggccagtatcattttcagcaattccttattcgacaagaacttcagatcagagtctgtcaaactgccaccccatgtctcatacacaatccggaccaatgtgttatacagcgtgcgaacagatgtggtaaaaaacccttcttggaagttccaccctcagaatctaccagctgatgggttcaaatataactacgtctttgccccactgcaagacatgatcgaaagagccatcattttggtgcagactgggcaggaagccctggaaccagcagcacagactcaggcggccccttacccctgccataccagcgacctattcctgaacaacgttggtttcttttttccactgataatgatgctgacgtggatggtgtctgtggccagcatggtcagaaagttggtgtatgagcaggagatacagatagaagagtatatgcggatgatgggagtgcatccagtgatccatttcctggcctggttcctggagaacatggctgtgttgaccataagcagtgctactctggccatcgttctgaaaacaagtggcatctttgcacacagcaatacctttattgttttcctctttctcttggattttgggatgtcagtcgtcatgctgagctacctcttgagtgcatttttcagccaagctaatacagcggccctttgtaccagcctggtgtacatgatcagctttctgccctacatagttctattggttctacataaccaattaagttttgttaatcagacatttctgtgccttctttcgacaaccgcctttggacaaggggtattttttattacattcctggaaggacaagagacagggattcaatggaataatatgtaccaggctctggaacaagggggcatgacatttggctgggtttgctggatgattctttttgattcaagcctttattttttgtgtggatggtacttgagcaacttgattcctggaacatttggtttacggaaaccatggtatttcccctttactgcctcatattggaagagtgtgggtttcttggtggagaaaaggcaatactttctaagttctagtctgttcttcttcaatgagaactttgacaataaagggtcatcactgcaaaacagggaaggagagcttgaaggaagtgccccgggagtcaccctggtgtctgtgaccaaggaatatgagggccacaaggctgtggtccaagacctcagcctgaccttctacagagaccaaatcaccgccctgctggggacaaacggtgccgggaaaaccactatcatatccatgttgacggggctccaccctcccacttctggaaccatcatcatcaatggcaagaacctacagacagacctgtcgagggtcagaatggagcttggtgtgtgtccgcagcaggacatcctgttggacaacctcaccgtccgggaacatttgctgctctttgcttccataaaggcgcctcagtggaccaagaaggagctgcatcagcaagtcaatcaaactcttcaggatgtggacttaactcagcatcagcacaaacagacccgagctctgtctggaggcctgaagaggaagctctcccttggcattgctttcatgggcatgtcgaggaccgtggttctggatgagcccaccagtggggtggacccttgctcccggcatagcctgtgggacattctgctcaagtaccgagaaggtcgtacgatcatcttcacaacccaccacctggatgaagccgaagcgctgagtgaccgcgtggccgtcctccagcatgggaggctcaggtgctgcggtcctcccttctgcctgaaggaggcatatggccaggggctccgcctgacactcacgaggcagccttctgttctggaggcccatgatctgaaagacatggcttgtgttacatccctgataaagatctatattccacaagcatttctcaaagacagcagtggaagtgagctgacctacaccattccaaaggacacagacaaggcctgcttgaaagggctcttccaggccctggatgagaacctgcatcagctgcacctgacgggctatgggatctcagacaccaccttagaagaggtgtttttgatgcttttgcaagattccaacaagaaatctcacattgccctggggactgagtcagagctgcagaaccacaggcctacaggacatctgtctggctactgtggctccctagcacggcccgcaactgtgcagggcgtccagctgctccgcgcacaagtggccgcgatcctggcccggaggctccgccgcacgctgcgcgccgggaagagcaccctcgccgacctgctgctgccagtcctcttcgtggccttggccatgggcttgttcatggtgagacccctggccaccgagtaccctcccctcagactcacacctggacattaccagcgggccgagacctactttttcagcagtgggggcgacaacttggacctcacccgtgtgcttctgcggaagtttagagatcaagatttgccctgtgcagatttaaacccacgccagaagaattcttcatgctggcgcacagatcccttttctcacccagaattccaggattcatgtggctgcctgaagtgtccaaatagaagtgctagtgctccctacctgaccaaccacctgggccacacactgttgaatctctcaggcttcaatatggaggagtacttgctggcaccatctgaaaaaccaaggcttggaggttggtcttttggattaaaaatccccagtgaagctggaggtgcaaatggaaacatatcaaaacccccaactctggcaaaggtgtggtataatcagaagggttttcattccctaccttcctacttaaatcatctaaacaaccttattttgtggcagcacctaccccctactgtggactggagacaatacggaataacactctacagccacccatatggaggggccttgctgaacgaggacaagatcctggagagcatccgtcagtgtggagtggccctctgcatcgtgctgggattctccatcctgtctgcatccatcggcagctctgtggtgagggacagggtgattggagccaaaaggttgcagcacataagtggccttggctacaggatgtactggttcacaaacttcctatatgacatgctcttttacttggtttccgtctgcctgtgtgttgccgttattgtcgccttccagttaacagcttttactttccgcaagaacttggcagccacggccctcctgctgtcacttttcggatatgcaactcttccatggatgtacctgatgtccagaatcttttccagttcggacgtggctttcatttcctatgtctcactaaacttcatctttggcctttgtaccatgcccataaccattatgccccggttgctagccatcatctccaaagctaagaatttacagaatatctatgatgtcctcaagtgggtctttactatttttcctcaattctgtcttggtcaaggactggtagaactctgctataatcagatcaaatatgacctgacccacaacttcggcattgattcctatgtgagtccctttgagatgaactttctgggctggatcttcgtgcaactggcctcgcagggcacagtacttctcctcttgagggttctgctacactgggaccttctgcgatggccaaggggtcattctactctccaaggcacagtcaaatcttctaaggatacagatgttgaaaaagaggaaaagagagtgtttgaaggaaggaccaatggagacattcttgtgttatacaaccttagtaaacattatcgacgctttttccagaatattattgctgtgcaagatattagtttgggcataccaaaaggagagtgctttggacttctaggggtgaatggagctgggaagagcacgactttcaaaatgctgaatggtgaagtttctctaacttcaggacatgctatcatcaggactcccatgggagacgccgtggacctgtcttctgctggcacggcaggcgtgctcattggctactgtccccagcaggatgccctggacgagcttctgactggttgggaacatctctattattactgtagcttacgcgggattccaaggcagtgcatccctgaggttgctggagacctcatcaggcgcttacacctcgaagcccacgcggacaaacctgtggccacctacagtgggggaaccaagcggaaactctctacagccctggccctggtggggaaacctgacattcttttattggatgagcccagctctgggatggatccctgctctaagcggtacctgtggcaaacaataatgaaggaggttcgggaaggctgtgctgcggtgctgacctcccacagcatggaggagtgtgaggctctttgcacaagactggccataatggttaacggcagcttcaaatgtcttggttctcctcagcacatcaaaaataggtttggtgatggttatacagtcaaagtttggctctgtaaggaagcaaatcaacattgcactgtttctgaccacttgaagctttattttccaggaattcagttcaagggacagcacctgaatttattagaatatcatgtgccaaaaagatggggatgcctagctgacttgttcaaagttatagagaacaataaaaccttcttgaatattaagcattattccattaaccaaaccactttggagcaggtatttattaattttgcttctgagcagcagcaaactctacaatctactcttgatccatccactgacagtcaccacacacatcacttgcccatctgagcactaaagaagtttccataaggaataaaaccttgtcttccattacaattaacagtcaaggataaaacaagcacgcgcacaatcaaggagctggaacacactctccaggccgtcaaattattctcttgttcattttctattttgaatctccttgttagttaataaccaccaaatggaaaggtcattctttctgcagacttttggggagctcctccaaaacatttgttctctttaccatgccagatggacaccagcttctttgtgacaaaggcatgaatgatttgacagtgtccaaactgagacattctggagctggaaagcctgtcacactagagtgtgtgtgacatgtccactctaaacatgtcacttttctgttaagaaaactgagccccctccccacaggttaaaaaactttagtaacttgtttgtatagaaaatagtaacaaggactattttctattgttgtcatctatttactagatacatgtttttaatgattttaatgtaagcttttattaatactgatgacattatatggtatgatatgaaaaaatcaccaattttttacatataaaagatacctttttaaaaaaataggttttaagagctcttttagtatacactttagcaaaattaattaaattgaactagttactctgtatcaattacagtagttctaccagaatctcccaggttataatttatgagggtagagaaataaaatgtagatgcattttctttttcttcatttggatgaataattactgttttttgttattctaagtcagtgtttttcaaagcgtagtggtccccatattagctgcattgccatcttctgggagcttgcaagaaatgtacattctcaggatccactccagacctattgaatctcaaattctggggcttaaacaagcacattccaagttaagaaccaatgacctaagggaatgtctggttacctcctagttatacaagcaaaatctgcatagtatgtagtcttttttatttatttattttttttttttgaggcggagtctcgctctgtcacccaggctggagtgcagtggcgcgatgtcggctcactgcaagctccgcctcctgggttcacgccattctcctgcctcagcctccccagcagctgggactacaggcacacatcgccacacccggctaatttttagtatttttagtagagacggggtttcaccgtgttagccaggatggtctctatctcctgaccttgtgatccgcccccctccacctcccaaagtgctgggattacaggcgtgagccaccgtgtccggccgtagtttattttaaaatatatttttaaaagctttgtaaaaattatgtcattctcagaattgttgtcttcaaagcattgtcagatgtagagtgctcagatgtggctcttaaagactatatacatctgaatttttcatcctatagttagtaagatgcataaaatcaatccactactgaaatagtttccagtcagacatttctgagttcagacatttctcaacattcttttaacaacatttttctgaatcctcaatagaaaatcacattaatcttattttaaaatttggcctttttcaacactaacgttgagtaccggtagctttgtgatcaaaggcatatacttccttatgagatttctttactaaagcaagatttcattaaatctctatttcctaaatatcattctatacaaaagatattttttaaacggtaaggattaagacaatcactgatagctttgttgtgagcaattttgattcccatgtatcacatgaattacacttccttaaataaattacagtttatggctgtatgatttattctctaattctaacatagtctagttgtcaaaaggaaatatgtaatctttttatgattgttgaatcaataaataccaatttgtgaaacatgaatgtgtttaaactgcagtgaataaatgagatgtgctttaatttaacccaaaaaaaaaaaaaaaaaaaaaaa

SEQ ID NO: 24937 - DNA, 86215 bp, Homo Sapiens
gacacacaccgaggactcttgcgagggatctcggggcccagctcggcctccctcctagcgctgggggcctgcccggaacccgagtccgcggctgtccctggggtttggcgctgcgcggaggtcgggtctggggaccgcagcgactctgggtcttcgggttgtcccctcggagggagggcccacgggcggggacatcgggacttgccctttcctcggcgcagcggagctggggcgtcgccgactcagaaggtgctttccgagacctccagggatctccgaggcgaggaaacccgggccccggacagaccgaccctgggtgggtgcgcccggcttctgccgtcggacggagacgcgcgtgtttgttcctccagctgcgaccacctttgaggaacggttcccactttgtgccccaacgcggcggggcgaccccggacaggctgcgctgggccgggtggcttctctgcggaagccgcgccacgtcgctcccggtcggggccgctgagggtcgggcgcccaggtctttccggagtcccgggctgcgcggcccgcgtggtgcgggtgaagctggaggggcgcggggtggtgccagtggaagtcaggagggtcggccctgccccctcacgcaccccaaccgggcacaactgcacgcctgtgcttttctgaagtcttttttaaaagttaaaagagaggaagtgtgctccaagtgtcaggattctttccaagaaaaacccacagttgtccaatggcctgggcttcgtgggacctccggggctgcacgcccacgtcagcctcagccgacccctgccaggaaaccagggaggcccctcctctcccagcctccttgggataagggtgccttggggaactgggtcagggcaaggacacgggattttcctgggaaggaccctgcgacacccgtgtcgttgcggggcagggtcagcatgactttcctcttccaaggtgaagagttggggggcatccagagaacaaccgtaatcacttcctccttcaccttcttactgccaggctgaagctcagggccctgtctgctctgtggactcaacagtttgtggcaagacaagctcagaactgagaagctgtcaccacaggtaaatagaaggtttaatttactgtttccagatggaaatatttaagtgttttcagtgtttacttctgttgcactacagaccagcaatctgggggttattactttgtgatgcaaggttagatacgttttcagactgaaagtaaaatacatgtgcatggattcatttttttttttttttttttttttttgagacggagtctcgctctgccgcccaggctggagtgcagtggcctaatctcagatcacagcaacctctgccactggggttcaagcgattctcttgcctcagcctcccgagtagctgggattacaggcgcctgccaccatgcccagctaatttttgtagttttagtagaggcggggtttcaccatcttggccaggctgatcttgaactcctgacctcatgatccacctgttcctcccaaagtgctgggattacagacgtgagccaccgtgcctggcctaggattcactttgaagttctgagttattgtgtgacttttgctaggaacttcattgcttcgtggcaggcatgttttgtataatttaaaacttgatgacattaactttgagaaacgtgagtgcttactagacccttgggatgtccacactgactggtaccgagtagtgtactgtctctgagctgttttcattttgatttgaatattaagcagatggcttcttgagatagacccgtgccagaacatgccagggataggctgaagaaacgggccagatgatacaaatttgtgtggtcaccatccatgagagaccagggacactggggctgatgatgacctctgcaactctgaagcaaaagtaaactaattggcaagttgggtgcggtggctcactcctgtaatcccagcactttggaagctggggtgggcagatcgcttgaggccaggagttcgagaccagcctggccaacatggtgaaaccttgtctctacaaaaaaatagaaatattgcctgggcatggtggcggacatctgtaatcccagctactcaagaaactgaggcaggagaatcgcttgagcctgggaggtgaaggttttagtgaactgagattgtgccactgcactgcagcctgggcgccagggcgagactccgtctcaaaaataaataaataaaataaaattaattaactaattgacattagaaaaaaatgttttttctttcttttcccacatcctttttttttttttttttttttttgtgacagagttttgctcttgtcacccaggctggagtgcagtggcatgatcttggctcaccgcaacgtccacctcacggattcgaacaatactcctgcctcagcctcccgagtagctgggattacaggcactcaccaccacacccggctaatttttgtatttttagtagaggtgggtttcaccatgttggctgggctggtctcaaactcctgacctcaggtgaaccgcctgccttggcctcccaaagggctgaggttacaggtgcgagccaccgcgccgggcccttttccgacatcttaaacgtaaagtaggagacgtgtcataatcatcgaatactgcagtggttttcattagctcctgtttgtcaaacttatgaacagagttttaaaaattgtgtatcagccgggtgcggtggctcacacctgtaatctttgggaggctgaggtgggcagatgacaagatcaggagtttgagaccagcctggccaatatggtgaaaccctgtctctactaaaaatacaaaaattagctgggcatggtggcgggtgcctatggtcccagctactcaggaggctgaagcaggagaatctcttgaacccgggaggtggaggttgcagtgagctgagatggcaccacagcaccccagcctgggtgacagagcaagactccgtttccaaaaaaaaaaaattgtatatgagagagacagaactagacagagaagaaggagaaaatgtgtcttctttatacactattttgtaacttgctttatcgagtaggttatgaaaaatcttcctatgtgaaaaacatttctgcatcatttgaaatgtctatataatatcccattgtgtttagatacaataatatttagccaatctctttatgtgtatatatttaatacagtcattctataaatattgactgagtagctgctgtgggctactgtccgcagtgctgaacaagacaagcatgaatccatgaaactgattttcataccagaatataaaaaagaaacttaaagataatcctcatcatggtaaaagatgaagaacctatttttgccgggacatcttactctttagtaattggtggccagtgttctttttcttgcatgctgttttggagagtctgttttttaaataaatatttaagtagcctgggcgcagtggctcacgcctatggtttcagcactttgtgaggccgaaggggatggattgcttgagcccaggggttcaagaccagcctgggcaacctggcgaaaccctgcatctactaaaaatacaaaaattagccaggtatagtggcgtgtgcctgtggccccatctacttgggaggctgaggtgggaggatcccttgagcctgagaagtggaggttgcagtgactgagatggcaccactacactccagcctgggtgacagagtgagacctggtctcaaaaaataaataaatatttatgtaatcatctttaagcagtgtttttaattttatttatttatttatttatttttgagacagggtctcactgtgtcacctaggctagagcacagctgcatgatcacggcctattgcagcctcgacctccctgggctcaggtgatcctcccacctcagcctcccaagcagctaggaccacaggcacacgccaccaggcctgactcatttttgtattttttgcagagacggggtcttgctatgttgttcagacctgtctcaaactcctgggctcaagccatcctcctgcctcggcctcccatagtgctgggactaagccatgaaccactgcacccggcataagtggtctttctttaaaaaaaaaaaaaaaaaaaaaaaaaaaaaaaccacattaattaaaatatgtatttgcttattataaatatatttgaaacatgccaatttttcttctctttttttgctctattggtttctgtgtgtggatggatatatttttaatggcaaataggatgagtgtctttacttccaagtagtcagtgtttttctttaatgtttgtactaattttgtcacattgcagttagaggttgtggcctgtctaatttctgcttttttggaacttgagagtctctgtttttatttgtttttggtagcctggcatagagtccatttttcttttcttttctttttttgagacggagtttagctcttgttgcccagactggcgtgcagtggcgcaatctcagctcactgcaacctccgcctcctgggttcaagcgattctcctgcctcagtctccccagtagctgggattacaggtgcccaccaccacacctggctattttttgtatttttagtagagacggggttttgccatgttggccaggctggtctcgaactcctgatctcaggtgatccacccgcctcggcctcccaaagtgctgggattacaggtgtgagccactgcgcccagctgtagatactttttaaaaaggtatagtttctgattatggggtagaaatgtgctatgtctgtcatttcagccttatgaattgcccagaataagctagatcacctttaaggccatgtggttagggaaacttgggcacagaatttacattttcaacttggtgataagatgggtttaaggtaagaatcaaataggagaaagccttagctgttccagcggcccatgtttaaaagaatgtgcttctttttccaagtatttctgccgcttgcatgcactgagcttctttggaaaggagcaccatgcaggcatattttccagacaggaccggatttgctcgttactcagaggtgtgtgcattctttgcttttaggatatttaattagcatcttttaatagtgatattacggtgtcttaaaagtttatgcatttgaaaagaaaagaacttactccttgccaggtctcaacctatcatggttatctttgcagctgagctgcgttggttttgaggctcacatatggtaaaagtggttggaaatctggaaatattgctgtgtatctgcaaagcagcttgatatagtggaaaaggtattaggtcattaatcatgagatttggattctagccccttagctgctgcctgccaggcctggagacctttgttctcttctttaaactgctgctttctcatcagaaaatgaagttcctctccataccacctctctgaagggctgtgaagctcgaagtggcagcttaaaaaactgcccatctcaggaggtgtcttaagaaggaggacataccgctggctcctgcctttctcacttagccaggtctgatacctgtgttgttttcactgtggccattttaggatttttcaaaggctttcagaaagcaacatgctaccgtaccccttatacaccaaaactggttttcattttggaatataaaagtgagatttctccaccagtacaataaagttgttacaagtggttcctatgtgtttgtttttgtttttgagacagagtctcactctgtcacccaggctgcagtgcagtggcacaatcttggctcactgcaacctccgcctcccgggttcaagcaattctcccacctcagcctcctaagtagctgggactacaggcacccgccaccacgcccagctaatttttgtatttttagtagagatggagtttcaccatgttggccaggctggttttgaacttctgacctcaggtgatccacctgcttcagcctcccaaagtcttaggattacaggcgtgagccaccacacccggcctcctgtgtgttttgaaggtgattgtgacctcaggttttggcagggctataccttgtgtttgctcttactccaactccatggcatacctggaccaggcctcttcatcttgaagagggatctgctgaaatgcaggcccagtgaatctccccatgcctggacacagttccgtcaagccaggacccggtgctgcctgcacccctgtttctgttagtctgactgtcctcgctgagtctaactccttgagggcagagaggatgtcttatttatttctgccccgctagccgtgtaaactgagtaggtacttgtaaatgttcattgaataagtacctgattaatagaatttaattcaagaagaatgtattgatgggcctgtgtggtcaccacagtactgagatgtaggtgggagctggctgaagggggaggcacctaaacaggagtgcagacagcggcacctacggatgatggcccgctccatcccaccgcagcgaaattgtcccagacctctgcagcttcccccacacctagactgagagagagctcttcttccttctgtagggagcaggtgtttcctccagatgtccaatatgtacctcccattacagcggtgttaggaaggtgagggctgccgctgaaagggtccccttcataatcatcactagatttggggtatattatggattaaatagaatttttataagatgacctgaggatctatttaaataaaatcctctttctttctgcaagatcatggatttaaattcaacacaactgacttcatagggaaggggtatggtgaaagggaagtgaggtgggcagcactgatatttaacaaggtgagggtccttctcctgctctgactgtcacattaaaatattcccaggagaaattggagaaaactcagatgaaatatcgtctgtgttccaggaggcaggactcatcggaatgcttttattttgctccattttaagagatttgcagataaagaggagtgaagatttctattcagatttacttgctttatattttaacttatagaccacaagccaactttcgaaagagcatcattttgaatagtaagagttaggaaggcaaatacagaaggactaatggcttccaagattatgagcttcataggaatggtttgagatgaggctatagtaaagcagaatattgaagttcccccaccccctttcatttttcatttttcatttttaagagtgagcgaggccaggcgtggaggctcacacctgtaatcccagcactttgggaggccgaggtgggcagatcacaaggtcaggagtttgagaccagcctggccatcatggtgaaaccctgtctctactaaatgtacaaaaattagccaggcttggtatcaggtgcctgtaatcccagctactcaggaggctgaggcaggaaaattgcttgaacccaggagtcggaggttgcagtgagctgagatcgcaccactgcacatctcagaaaaaaaaagagtgaggccccaagtttttttgcatttgtttgtaactgaatacgtctgaagttatgtgataaccacgccaaggtgacaaattgccaagtttcagtaaaagagacccagttatttagaggttgacacgtggatatgtccctttctaagaagttcgtggtcagctttacatgagtatttaaatgcgtgtttataattcagcaatatggcttgtaaaatacagattgccaatcaagtgacatgcaaatcttgatgatctgaaacaagttttcttctgttatctatggaagaaatggtaatagggatatttaagtgggatgaattttttgaagcattttcaggcagttttccacatggaacaaaataacattgagtgggctgctaacatgaggaacatattgccctctgcctaggattatgagtaaatttgataaattctagactgcagtctcattttagctcattttatgaggcagcttgacaactgggatagtgtctcttttttttgtcgggggtgttgaggctggagtctcgctctgctgcccaggctggagtgcactggcgtgatctcggctcactgcaacctctgcctccggggttccagtggttctcctacctcagcctcctgagaagctgggattgtaggcatgtgccaccacgcccggctaatttttgtattttttagtggagacgggctttcaccatgttggccaggctgggtctcaaactcctgacctgaagtgatctgcccgcctcagccaccctaagtactgggattacaggcatgagccaccacacctggcttctgtttttctatctgtgcattggggatgaaattaacacaaatgatgtttaaagaaaaaaatgctcagagaagttagaaatgtgctttaaattggaatcatctcttagtatgtaaaagttttttgtaatagaaacaagcagggcagtatttgacctgttgacagtgtccttggactttacaatttgtgaagcagcgtattttgcttgagttgtacgattgtcgtttttttccccccactttgacaactgttacagaacctgtcaccagatacaggcaagggaggttgggcttcccatctctgcacggcttccctgtgattcacaagcaagcaatcagaagtgcacaaaagtttagaacgcgattttcattctcttctttccttagaaaaactcgctttgttagccttttccagaaaggaaggcactcaattgttgtaatactcaaatcataaaaagaagcctagtctagtctattcagcaaggtgttctgaaagagggaattttttaagttcaattatgcgaagatcttgaaggtgggactcaaaggagagggctatcctgggaagaaggctttggaaaatgagaggcatgaaggggagagggtatttaaatgtgtttgaagccaaggatccttgagagaaaaagctggcactaacagcgttcaaagaacttgcgtgacaagtgatgactaatgacactgagggtgggttgtgggtgcctagtgaattcctccgaagccaagagagaggtttccagacccagggaagaaggtgtgtacacccagaagtagtgtagggacagagattccgatcacaagctgtgactggaagacgccgaccaccactgcagcagcctgaaaaccacagtcttgaaccgccagcgaagggctgggaagtgcggatccagggctggtgcactgaacccagaggagcaggctcccattcccagctaagggtggcagctggcggggatctttccagcagaaagctgtaagtggaagctttcaattcagagcagtagcaatgccttcaaagtcccaggcttcacgtgggaacagagaatgtgaagagtatttagcaggatgccaatataagaaatctatattggtgttcgtttgtttgtttttgagatggagtctcgctctgtcacccaggccggagtgcagtggtgcgatctcagctcactgcaatctctgcctcctgggttcaagcgattctcctgcctcagcctcctacatagctggtactacaggcacgcgccaccatgcctggctaaattgttgtatttttagtagagatggggtttcaccacgttggccaggctggtctcaaactcccggcctcatgatccgccctctgcagcctcccaaagtgctgggattacaggcgtgagccaccgcacctggcccaatattgtttgtttatttatttcttgacaggatctcactctgtcaccaggctggagtgcagtggtgtgatctcagctcactgcaacctccacctctctggctcaagcaatcctccctcctcagcctcctgagcagctgggactacaggtgcacaccaccacacccaactagattttgtgttttttgtagagatggggtttagccatgttcagctagtctcaaactcctgggctcaagtgatctgtccgccttggcctcccaaagtgttgggattacaggtgtgattcatgatgtccagcccagtatttttctttcactctggaaaccaaaaattattggctttttttcctgttgcattccctttacttagatgaatctagcaaggttggctgttagtgtctaggtcagaagtctaagtgaaagtgaatatttaaccacactcaagcacagctgatgatctttaatactaatagaggtataagacttaaaagaaacaagaacccagagggaaaatatggccatggactcagagaaaaccacggcagcttccatggactcataaaaagagctcaaaacctaggaagtggatggagactctttttggaatgaatgaattcaaatgtgggctttcttagtagattaaatcattttctagaaggaatttcagaaggatgtgtgcccaattatggtatcaggtctgttgtagactcttcaaggaggaagcctctgaaagacaagaaggaacaattaaaaattagaattcaggtgagtggatcacgaggtcaagagatcgagaccagcctggccaacatggtgaaaccccgtctctactaaaaatacaaaatttagctgggcatggtatggctgtagtcccagctactcgggaggctgaggcaggagaatcacttgaacccgggaggcggaggctgcagtgaaccaagattgtgccactgcactccagcctggcaacagcgagactccatctcaaaaataataagtaaataaataaataaataaaaattagaactcagaaaaggaattaatttcttctgagagagaaaaagatgagattctagcctaaggtgtaacacatccatccaccaggtatcatttttatacacgtgaagttaaatcaccaaaggaccaggtgagcagatgtggactttccgactgtgtgtgtgcgacttcctcagagccctcagtggcgttcccttttccgcgctagcgtttggtccctgcgcttttctggatgcccccaccccctctggctccacgaggccccctgtacgtcaccatcacctttgtgagcttgaaacctgtcacccacccgccttccagatgtcacctgggccctcccggaggccctcgccctcagtgtgtctgattctgagctgtcctgcgttttcccctcccctcaccctggcgacccttttcggtctcagttgccagcctcctgctagggctgggtgggggacatcaaaggcaggacaaggtgtagggtcctcacccaccacttagcagctctcagatgcagacagatttttcagctggcctgtggctcagtttccctcagctacaagaggggtgcatgctagggtttctctggattgctgcacctggcaggtagtgtgagcttggtaggtgcttccttgcttatcattgcctctcccatcttaatgttgtcccatccatccaatgtttatgggatgagaggttgataggagggcatggccctgacattccagggactgaccgacacgctgtctacacaaaccccttctggttcttctcgtgcactgggcgtgccggagacacactcccttaccctcataccccgccgcacccctgtgacctctacctttgagacctcagcttaaactcactcttagggaaggctccctgaaccacctgctggggttgtatgctgatgcaggtacttgtaacacctggtgcttttcctttcgtgcactcaggcagtgtttattcaagtgatggcttggtgacagtggctctccctgagaccccgtgaggccagagtccttggctcatcactcatggttgaacccggagcctcttgctggtaggtgcttcaggactggctctgggagcctgtggctcctgccgggtacccaccggttgagatacctcaagttttaaatgccacctccttcctgaagccttccttgctgctcccccaaactagaggcaggagttttgtccttcagataacctatggcatttgagtcactctgatttgatgaattctgccttcacttgagcagctattaggggcatatgtcagtcattcattcctcagttcatgtatttattcagcaaatatttactgagcacgtactgcgtgccaggcactgtcctgctgtggaaaacagcaggcatgattccctgccactaccaaccactgcatcgcataactggcagactcccagcttcaaggagaggcacggagggaaactgagagcagcctgcagaggggaaagagcggggacagagggtcacggaggtcgcaggggcgtgtgtgcagcacctgccagtgaacggaatgtgcggctccagatgtcgttgtctttaaacttcggaatttcctttcactaaagaaccaagtccagggggaggaaagagtgaatacaaattatccaagaaactcaagagctcattttagttctcctgattatgatcttaaaggcattaagcgctcaagttaaactccttgtgacccacataggttagcagaatttaaatcctaggtgattattaactctaatcatacatctaatgacctatattgaagatacactgcctgcttagttgtggcttcagcctttgctccgtcactgatagttctagcctgaaaagcaaatgagccctcatgctcacgatttcaccacagtcacataagcgggaagagcaggctcctggctgtggcgagcttgactccatttggtttgatagaaatgagaggtagatgattccctagacaaatgcaggcctttctcgaagcccctttcccaggacgacgtgacatgagtggtctgtgccttccagggcagccacgtcatgctttgcccagccagggcggtggggagggagacagccacatcctgcccggggctcctgggccccgctgcatcaagtgaaagcagggctggctccctgatgtccttggagaagtcgcccacactgctttcccccatgggagtgacaaggatgtgtcccgccagccttccacgacggaccccccactctctattaattcccaagaaaccaggccatggaggtgggtttgagggtttgtattggtgttttttaaagtcaggttgaccgagtgcggtggctcacgcttgtaatcccagcactttgggaggctgaggcgggcggatcacatgaggtcaggagttcaagaccagcctggccaacatggtgaaaccttgtctctactaaaactacaaaaaaaattacctgggcgtggtggtgggcgcctgtaatcccagctactcaggaggctgaggcaggagaaacccttgaactagggaggctgcagtgagccgagatcgcgccactccagcctgggtgacaagagtgagattctgcctcaaaataaataaagtcgggtttattaagatataatttacatacagtaattttttttttttttgagacagagtttcactcttgttgcccaggctggagtgcaatggcacgatctcagctcactgcaacctccgcttccagggttcaagccattctactgcctcagcctcctgagtagctgagattacaggtgtccaccaccatgccttgctaatttttgtatttttagtagagacaggttttcgctatgttggccaagctggtcttgaactcctgacctcaggtgatccgccagcctcggcctcccaaagtgctgggattacaggcatgagccactgcacccggccagtacatgctttcttgatttgtctgtttcccacctgtctcccctccctagaatggcagctccatgacgacagaggtgtttctctgttttctccatggctgcaccctcagctgctagaaggtggcccagcataggaggtatttaatgaagccttcctctccacttaaatctacacccttgtgcttattaaaaggtgacagttttctgtttgaaaattttattagtgttttaatgagaaagttattatttgggtaatgcctgaatatgaggaaaacattaagggtagaaatgtaattgttttcctatttcattcagtctatggattttattgaagattacagaattacttctttgtagctatggaagtaaaaaaataataagacgagtagctatttcaaaacgtagggctgataaatttgggatggtttgagaacgttaagttggggaactccatttctttttttacatttttatttattttcatttgtttatttatttatttgagacagagtttcgctctgttgcccaggctagagtgcaatgccatgatctcggctcactgcaacctctgcctccggggtataagtgattctcccatatcagcctcccgaggagctgggactacaggcgcctgccaccacacctggctaatttttgtatttttagtagagatgggatttggccatgtcagccaggctggcctcaaactcctgaccgcaggtgatccgcctgcccttggcctcccaaagtgctgggattacaggtgtgagccaccgcgcccagccagggaactgcatttctgacagtggctcagtagtttggaagttaactggcaaaggtggacagaatctttaaacatatgtggaggaattggagagtttacaagatagtgaagaactgccaggccatggtctggagaagatggaaacttgatgtttggggccattgtgtccctggggtgttggccaatttatgaaagaagcagttaagagcctgagtggcacttttgaggggctagaagggaagaccctggtaaacatcccaaactttggattgggacccaaaaaagctccatcccaggagtacaggtgacctggaaacggatcagcgtaatcgaggactgaagtccagttctagctacgcccagtccttgagactggattaaggtgatctcagattgcaaggacctcaaatgcctggcagaagcaagtgaatatccttctggaggaacagagcctcatcctaggcctctaattatttttaaggacaatttttcaaatgcaggctttcctccctttgcacagttcccttatgcataaatttcagtcagtggccagctgcagtggctcatgcatgtaatcccagcgctttgggaggccaaggcgggtgaattgcttgagtctgggagttggagaccggcctgggcaacatagaaccccatctctatttttaaaaataaaatattaattatcactgcttagttaaattatagtggtctcccaacaatacagatcagatcccagctcccatggtatatacactgtgagtgctgtataaagtacaagctctgccgccagttctccagcctacaaatcacagtatagataacagatgtgcatgatgatcactggccaattgcgtcacttctctcaaagtcagtctgtgattggtccctgagcatctgtcggtcagtttcatgcacagactgcaaagcatatggttttgtctactctttgtctctcagtgataaacccacatggcattttgtaaaagtggatacatcaggccaggtgtggtggctcatgcctgtaatcccagcactttgggaggctgaggcaggtggatcatttggggtcaggagtttgagaccagcctggccaacatggtgaaaccccatctctactaaaaatacaaaaattagctggatgtggtggcaggcgcctgtaatcccagttactggggaggctgaggcaggagaattgcttgaacccaggaggcagagcttgcagtgagccgagatcatgccactgcactctagcctgggtgacagagcaagactaccatctcaaaaaaaaaaaaacaaaaaacagtaatcaagcatgaaaattatgaaatgctcagagataaaatgcgcgaggcctgtacactgtaatctacaaaacactgctgagagaaattttaaaagacctaaataaatggcaagttataacatgctcttgaatcagaagactcagtatcttaggatggcgacttttcccaaaatgatctacagattcaaagcaatcggaatcagacctcagcatgcctacttgtagaatttgataacctgattctaaagtttatatggaaatgcaaggaacccagagttgctaaaataactttgaaaaagaacaacacagttgaaggacttagactacatgatttcaagaattattataaagctacagtaatcaagacagtatggtattgatatgaaaatagaccattagatgaatggaacagaatagcaagtccagaaatagatccacacatatatggtcaattgattttcagcaaagtgccaagtcatttaagtggggaaaagataatcttttcaacaaatgataccggaacaactggatagccatatgcaaaagaacctcaaccttcagctcacagcactacaaactcataattattatcattatattatactattatgtaataatagtatatatcatgttacatattatattatgtaatatatattatatgatactgttatgtcatataattattattgaaatgggtcatagatctaattgtaagagttaaaaccatccaggtacagtggctcatgcctgtcatcttgcactttgagaggccaaggcgggtggatcacttggccccaggagttacaagaccatcctgggcaacatagcgaaacaccgtctctacaaaaaaaatgaaaaaattagttgagcatgatgacactcacctgtagtcccagctgcacagtagtctgaggtgggaggatcacctgagcccagagaggtcaaggttgcagtgagccatgattgcaccactgcactccagactgggtgacagagagaccgtgtgttaaaaaaagagttaaaactataaaaccttcagaagaaaacatatgagaaaattctagtgatttggggtttggcaaagattccttgaacatgatttaaaaagcattaactaggccaggtatgctggcttacacctgtcattccaatgctttgggggaccgaggtgagaggatagcttgaggccaggagtccgagagcagcctgggcaacataacaagagtgggtctttaccaaaaaaaaaaaataaaaagcctgtgccaggcacagtggcacatgtctgtagtcctagctactcacgaagctgaggcaggaggatcacttgagcccaggagttgaagcttgcagtgaattatgaccatgccactgcactccagcctgggccacagagtaagactaagactcagtctcttaaagaagaaagcgaccgggcgcagtggctcacgcctgtaatcccagcactttgggaggctgaagcaggtggatcacaagggcaggagatgaagaccatcctggctaacacggtgaaaccccatctctactaaaaatacaaaaaattagccggacgtggtggtaggcgcctgtagtcctagctactcgggaggctgaggcaggagaatggcgtgaacctgggaggcggagcttgcagtgagccaagatcgtaccactgcactccagcctggacaacagagcgagactccatctcaaaaaaaaaaaaaaaaaaaaaaaaaaagaagaaagcataaactataaaagaaaaaattaataaattagtcatcctcaaaattagaaacttttactcatcagaaaacacttaataaaatgaaaagtcaagccatagacttagagaaaatatttacaaaacatatatctgacaaaggacttggatatggattatataaagaactattgtaattcaataagatgtcaaacaacccaattaaaaatgggtgaaagatgaactaactcttcaacaatgggcatgtcatttgaatggatggtaagcaagcacatgaaaagatgttcatgtgcctttccctcattagtcactagggaaatgcaagttcatagacatctctcttggtagaaagatatcactacacacccacaagagtggctgtaattaagcagtctgaccaagtatgcgtaagaatgtggaataagaactctcatacactgctgatgggaatgtaaaatgatagccactttggaaaacattttggcaaataataccacttacattattatcgaaaatattgtatacctgaaagaactcaaagtgaaaaagctatatactgtctgcttccaaggctacacattatgggaaaggcaaaactatgaagacagtaaaaagatgcgccagtggttgccaggggctcatggggagggaaagaggaatgaataggtggaacacagggcatgtttagggcagtgaaactattctgtatggtaccgtaacgatgaatacatgttattaggcatttgtcaatacccataaaatgtacaacacaaagagtgaaaatgaaaactgtgggcttcagttagcaataatatgtcaacattggctcatcagtggcaacaaatgtacctcaccaatgcaagatgtttgtttgttgtttgtttgttttgtgacggagggggtgcagtggcgcaatctcggctcactgcaagctccgcctcccgggttcacgccaatctcctgcttcagcctccggagtagctgggactacaggcgcccgccaccacgcccggctaattttttgtatttttagtagagacggggtttcaccatgctagccaggatggtcttgatctcctgctgtcgtgatctgcccgcctcggcctcccaaagtgctgggattacaggcatgagccatcacgcccggccaccaatgcaagatgttaataacagggaaactgtggtgggagtgaggtggtatatgagacctctctgtactttccactcaatttttctgtaagcccaaaacttctctaaataagaaagtttattaattaaaagttacttttatagtgtatctatatctaggaataaatctgaaaaagatatataagatctctactcagaaaactgattatgttattaagagagcttaaatatagcccaaataaatagatggatatactatgttcatggaagggacagctcagtattaggaaggtgtcagtcatcttaagaaaagcctcatgtgtcacacaagggatactgacatctgacaccaagcacatgtaggcatcctgactacgtttacttgaatgatgtggactttacagagctgactatagacagttcaaatggcctgaaaactgttcaatgcactccctcccaggctgtcatgggatgcacttcaggaactttactttttaacaagaaaattcagttttcctcttaaacagctggcttctgttccattagcattcttgtcactttaagttgcattcatctttgttttttttttttagaaaaacatttgttctgcaaccagtcttgtcctttaaatacttgtactgtatacaggctctttttcataggtccattacttaaaatgatgtaagtgtgtttttggtggcaggggggtgggagttgtttgttttgttttgttgagacacggtcttactctgtcacccaggctggagtgcagtggtgtgatcttggctcactcctggcctcaagtgatccacccacctcagcctcctaagtagctgggaccacaggtgtgtaccaccacacccagctaattttttttttttttttttttttttttgtagggacggggttttgtcatatcacccaggctggtctcaaactcctggactcaagggatcagcctgtctcagcctcccaaagtgctgggattacaggtgtgagccactgcaccggtcctgatttgagtttttgtaagacagggaacaatgttcagaatttagcaccaatgtcagactcattctgtaaatttttattgaacgtctgcctggtgtaggagaggaagatgacagacaagaattcttcctccaagagttacaggtcagttgagcagaaaaggcatacatcaatacccacaatgagagttgtcgtgattcagaggagggacaaagtccttcccctggagggatcctgagcactttggagaggaaaggcatctgtactgccccccaaatgtgtagaatgggatgcattcctggcagaaagaagtaggataaagtacagaggccagggctgggtgcagtggttcacgcctgtaatcccagcactttgggaggccgagacagcagatcacctgaggtcaggagttcgagaccagcctggtcaacatggcaaaaccctctctctactaaaaatacaaaaattagccaggcacaatggcaggtacctgtaatcccagctacttgggaggctgaggcaggagaattgcttgagcccaggaggcagagatcgcagtgagccaagactgcgccactgcactccagcctgggcaacagagcaagactctgtctcataaaaaaagaaaaaaaaaaagtacagagtccaggaagcctggggtggggctggcagatgccgagtcatctattttggccagagttcaaggcttgctaggggacatgaagagaagattcgtgcattctagttcaaactccaccagatatttgagctccttctctgtaccaggcattgttctaagatacgtaagtgaacaaaacccatgacaccctcgtctatgagagctgatcctctggcagggacagacaggtcatgagtggagtgatggagcagctggcctggtgacttagccgccttcaggtacagtaggaggagcaagcccaggacaggtgagtgggtcaagggtgccagaaggggtgagggcaccaggaagctggtccagtttggcttccctgaggtggtgaccaggacctagcatctgaggaagggctggaagcaggtgagagcaggtggagcagacatcaggatgggagcatcctgacagggagggcagcagggtgggctcatgagaggaacagccaggaagtgtgactcgagcagtgtcctggagaggaggaggaggagaaagaggtcaggaggtcccaggggagaggcaggaccagtctcgtggaggtcggggccgttgtgaggactctggtttgtgttgtgtgtgaaaggccatgggatggggaccagcgagggcttcttaggggactggatatgctctgatctagctgctaaaaagcccccttgggcagcttgcagggcccgggcagaagctataggtggttctgaggtttgcagaggggcctgaaggggtggggcccggccaagcaaggtggctaagtgggaaaggctccaccgcgttgggtgtaggaagaccttgaccttagctccagcccagccactgagcagccgtgtcgccttgggtgatacctgtccctggtcggtttccctacctgtgaatctgggtacttggaagccatgctcgagaagagcccatccccaggaggtgatcagggttctcctccaggtgaggaacctggcagccgtgtgtgagaaccttagaaaagggagagggaagaggctgtggcaggaagtgaggagggagttagtgataccctgggcaggatgccatgagctgggatggaaaccacaggatgaatgcaagtaattaaaaaaaaaaaaaaaaaaaaaacagcattgggccgggcagtggctcacgcctgtaatcccagcattttgggaggccgaggtaggtggatcacctgaagtcaggagttggagaccagcctagccaacatggtgaaactgaaaatgcaaaaattagccaggcatggtggcgtgtgactatagttccagctactcaggaggctgagacaggagaatcacttgaacctgggaggtggatgttgctgtgagctgagatcgtgccactgcattgcagcctcggtgagagagcaaggccccatctcaaaaaagaaaaaaacagactttccgaccaaacgatcgacaaaccagactgtccaaacagccataagccgtaactttgtgcggaggtaaaagaccgaggtcacatcgggacctgttggattcaaggcatgttgacagctgtttccaggcttcagatagagcctccagctggcagggtggccacagggcttgttgagtaggaagcctcgttgctttgacaggttacttggccccatgagggacaatcccatagtcagttacccagaaacgtgactgtctccttgaaatcctcagcatggggtcttatgaataaacccttactagatttcctgttctgtcttatttttatgcagagctttactttatagcagaaaattccatttttacccttaaatggcttgcttctgctcccttagtgttcttgtcactttaagttgcattcatctttgtccctttagaaaaggatttgtcctgcaaccagctcttgcagaaggtacttggtttattgttaaccgatgtttgctaaatgtttgaattatgttgagttgcttaaagtcatgctatcgggtagatgttgtggctgttcttttcactctcttatttggggatttacaaaacagttatgtttttagttttcttttatttgttgtgttgaataggaatgtagctctgggaacctctagttccaaataagaaagccttggacacatttccagttggcaagctggcaaaatgaagggcgtacaagttgttagagaggctgggagcctatttaagcacccagcttcaggatgggacatgggatatacctcgagttagaggttcttattaactgtggattcttctatgcagatatctgtcacaatataagttactataagtcagtactaaggcagctgctacattctgtttgccaaggggaagaagaaagcttggaaatggtattccttaaaaatgtcagtatcataaaagacaaagaaaagctgcggaaatgtttcagattaaaagagagaagacaataaaatgtaatacctgactctgaacagcatccagtactgaaggaggaaaaatgctatcaaggacattattgggtcaattaacaaaatttgaatacgaatcatagattgaactgtatctgttaaattaacagaagcgaagtgttctgtggtgtgtaggagcacactgccattcttagcaaacgtgtagtttagtatttaggagaaagggccatgaggcatgcaactcaccctcaaatacacacacacatacacatatatacatacatacctataaagaaagaaattatgggctaggtgcagtggctcatgcctgtaatcccagcactttgggaggccgaggtgggtggattgtgaggtcaggagatcgagaccctctctactaaaatacaaagaattagctgggcgtggtggtgcacgtctgtagtcccagctactcgggaggctgaggcaggagaattgcttgaacccaggaggcagaggttacagtgagccgagattgcaccactgcactgcagcctggcaacagagcaagactctgtcttgaaagaaggaagaaagagagagagagagagagagagagagagggagaaagaaagagagagagaaagaaagaaagaaggaaggaaggaaggaaggaaggaaggaaggaaggaaaggaaggaaggaaggaagaaaggaaggaaattatgataaagcagatggttaagttggtaactaccagtgaatatgggtaaagttaggatgttctttactctgttttgggggtgcaacttttctataagtgaaagtacttccaaataaaaagttaaaaggcaagcaaataaataaaagagacagtttctatgttatatatcctagctatgtttaccatgtctggattctgaaagctgcagagcagaaaacctgaagaacagatcacctgttcttaaaataccactgttggccagacatagtaactcactcctgtaatcccagcactttgggaagccgaggtgggaggatcacctgagctcaggagtttgagaacagcctgggaaacatagtgagaccctgtctctacaaaaatttaaaaaattatccaggcatcatggttcgtgcctgtagtcctagctactcaggaggctgaggtaggaggattgcttgagcctgggagttcgaggctgcagtgaaccatgatcacactaaagcactctagcctgggcaacagagcaagaccctgtatcaaaaaaacaatcaaacaaaaaatcactcctaattttcctcccttttagtacttttaaaaattaacttaaaacattttttggataattgtagttttttttacttttttttttttgagacagagtctcattctgtcacccaggctggagtgtactggtgcaatctcaggtgactgcaacctctgtctcctggattcaagtgattctcctgcctcagcctcctgagtagctgggttcataggcgtgcaccacacctggctcgtttttatatttttagtagagatggggtttcaccttgttggccaggctggtctcagattcctgacttcaagtgatctgcccgccttggcctcacgtgcagttttaggaaataatacagagatccccagcactctttccagttttccccaagggtaacatcttgcaaagtgagaggacgatatcacagtcaggatactgacattgataccatcaagatacataatgtttccatcaccaatcagtggtcatggtgccttttatagccaaacccacttctctcctaccttcccatcccttttttaattttgccagtcattaatctgttgcccatttctgtcattttatgaatgtcacataggccgggcgcggtggctcacgcctgtaatcccagcactttgggaggccgaggcaggcggatcacgaggtcaggagatcgagaccatcctggctaacatggtgaaaccccatctctactaaaaaatacaaaaaattagccaagcgtggtggcgggcgcctgtagtcccagctactcgggaggctgaggcaggagaatggtgtggacccgggagacggagcttgtagtgagctgaaatcacaccactgcactccagactgggtgacaaagcgagactccatcttaaaaaaaaaaaaaaaagaatgtcacataatgaatcatatggcatataaccgtttgagactcagggtaattctcatgagactcatccagcttgttggtgcatcaacagtttattcctttttattgctgagtaatttccatggtatggaggaaccatggtttaactattcacccattggaggacatctaggttgtttccagcttggagttattatgaataaagctgctgtgaacatttgtgtacaggtttcttggttttctggtttgttttaaacagttctagccaggcacggtggctcacacctgtaatcctaacacttggaaggctgaggtaggaggactgcttgatcctaggaggcagaggttgcaaggagccgaaattgtgccactgtactccagcctgggcaacatagcaagaccctgtcattcataggtaggtggatggatggatggacggacggacagatagataggtagaaatgtaaattacagggctacgctcagtggctcatgcctgtaatctcagcactttgggaggcgaaggcgggcggatcaccagaggtcagcagtttgagaccagcctggccaacatggcaaaaccccatctctactaaaaatacaaaaattagccaagcatgctggcatgtgcctgcaatcccagctactttggaggctgaggcaggagaatcacttgaacccaggaggcggaggttacaatgagccaagatcatgccactgcactccagcctgggccacagagtgagactccgtatcagtactttctttttattgtttttctgttattatagtttaagttcattgttattagattatatactctgtatggcttcaattcttttaaatttgttgaggtttgtttaatggtcaaagacatggtctgtctaggtgaatgttccatgggcttttagggaaaaaagtatattctagtgttgttgaatggtgtcttagtccattcaagctgctataacaaaataccgtaaactgggtgatttataaacaacagaaatttttctctcacagttctggaggctgggaagttcaagatcaaagtgccagcagattcagtgtcatgtgaggacgtgcttcctgcttcatagataagaggtacatacacgtttaggagcatcgtgtcttcctggtggatgaattctgttatcattaggtgatcctttgagcacttttaaaaagaatctgttggccgggcgcagtggctcacgcctgtaatcccaggactttggggggccaaggcgggcagatcacgaggttaggagattgagaccatcctggctaacacagtgaaaccctgtctctactacaaatacaaaaaaattagccgggcatggtggcaggcgcctgtagtcccagctactcaggaggctgaggcaggagaatggcgtgaacacaggaggcagagcttgcagtgagccaagatcacgccactgcactccagcctgggcaacaaagtgagaccctgtctcaaaaaataaaataaaataaaataaaataaaaataatctgtttaatagcctactagtgttcttcctttactattttattgagcattaattaatcccaacattatgtctatgtcaggactgatgacaatatttggtataaaaatttgatagtctcagaggctgaggcaggagaatgcttgaatccaggaggcagaggttgcagtgagctgagaccgtgccactgcactccagcctgggcaacagaacaagactccatctcaaaaaaaaaaaaaaaaaaatcgatagtatcatatcctccaggattcaaagtgaacttcaaacagtcttatgtagtctaaattttggaatgcatcccagtattgagttgcagcagggatttgagtttttgtgaagagagagaggtatatcagaatcttgggcataaactaaggagccatgtcagaacctcaggtgtatgccaatgagatagatcagaacctcaggcatgtacccgatgagacagatcagaacctcaggcgtgtacccggtgagacaggtcagaacctcaagcgtgtacctgttgagacaggtcagaacctcaggcgtgtagccagtgagacaggtcagaacctcaggtgtgtacccagtgagacagatgagaacctcaggtgtgtaaccagtgagatatatcagaatcttgggtatttacccaaagaggtatagcagagtctcaggtatatactcaagaaggcatatcttgaggctttaagtatctagctaaggatttatatcaggatctcaggtttatacccagggaggtatagcagaatttggggtatagatctaaggaggtctatcagtctagagcatatagccaaggaactatatcagaacctcaggcacctacccaaagaggcattttaggactcgtaaggagggggtagatttcaaaagtgtagtctaacagtttatctactttgaaatttaaaacaatattaaaggaaaacatgaaatatttctatctgtcagaaggtgacatgagttttaaacaattaagaaatatactggctgtggccttgtaaccaaattattatgcctatagaaattacagactccattttccaggatagaataacagggactgacttaccttctcatctgagataacaaaacctccatacaaatacatgaaacaatgttcttcaagatgctggacatcaggcagtgaagggcactgatggttgtaagacaaggtgagaggtgtggcttgagagagtttccaggttgcagtgcagggagaggggaaactgaggcagatcttggcagacttcctcagttgacaaaatagagctgagagtccagggagaccatggtgtatagattatccaaagcaaagtatgagaggtgcaagccatatacagagggactccagagatctaccaaagtacttcttggtgcatccatatgagcaaaactacttgaggccaggaaaagaaccatctgagaggattagaaggaacagtgcccagtacttgtgccagccaggaatggtgcctgatactcacgcagggccaggaacagtgcagggatgtgagtgtttgttaggagagggaggtatatcagaatcttgggcataaagacaagaaaccatatcagaacatcaggtgtgtaccaatgagatagatcagaatctcgggtgtatacacagtgagatagatcagaatctcagatgtgtacacagtgaagcagatcagaatctcagatgtatacacagtgagatagattggaatctcaggtatgtacccagtgagtccaagagcatggtgctggcatccggtgagggccttcctgctggatcgtgacatgaagcaaggcaaagagcctgtcagctcagggctctcttcctcttcttataaagtcaccagtcctatcatgggggccccaccctgatgatcttataatcctaattacctcccaaaggctaccttcaaatgctatcaacatatgaatttggaaactaagtttccagcacatgaaatttgggggatacattcaaagtatagcaaatattacatcataaccagtaggattcatcccaggaaatgccaaatggcttgataatcaaaaattaatgtaactcatcgtattaacaggatgaaaaagaaaaaccatgtgatcatcttagtagatgcagaaaagcagttgattaaatcccacattcatttctaacttaaaaaaacaactggattttgacagaggtgcaaaggcaatttggtagagaaaggacagtcttttcaataaatggtgctggtgcaatggttatccatatgcccaaaatgaactttgacccatgcctcatgccatacacaaaaattaactcaaaatagatcagagatctgaaggtaaaatttaaaactataaaacttctagaagaaaacacaggagaaaaatctttgtgaccttggtctaggcaaagatttcatagatatgacaccgagaacacaatctatgaaagaaaaaaatcaataaattgaacttcatcaaaatgaaacttttactgttcaaaagacagttttaggagaatgaaaacacaagttacacattgggaagaaatattcgaaaagcatttgcctgataaaggtattgtagctggaagacagaaaaaattctcaaaactcacctagaagaaaataacccagttttaaaaatgggcaagagatctgaacaaacacattgtcaaagaagatagatgaatagcaagtaagcatgtgaaaaattctcaatgttatcagtcatcagagcaatgcagatgaaacctacagtccccatgctaatgttctacaacttacacagtggtggtatgataccactacatgcccatttgaatggccaaaattagaaaggttgaccataccaaacattagccatgatgtgcaggaactagaactctcatctttgctgacaggaaggtaaaatgatacaaacacattgaaaaacaggttggcagttgctttttttttttttttgagatggagtcttgctctcccaggctggagtacagtggcgcgatctcagctcactgcaacctctgcctcccaatgaattagaaaaataataataaaggtaacaatagcagtaataataatagaaataatgatagtttctttaataaaaatgctgtttaggcccagactgaaaggctttaagtaaccactcccccactgaagttagagttaagaaagaatattaattttccttgtgtgaaacattaatcttatctagcctccatgtattttgtaagttctgtaaattcctgttttccctgcacagctgcaagttcacaaggcagataagcttaagctgcaaaacatgtttttcttaagatgtaaggcatgtcacaagaatatcacaagatgataacggcctttattctcacttctgtatgcctgcttcctgcctcacatatttcctgcctcaagatgcgtaaaaggtacttgccttctttgtttggtgctctgactttctggatgcaagtccactgagccagtgtacaccttaaataaatcctcctgaaccccatcaatcgctccagttctctgatttcccactacattttctgggggctcgtccgggattggagatggcagattttctgtctcccttgcctgtggaactggagcccgggtcgagggagacctgggacctttggtgccaatgggaggactttagcccggaaaggagattggctctcctgcatcccggtgtccttcctagacagcacaacggaacctataaaggggttgcaggacggttccagcaggggctggggatggtgagagtagctcactgattcagatgacagggttttgccatgttgcccagacccagaggggctggggacagtgagagtagctcactgattcagatgaaacttacaccttagccgatgcaggacacgagagtggctcactaagttggtcaggaaagaaactgaaaatgggaagagtggcttcctgccttgactaaggatcgggaactgggagcggggaggtgtgtgaaagagatggttccgggagggccgtgatgtggggagacacagatctcttagcacggactgtgtgctctgaggcgagtgtgtgattgaccagaaccagggcatcacatacagctgacaggagctgccccacagctgcagcaggctgtggcaggaataaggtactctcctagctaagcagcacctgaaacttccgtaataggacccagtctggtcagtctggaacgaaagtgagagtgagtgtgcatcacaaagggcgggatgggaggaaaagcatcgaaacccactcctctggggtgcatgttaaagaattttaagaaaggttttgctggagattatggaattaagttgtcccccccaaagattgagggttctgtgtgaagtggaatggccttcttttaatgtcgggtggccagccgagggtacaataaatagggaaatgattggtcatatatttagggtagtgactggggttggaggacaccctgggcatccagatcagttcccatacatcaattcctggatgatcacagtctagacatgccccaaatggttacagccttgtctggcaacttactgtaagactctagtgacctgagccgaacctaaggcagttagagggcccccttcaccagacacctcaggtggaaagaaaaagccacaggaaaattaggaaagacctgttctacttcactgggatcaagtgattctcctgcctcagcctcctgagtagctgggagtacgggtgtgcaccaccacgcctggctaatttttttaaattttatttttagtagagacggggttttgccacattggccaggctggtcttgaactcctgacctcagacagtctgcctgccttggcctcccaaagtgctgggattacaggtgtgaaccaccatgcccagccagcagtttcttataaagttaaaccaatgcctaccatgagatctggcaatcccactcctaagtatttggccaagaaaaaagaaagcatatattccatacagagtctagtcctgaatgtctatagctgctttatttataatagctcagacttggaaaccattcagatgccattaataggtgaatatattctcaaactgtggttatccatacaatggagtattactttgcaatcaaaaggaatggcctatgaatacccataacaacatggatgaatgctgaaataattgtgctgagtaaaagaagacaggaaaaataagtataatacatactgcttgattctatttgtataaaactagaaagtacaaactaatctgtaatgacaggaagcagaccagtgacagtgggcatggaggggcaagagggagagattagatgggcacaggagagctttgaggatgatgggtctgcgtactgtctcggctatgatagtggtttcacaggttgatacatacggcaaaaaataccaaatttgtacactttaaatatgtacagattattgtatgccagttacatgtccataaagctttcttttgttgttttgtttttattttattttttgagacagagtctcgctccatcgtccaggctggagtgcaatggcaccgtctcagagcactgtaacctccgcctcccgggttcaagcgattctcatgcctcagcctcccaagtagctgagactacaggcatacgccaccatgcccagctaatttttctatttttagtaaagacagggtttcgccatgattgccaggctggtcttgaactcctgacctcaggtgatccacccacctcggcctcccaaagtgttgggattataggcatgagccacagcaccgggcccataaagctgtcttttaaatgaaaaaaagttgtcttgaaataagcattagaactgtggctttggctctgaaatcctcatctgaggacccacactcgggtgccccaatgtggcggtgcttacagaaatgactccatctgctaaatgagtaaatgggtaattctccactgaacacacactcgtttagcagcataagcagcaagagttcaggtaatcctcacattgcaatttgtcattagtttaaacttccagtctttgttttaaaaacacattagaataatactacattttccctcatctctaaacttgactgaagactccaagagagagtaatattcatcaagaggatcatctactcaacacagataaactgggaaagaaaaataacttgtgagtaattcagaatctggattatcaggtcaggcgcaatggctcacgccagtagtcccagcactttgcggggcccaggagggcagatcacttgagttcaggagtttgagaccagcctgggcaacatggcgaaaccctgtctatacaaaaaatagaaaaattagccaggcatggtggcatgtgcctgtagtcccagttacccgggaggctgaggtgggaggatcacttgagcctgggaggtcgatattgcagtgagctgtaattgcaccatgcactccagcctgggtgaaagaaggaaactctgtgtccaaaacaaaacaaaacaaaacaaaaaaagctaaattatcaaatgtctagatcgttgatggttggaagtaaagttgagaaatgttcacactgggagatgacacacagtaaaccacacagagggttctaacgtggttgttagaagcagaaactagaggcttgctgcctgaggtcaaaccccggtcccggtggttctgtgccccagcgcatgttgtggtagcctctctgtacttcagtttcctcatctgtaaagtaaacataatgataatgcctgcctcatggggttgctgttaccaggaagtgagttaatgcacattaggttcttatttatgacagtgcctggcataggataagggctcaaaaagtgttagctggaactactatcattatcaacatctctaatttattgcagggttggatctgaaaaatggctgatgatgatttgatgatgacttcatttttataaaacaataatattgcagtgcaaattaaacacaagcaacctgcaacacgccactgcaagttggatgtctagaaaaggtgccatgagttaccttctaaaacatcataagaaaccatgttcaccaataattaccataataggagagaagtaccaagtaccatggggagacagagtccagaatctcagagagagacacagttaccttttagttacactaatggggaaaacaggagctttgctacccttgcacctgatggagggcttctctgaatatagggctatggggtcagaagccagtttcctcccatatttagaaggtttccaactgttatctttcacttcccatgttgctgttggaaaatccaaaagtattctatttggccaggcacagtggctcacacctgtaatcccagcaatttgggaggccgagattacctgaggtcggaagttcaagaccagcctggccaatatggcaaaacctcttctctacaaaaaatacaaaaattagccaggcgtggtggcgcacgcctgtagtaccagctattcgggaggctgaggcacgagaattgctttaacctgggaggtggaggttgcagtgagctgagattgtgtcactgcactccagcctacgcgacagagcaagactccgtctcaaaaaacaaaaaaagtattctgttggatcgtttgtgtgcgacgtgtttttccctctcagaaagctcgtagggtcttctctttgtctccagcatggtctggaatttcccagtgagtgaccatctgtgtgtgtgtattcatccattccatggagtccctgctgggcccttgcaatctggaaattcatgcccatcatttctgagaagttatcctgaacgtactggttggtggtttcctgtgctccatgttcttgcttcctgctcttcggagctcctgttatttggttgagttttgtctcctggactggtcctctcttacttctcttgcttctcccatgttccatctgttttcactctactttctgtgagatcaggccctttatcttccaacccttctattaggtttgcaattgagtttgtaattccctagaaaagttcttattctctgaatatcccttttgatagcatactcttcctttttcatgagtgcagtgtttctgcatggctctcatcagaacatgctagtgtctcccatttctcataactttctagagtgaggaccatttgaacttggagtgccctcattttaaaactctgtggttgaccttgttcccctcttttgctgctgcttttcaccagactttgaagaagcagaagtacattcagaacttgtctgctctggcaaaagacaatactgttggcttaatctaaaaattgaagaagaaagctcaaggagagaagtttaaaaatataccacctctggctgggcgcggtggctcacatctgtaattccagcactttgggaggctgaggcaggtggatcacctgaggtcaggagttcaagaccagcctggccaacatggtgaaaccccgtctctactaaaaatacaaaaattagccaggtatggtggcagccgcctgtaattccagctactcgggaggctgaggcaggagaatcacttgaacccaggaggcagaggttgtggtgagccaagatcacgccactacactacagcctgggtgacaaagtgagactccgtctcaaaaaaaaaaaaaaaaaaaaaaaaaaaaaaaaaaaaaaaaaaaaatatatatatatatatatatatatatatatatatatatacacacacacacacactaaccttcagcatataggactattgcagaagggattatctttctacttggttggttcctcttggtcttgagcaaattttgacttccctgagttggcccctaaaagttaaagggaaagggccttttctctttcctttaaaaccaatatggcatatttgctgagaacttagataccacaggattggcagtgtagacttacattcatagaccggatgccatcagccaaccttgagtaatttgcagcacactgcatcattttatttaagtaatgcgaagtccttgacatgtctcagacattgtcttggttacttgtaaggtctcacataaatctaattttcctctttctctgccctttctggttcagctcagtttattcaagggtgtatttgtgcaacacacttgaataaggtgtggtcccgcctttgtagatgttatagtttgggaagaccagccgggcagagagaagagcatgattcaaggatgaaggcgtgggctgggggccgagggagcaaggattcccagtaacgagggaggaaggagcagcaccatgtgcccattactctatagacatctcgaaccacctggccatgtagctgtcattaacctaaatttacagttattgaaactgaggttcagccaggcgtagtggctcacgcctgaacacaggaggcggaggttgcagtgagccgagatcacgccactgcactccaggctaggtgagagagcgagactctgtctcaaaaaaaataaataaataaaagaaaagaacaaaactgaggttcaaagaaatgtacagtgctcccccccttatccaaagaggatacactccaagcccccacagtggatacctgaagcctcagatagtatcaagccctatatatgctatgttttttccctgtatatgcatacctatgataaagtttataaattaggcacagtaggagactaacaacaatgataataaaatggaacaattataacatacactgtaacaaaagggtctcttcctctctctctcagaatatcttattgtactgtactgggggtaactaaaaccaaggaaagtgaaaccatggataagggatatctactgtataaggtggagttttcaaggtcatagcactgccttcccctgaggttggccttgcagcctctctaggcactgctgctgctgctaagaacccctgtgaggtgaacactgtaagcatcatcattgcttctcagaagaggagacctggcttacagaggtcaagcctcaggtaccttaaacaccattttaaaactgaactcatggccaggtgcattggctcatgcctgtaatcccttctctccatgctcaaaacctgccctccttgtctttatattccaaatttcgtgggtgccacctcctctgcccagtgacttaagccagagcatacattcatcctagactctgtcccaggtccctggtccaggcagctgccagttgtcaggatcagctctttatctcgcagtcctcctgcctcttgtgtcattacccagggctgtcaccatcttttcttgggacagttacaacagccccgtaaggagttgtgctgcttctagtcttgttccctttgaatctggattccttcttgccatcaagacaatcctgatacaaatctgatcacgtcacacttcccttcaatagtcttccatggctccttattgttttaggatgaaatccaaactcctaaacatggggattaacaatgtgccatgattggcactgctggcctctcctacctctgcagactcacctcttgccacttctcccttgaggtagatcaaaaatggtcacaagttctttgaggctcttcccatcaagaggtagagtttatttccccacctcttggatctggcttgccttgtgacttgctttgacccacagaacgtaacagaaaggacactgcctaacttacaaatgaggtctaccttaagaggctttgcagattccacattcaacctcttggaatgctgccaccatctgagaagcctgaggtggcctctgtgaggatgaaagacttcatggtgagaaatacctagcgaacagcctggcaccagctaccaggcatgtgactgaggccatccagccatagctgagccacaaaatgaccacagctatgtgaattatcccaggtcagaccagtagaagagccacctggctgagctcagcccaatttgctgacccatagaattgtgaacaaataaaatggttgtagttataagccattaagtttcagagtttgttacacggtaacatgtaactgatacaactcttggagccagttgttcagccattctcaaccacttattcaatgatgttttgggccatatatgcagatatgctgttcccttttccttgaaatggcccttaccctcctttctgttgggttttcctatggaatatccagtcagcctttaggattcatcttgggtgtcccttcctgtatgtaggctccctggccctccaggattcccccagtaacagccctcatcacgctgcctttgcaaccatttgtttatttgtacctctcacctgctagttgggcaagttactcacttctctcaacctctgcatttttcttctttataaatgggaccaataatacctaccctgccctggcgtggatagattaaagaaaaaaaatacatgcagctgccattgagggcctggcccacgtgtgatgttcaataatattatttctccttgttttccttcccgtgccagtgccacacccccctgtcccagtgcactggggctgtggatcccttcaaagctgagattgcctgtctgtggtctccagcgttaagcacagtcattagctcaggtgcgtactcatgtgttccacgagttcaagcctcagccctgtaaagtttgcctgccgtgtatctgatatatttctgctaaaacccattaggcctttcttgctctgaaatgtcatcgttagttgtgtgtcacttcagttttgtaactggccaggccactgcgcccaggctgcttcctcgtcatctggctgctaaatgcttcaaccttacctgccttgctatgcgtcccatcctgtatcaggtcagagctcttgagtggtgaatacaaatttcatttcagttgacttttgattcttgtggcaggcctctcggcctactctaatttgattgcaacggacacaaaatgtgtccaaacttgcagcttttcttctcttattttgatatcaccatccacaaaggtaagatattttaaagcaataactacaaactttctgaaaattatgaagaagtgctgggttttaaatggaagtcatatagtgtgaactttgtgtaaagtccgtagggagttttcttggaaatggctgggaacattctttttgcacctttgaagataaaggtaggtggaggagctcacagctcttgtgccatgttgggcttgtcactcttgtttatgtgccaaattcttttgattacaaaattttaagtttaatgctttaggtattgttgggcaagatctagatgtatctagttaaatgtaggtgatatgcaaactatttatgatgtatttgatttaaattcattaagatagagtgtctttaccaccattatagtctggtccttttccttctgttttaaatgtgtttccattggcattttctaaactgactttgttagcgtgttaatcatttggcactggtaatgattaatcttttctttctttctattttttttcttttttttttttgagacagagtcttgctctgtcaccaggctggagtgcagtggcgcagtctcagctcactgcaacctccgcctcccaggttcaagtgattctcctgcctcagcctcccaagtagctagggactacaggcacgtgccaccacgcccagctaatttttgtatttttaatagagatggggtttcaccatgttggccaggatggtctcagcctcttgacctcgtgatccgcccacctcggcctcccaaagtgctgggattacaggcatgagcgactgcgcccagccgtgttcatctatttctgtgaaccgatgctaggtgaaggtacagagggctttctagcttctgggtttgtttattctgaaatgttattttaaatcttagcccaacaaattgagcgaaaagacttctagatgttaaatatgatattcaaaaaatataaagacaaggtgataaattagaattggtgggaaagagaaaaatctgtcttctgatggtcacctgccccagcaacactactcgtttgagaagacttccatcctttaccctcaaagtgttccatgaggttggatcagacatcatttagcaaagaaagatgtaaatagatttctgtagggtggcattattaagcatattaagtggttacaatacagtaaattagagggagtagtacagaagcataagcagtcaaaaaagtgaaagtctaacgttcgtaattattgttctggaggcttttgtatcacatataagttccaggctgggtatgatggctcacaccagtaatcccaacacttagaggccaagccgcgtggatcgcttgagcccaggagttcgagaccaggctgggcaacatagtgaaacctatctctacaaaaatacaaaaattagctgggggtggtggcagcgcctgtagtccaaaccacttgggagcctgaggtgagaggatcacctgggcccgggagatcaaggctgcggtgagccatgatcttgccattgcactccagcctgagtgacagagagagactctgtctcaaaaataaaaaagttttgagtgtgaaaattcaagctcaattccatttgttggttgtcttgagtgtctgatcacatagaatataaagatgttttgatagttgggacagtattcagctacctgctatttaatacattatttcagaaaatatttacaaagggggctgggcacagtggctcatgcctgtaatcccagcactttgggaggccgaggtgggcggattacctgaggtcaggtgttcaaaaccagcctggccaaacatggtgaaaccacatctctactaaatatacaaaaaattagccgggcgtggtggtgtgtgcctgtagtcccagctactcaggaggctgaggcacgagaatcgcttgaacccgggaggcgtggggttgcagtgagccgagattgcacaactgcactccagcctgggtgacagagtgagactgcatctataaaaacaacaacaaaaaagaaaatatttgcaaaggaccttctgggtccaagaacctcatgtccaatacaagggtgcacacgtgggtgagacacggcagctgctctccagaagcccacagtggaggggtttcccttcggtctccttttattccaagcaagtggcaaaactactttactcttaatacaaaccacttccttttatcacaggacgcttcccaagctctgcaactgttgctcctgaggaagggagtggaactgataatctgttcctccctattgtgttcagtatggttttttttttttttttccttttgctggctttgttttcctgtccctgtgatgattaaaattcactctgcaaattagatcacctttcccacgcagagtccctttgacttctgttctagatatccattacatttttgtagtcttcggacacactgtgtgtgccgctttgccctctgggtgacagcaggctgtggctgcggcgacagagctgaggtgaattctcacagaccatcactgggttactcctggagtaagtaattcccaagagctccttctgtgcagatcgttagaaatagatattgaggccaggcgcggtggctcatgcctgtaatcccagcactttgggaggctgaggcgggcagatcacgaggtcaagagatcaagaccatcctggccaacatggtgaaaccttgtctctactaaaaatacaaaagtagccgggcgtggtggcgcacgcccgtagtcccagctactcaggaggctgaggcaggagaatcacttgaacccgtgaaacggaagttgcggtgagccgagatcacgccactgtactccagcctggtgacagagtgagactccatctcaaaaaaaagagaaagaaagaaatagacattgaacacctgctacacagcagggattgtgctagaagtatggatgcaaagattaggtgaatatgttccctagcctcacaaagcatacagtctagtaggagagacagacacgtaaaaagtttcaacagcacagataatcagggctacaccagaattgggcccaagatgctgcaggaatctataggtgaatgggtttcatgaaggaagagcttcttctcccatttataactcattttagcctaatcttccaaacagtcacgcatctaagagcaggtgatgcagaaaataccctcgtgttagttatgaattaccgttggaatccttccagtgtttgcacctgccctgtgctcgggtaacataaaacagtgatataatttgatgtctacttcctcttgtatttgtctgtttttaagtgttctacaattttcatatactctgtttcatcgttctcaaaggaatattttgattgataaatgtttagttagtaagacctaaaaactgaatctcagtagtttgagcttatgatatacaagatgcagctctaacatttaaattggaagggaaatgtcaaaaagatacctgcactcttgtttgttgcaacactgtttacaatagctaagatttggaagcaacctaagtgtccatcaccagacaaatagataaaggaaatgtgatatatatacacaatggagtactattcagccataaaaaagaatgagatcctgtcatttacaacaacatgggtggaactggagatcattatgttaagtgaaataatccaggcacagaaagacaaacttcacatgttctcacttatttgtgggctctaaaaatcaaatcacttgaactcagagagattagaaggatggttaccagaggctgggaagggtggtgaggggttgggggcagtgaagatggttaacaggtacaaaaaactagaaagaatgaataagacccactaggttttttgttgttttgttgttgttgttgttttgagacagagtctcactctgtcacccaggctggagtgcagtggcatgatctcggctcactgcaacctccacctcctgggttcaagcgatcctcctgcctcagcctcccaaatagctgggattatgggcacgcgccaccacacctggctaatgtttgtatttttagtagggaccgggtttcaccaggttgaacaggctggtctcaaactcctgacctcaagtgatccactcgccttggcctcccaaatgctcagattacaggcgtgagccaccgcacctggccactgtttgatagcataatagggcgactatagtcaataataacttaatggtatatttttaaataacttaaagagtataattggattgttgtaactgaaaggatcaatgcttgagggcacagctaccccattccccatgacgtgtttagttcacattacatgcctatgtcaaagcatctcatgtaccccataaatatatacactgagtatataccacaaatattttaaataatttttaaaataaaaaaataaattgtaagggaaagaaaattatgaatttagaaatgtaaaaggtctcaggtaaggaaggaatgagaggatcatgcagaacctcccatcattgctgggactggaacagaagccctaccttttcccaacaccctatccacctgtccctcacctctcagcttttgtgagactctgtctgtgctatgaaactgaagatctaattcagtgctgtttgcattgtcttgcctcctggaccagaggttgcagttgttgagaaaagggatggttggttatgccttgatcccccccagagcatttggggcataggacacgggaactggccagcctggttcactcttctcgattagctggacagcggcatgtcatgtgggtaataggaaggggtggggacttccccgggatattctgctcctgatcagaagcgccagtgatgtggggggagccccagcaccagagcatgctgggagggcgtgcagggtggggcaggtgcccgtttggcctctgctgtctatctgggggatgcatccaaaggcaactgttccttatctgctcttgttgggagcaaggaagggccaatttgttcaatgatccgtatacagccagtccctctggccagagttcaagacagtattgcctcactctatatagagattgtatcttggttagctcttcattcatagcaagaccaatgtttctgtaaattaatcctggtattgtttaaaagcaactaaaaatgatgaaattgtaaaactttgaaactccctgaatgtaacgacaagcaaactaacattgttttattggtcgatgctcctggccagaagagagaatattagcagggataaaaggcataggccacatgcattttccaccccagtgctgagaacacgatgggcgaaaaagggaggtggccacagcccatccatcacacagtctctgcccatctacttgctttttccttttttttttttttttttttgtgacagagtctcgctttgtcacccagactggagggcagtggtgcaatctcagctcattgcaacttctacctcccaggttcaagcgattctcctgcctcagcctcccgagtagctgggattacaggcacctgccaccaagcccagctaatttgtttgtatttttagtagagacggggtttcaccatgttggccaggctggttttgaactcctgaccttaagtgatcagcccacctcagcctcccaaagtgctgggattacaggtgcgagccaccacgcctggccccagctacctgttttctttctttcttttttttttttttctttttttgagacaaagtcttgctcttgtcccccaggctggagtgcaattgcatgatctcagctcactgcaacctccacctcctgggttcaagcgattctcttgcctcagtctcctgagtagctgggattacaggcgcctaccaccacgcccggctaatttttgtatttttagtagagacggggtttcaccctgttggccaggctggtttcgaactcctgaccttaagtgatctgcccgcctcagcctcccaaagtgctgggattacaggtgtgagccaccatgcccggccccagctacttgctttctattgggatgaacctcatggttaatacagttagttagtgactgcaacttttgaactttttgttcatagtgaaaaatattttaagtaatgcttaccccattatgtttcttgtcatttgaaaaaaaatctcccttcagacagaatgcagaataaaatactacagaaaatctgtacagagtcccagcctgacttatgctagtaggttacagagaaagaaagtcttctaaaccctatgaaaggttaacagttctcttatttttccctgtgtgctatttgatgatttccctgtgaactttgatgatttattgccagaattccaaacataatatgtgaatttcacaaaaatggatgaaatgtatctatttttcattggtagaagaagccaaaacatcccttcctcaccgcactaaaagctgttgtttacatgaagcaaacctcaaatgtgaacatatttttacgcaaatgcatttaatgggtgaatatttgctttgggacggtattctttactctatctggagagtctggcgttccgtaatcaccatgtgatgacggctgccctgacagtggctggtagcagcacatacccccgagcctctccgtggtgtgcgccgtgggcaccatgtgaccattttcagaaaggaagacagttctggaagctaaaggtcacctagtcagcctcgttgggtgattgatgactcagctgggttcagggaggtggacccgaggcagagcctctagaaggcagcggtgggcagggcggttcaggcaggtggcacctgggcaaaggtgcagacgtggaatcctgaaagcaattctcagcgctgctgcgtttccaggaggtagaagaacagtgacaagtgcacagtcgggtagggacaaatgtggaagggctgggaacagtgtgttcaggagactgggcttcaatctggaggtctcaggaagtggtttaggatgtttcagcgagagcatgatacagactaacccaggaagaaccgctgctttgtcacttatacccctatggaaatgccgttcgctttgctagttgaaatagcctaccattgtctgggactcacccagttagatttgtttggactccacaaagtattcttgaccatacaatcatggtcgaggaccccctacatgagctgccttcatggctacagggagagcacaccaaagtggatgtcacacccagcacacatgccaccggcttggccctgcgccccgcagcctgagccacactggctgcctgttcctggaatgtgccaacatgtttcagtcctggagcctttgcacttggtgttctcttcgctggaacattctcccccaagacatttacacagcttgccccctcattccctgaggttatctcctgccccctaatcagtgaggccttccctggcctcaccccggacactccacacgtgcattcatttcgttgttcaccatctgtgtcccagttacaagggaggctccctgagagcagggatctgatttttgttagttgttgttgttgctgttttgaggtggagtcttgctttgtcgcccaggctggtgtgcagtggtgcgacctcagctcaccgcaacctccgcctcccatgttcaagcggttctcctgcctcaacctcctgagtagctgggattacaggtgcctgccaccatgcccagctaatttttgtatttttagtagagacagagtttcatcatgttggtcaagctgccctccaactcctgacctcgtgatctgcccacctgggcctcccaaagtgctgggattacaggcatgagccactgcacccgaccctgttttttgtttggttttggttttggtttggttttggtttttttttgagacacggtctcactctgtcgccccggctagagtgtggtggcaccatctcggctcactgcaacctccacctcccaggttcaagtgattctcctgcctcagcctcctgagtagctgggattacaggcacatgccaccacgcccagctaatttttgtatttttagtagagatggggttttgccatgttggccagtctggtctcaaactcctgacctcaagtgatccgcccgcctcggcctcccaaagtgctgggattacaggtgtgagccaccgtgcccggcccagggatctgtttttgtctccgctgtgtccccagcacctcaaacatattgtacggagctgcgacagctgcgcagtcagtgatgactgagagattcctggccccgtgggctatggctccttcaacagtttgttgtttaaaggttcttcactttctcagcgtgctgatcaagagacaagcctggaggagaggctcagtggtgctcctgtgtagatgatgaattcaggtgtatcttggatggtaaatgacgttgcatttaaaaccaagcaagtggccaggcgcagtggctcacacctgtgatcaaagcactttagaaggccgaggcgggcggatcacctgaagtcaggagtttgagaccagcctggccagcatggtaaaaacccgtctctactaataatacaaaaaaactagctgggcgtggtggcgggcacctgtaatcccaaccactcagaaggctgaggcaggagaattgcttgaacccgggaggtggaggttgcagtgagctgagatcgcaccactgtactccagcctgggcgacaagagcaagactctatctcaaaaataaaaaaaatttaaaattaaaatttaaaattaaaacaaacagccggacgcagtggctcactcctgtaatcgcagcactttgcgaggctgaggcgagcggaatacgagctcaggagatcgagaccaccctggctaacacagtgaaacccgtctctactaaaaaaaaaaaaatacaaaaaattagccaggcgtggtggcaggcgcctgtagtcccagctactcaggagactgaggcaggagaatggtgtgaacccgggaggcggagcttgcagtgagccgagatcgtgcccctgcactccagcctgggcaacagactgagactctgtctcaaaaaaaaaaaaaaaaaaaaaaaaagaataaataaataaataataaaaaataaaaacaaacaagtgaacgttgttatacgtcagtcttaccaattgttcctctttcctcccagtagcttggagctcggcggcacaaccagcaccatctggtcgcgatggtggacacggaaagcccactctgccccctctccccactcgaggccggcgatctagagagcccgttatctgaagagttcctgcaagaaatgggaaacatccaagagatttcgcaatccatcggcgaggatagttctggaagctttggctttacggaataccagtatttaggaagctgtcctggctcagatggctcggtcatcacgggtaagtgtgccgtttcctagaaagttttatttagaaatgtttcttcctccaagaaaactgttctctcttttttttttttttttttttttgagacggagtctcgctctgtcgcccaggctggagtgcaatggctcgatctcggctcactgcaggctccacctcctgggttcacaccattctcctgcctcagcctcccgagtagctgggactacaggtgcccgccaccacgcccagctaatttttgtatttttaatagagacggggtttcactgtgttagccaggatggtctccatctcctgacctcatgatctgcccgcctcggcctcctaaagtgctgggattataggcgtgagccaccgcgcccggccgaaaactgttctctttagctggaaaagaagtcacacttttttgcaaagaaagcttcagacgtggtaaagcatgacctccagtgcccctgggccctggaaggcgcgtgtcacggctcacggtgccccctcttgtgaaagccatgcacacatcaaacagtgcttgagattcagtcacggggaacagctaaagtacacagaccctaaccccagcaagcccgcggggggcagctagacatttttaagaggagacgtgtgcaagggtctgcatagaggtactgttggtaagagggaaggatgggaaacaagctgtacatgcgtcaaagggaaacagataaattgggatgcatttatacagtggtatatacttcatagcaatttaaaagaacagactaggctaggcgcggtggctcacgcctataatcccagcactttggaaggccgaggcaagtggatcacttgaggtcaggagcttgagaccagcctgaccaacatggtgaggccccatctatacaaaaaaaatttaaaattaaaaaaaattagccaggcatggtggtgcatgcatgtggtcctagctactcaggatgctgagggaggaggaccacttgagcccaggagctcgaggctgccatgagctatgactgccactgcactccagcctgggtgacagtgagaccctgtctttaaaaaaaattttttttaagcaacattgaatgaaaataaacaagcttaatgaatatttttatgatccaattaatgtaaaatcttttattttttattttttgagacagagttttgctcttgttgcccaggctggagtgcagtggtatgatctcagcccactacaacgtccatcttccgagctcaagcagttctcctgcctcagcctccctagtagctaggattacaggcacccgtcaccatgccgggctaatttttgtatttttagtagagatggggtttcaccgtgttggccaggctggtctcaaactcctgacgtcaggtggtccgcctgcctcagcctcccaaagtgcagggatcacaggcatgagccactgcacccggcccaattaaaatctttaacactaaacaatctagtacatcactggtggaaacagacatacacctattgcaaagggcatctcagctttaaggactcagtcacctcctgagcaagatggagggagaactggggaggggtcccatggggactgtaattctctctaggttgtatatttttaaaagacttcagcagtgtgataaacctgggtggtgtgtacatgggtattacagtcatgttgcttaatgacagggacaggttgtgagaaatgcatccttaggtgatttcatcattgtgtgaaagtcatagagtacacttaaacccagatggtagagcctgctgcacaccgaggctctgcggtgcagcctgttgctccaaggcacgcacctgtacagcgtgttactgtactgaacggcgtaggcccctgtgacacaatggtaagtatttgtgcgtctaaacataccaaaacatatagtagaaaaggttacagcaaaaatacagtattatcatcttatgggaccatgataccacagttgaacttatggtctattgttgaccaaaatgtcactgtgcagtgtgtgactatacagaaataagctcagagaaattaagtaacttggctgggcgcagtggctcacgcctgtaatcccaacactttgggaggctgaggcaggcggatcacccgaggtcaggagttcaagaccagtctggccaacatggcaaaaccccatctctactaaagaatacaaaacattagctgggagtggtggcaggtgcctgtaatcccagctactctactcaggaggctgaggcagggagaattgcttgaacccaggaggcagaggttgcagtgagcagagatcatgccactgtactctagcttgggcgacagggtgagactccatctcaaaaaaaagttggggcgtggtggctcatgcctgtaatcccagcactttgggaggctgaggcgggcggatcacttgaggtcaggagttaaagaccagcctggtcaacatggtgaaaccccatctctactgaaaatacaaaaattagccaagcatggtggtacacacctgtaatgcctgggcaacagagcaagattccgtctcaaaaaaaaaaaaaaaaaaagtaagtaacctgccacggttcatacagccagaaagacacagagccgggcctggaccccgcctctcagcttgctctagagggctattctctgcatgctggcatgatcgcgccttgtaaaaggtggcagtgttctcagcttagtcaatcaggaattgcaagaggcaagtgagcccctgaggactctggggggcctttgtgaccgagcagctttgggagtgaccctgacagacctttacaggtggtgcaagttttgactccctttctcctggcgcgttaagcagaggataagcgctgtggaaggagtgaaggtgtagggagatcatggcccccagagcagtggggaaggggacagggaggctggaggagagcaaggaaaaggctccgtgtcaggtggcgccttgagtggcctgggtaggttgtcttgcagtgaacccgggttaatggccttgacaatgaccgcattgtttcctgagcactgcaggctgcccacacacctcacacctcggcttgcctaagcccagagcagccttgtgaggtcgttgttatgtttatttaaggaaggaggaaaggaggcaggtcccaggacatcctgacgtgctggagatcaccagcccagaacccagctcttaaccccacaatgtgggacctttcttcacccatcacagacacaccccatgctggttcaccgttttcctataatgactatttgtgctatttattagaaaaatcttttccttatggatttgaaaagatttatcttgcttttgtttttcttttttgcctttcttttttaaggcaggcaggctcccgcagccccacccccagggtgaaaaatatagttcattgtctagtaaaagagttcagagatacacttttttctttgggtaagatatactctagagcttgttctgaaatatggaatttgtgtgagctgcgggagtgggtgggtgtgtggctctagctctggaaagttctttcctggcagtggccaggagggctgcccagccccctcctgcctcctctggcagcttaaacacaggaccccttattctgtgctctctcctgacccctggtcctcatgcaggagggaaccctgctcttctagggtccttttctaaaagtagtgtcttttaggtcattgtcaagaactataatctaaaatgtatttttaactcatctggaaattctgacagaggtaaggcttgagaatttcctgcatactagccttgtggtctatataatccattaaaagccacatttaacccagttccacagactgaactgtgcttcccatctaaataaattaaaagcaggccgggcacggtggtcacgtgtgtaatcccagcactttgggaggtcgaggcgggtggatcacctgaggtcaggagttcgagaccaacctggccaacatggtggaacctcatctctactaaaaataaaaaaaattagctgggcgtggaggcgtgcacctcttaagcttaaggacatatttcttatgatccaattaatgtaaaatattttattttttatttattttttgagacagagtttcactcttgctgcccaggctggagtgcaatggtgcgatctcggcctgtcatcccggctactcaggaggctgaggcaggacagtcgcttgaatccagcaggcggaggttgcagtgagccaagatcacaccactgcactccagcctgggcaacagagtgagactctgtctttaaataaataaataaataaatagcgagggttcagggcaggagaaaaagggttccaaatttgttctgaaccaattccaaggaactttatggcacaaagaaaaaaaaggggaacttacaaaaagtgaccacactgaagcgtcctggtcacccatccctggttttgaccaccagcctttaaagtggcaagcgggtgataacccatttcttatttccccctcagcatttcctcactgttattcatacatgtggtcatttgtactcatctcacaattgttaaaacctctttcctcccttccaggttttactgaactgttactgcgaagtctgagagatgaggtcatttaagattatttcttatttgtaaattagatcgttcatatttgtacctaatctgatcttttgggtaatattcctagttatgtagactggtctctcagaagagccggatattaaatgcagtactttaaactttacacccaggagaccggatgggtgaggctggttcactcggccaaagtaccattttatctctgctttttcttcccggctttattgccataattgacatacaataaactgcatgtatttaaagtgtacaatctgttgggtgtacacacacacgcatctgtgaaaccatcatcacactcaaaatagtgatgtagaaattttgctccttagttcgactaaatctgggttcttgtgtcatgaccaggaaaaattaggcacgtggacacgttgaagggtgaggagagcagtattgggcgaaaaggaaaaaagaaaaaaactctcagcaaagctagaggggatcctgccaatgagttcccagctcacagactgattagcaggccaccacacatgagctggaggccaggctcctcccgctgcgcaaggtgagaacttcccgtggctccaccccattctcccaatgcccaggtgggtccccgtcccttgcgggcctgtccagacaagggaaccctgggcaggttccctcatctacacaaaagcacctgaggtaaacacttgtggggcaggttgcagattctctggggacgccccccttctctgcctcctgcatctatcagtagtgcctctgtctgtcacccctaaagtttacttgtgctgtttctaattcctctttccccagccccgtgcctccctgcctccctcccccagtaaaccatgaatccactttctatcattctaggttgctttatatttcctagaattttatataaatggaatcatacagcacgtactctttctaggctggcttctttcactctgcagaatggctgtgagactcatctgcattgcagcaagcatcaatagttcattcttcatccatcatgtggacatagcacagtttgctgattcacgcacctgttgatgagcatttaggttgtttctagcttatggctattacaaataaagctgctatgaacattcacgtacaagtctctgtacaaccctctgctttcatttcttttgaataaatacctaggagtatgacggctggaacagatggcaggtgtttgtgtaactttttaagaaactgccaaaatcttttccagcatttcagaaaaatcttagaaaatgctatactatgttatattcccactggcagtatatgggggagttccagttcctccataccctcatcaacatgaggcatgatcagtctttttaattttaaccatgtcagtaggtgtgtgatggtctctcactgtggtgatttttatttgcacttccctggtgattttgagcatcttttcgtatgcttatttgccatatatcttctttggtgatatttctgttcaaagcctttgctcattttttaattgagttgcttttctactattcactattgaacactatttatatattttgaatacaaatactttatcagacatgtgatctacaaatattttccccagtgtgtggtttgtctttcttttctttctactgatagtatcttaaaaaaaaaaaagaaaaaagattgttttgtttgttttgttttgtttttgagatagggtctcaatctattgcccaggctagagtgcagtggtgcgatcatggcttactgcagccttgacctcttgggctcaggaaaccctccgacctcagcctcccaagtagctgggaccacaggtgtgtaccaccatgcttggctaattttttttttttagatacagagactcgttatgttgccaggggtggtcttgaactcctggactcaagcgaccctcccacttcggcctcccaaagtgctgggattacaggtgtgagccatcatgcccgaccagttcttaattttgatgaagtccaatttatcaatgtcctttttttatggatacttcatttatttatttatttgagagagggtctcaccctgagcccaggctggagttcagtggcatgatctcagctcactgcagcctcaacctcccaggcccaggtaatcctcctacttcagcctcccaagtagctgagactacaggtacctgccaccatgcccgggtaagttttttgtatttatttgtagagacggggtttcgccatgttgcccaggttggtctcaaactcctgggctcaagtgatctgcccatctcagcctcccaaagtgttgggattacaggcgtgagccaccatgcccagccatatatatatatatatatatatatatatatatattttttttttttttttttttttttttttttttgagacagagtctcactctgttgcccaggctggagtgcagtggtgcaatcttagctcactgcaacctccttctctgaggttcaagtaattctcatgcctcagcctctttagtagctgggattacaggcatgtgctaccaggcccggctaattaccagccttatatttttgaactctgtttaaaacatttaggtgcataaacattcaggcttgttatattctgttgatgaactgaaccttttattattatgaaattgctgttgtaatccgtggtaaaattatttgttctgaacactactttgtctgttattgatgtagccactgcagctttcttttgattggtgttaacatggtatatcttttcccattctttttcttttaactggtttgtgtctttatactatggtttgatttaaatctattatctcacaatttgttctctttggtacatctttgttttgttcccttttcctctttttatgccttctgttgaattaattgagtcttttttgttttgtttcatttaattttgttttttgagacggagtctctctctgtctccaggctggagtgcaatggcgctatctcggctcactgcaacctctgcctcctgggttcaagcaattctcctgcctcatcctcctgagtagctaggatcagaggcatgcaccaccacgcccggctaatttgtgtgtgtgtgtgtgtgtgtatttttactagagacgggtttcactatgttggtcaggctggtctcaaactcgtgaccttgtgatctgcctgccttggcctcccaaaatgctgggattataggcgtgagccaccgcacccagcctaattgagtcatttttaagattccactttatctcctttgttggcttattatttataacaccttctggtgttattttagtagttgctttagggtttatagtgtatctctctaatgtctcccagtctaccttccagtggtatcattctatcttacagatattataagaactttatgacagtatactttcatttttcccttcatgcatttgtggtaatgtttcacataattttatttatttacctacattataaatattacaatatgttattgttttacatagacagccggttatctttttaagatagtagtaagaaaaattttttacatttacccacataattaccttttctagtgctatatacctttgtataaatccagatttccatctgctatcattttccttctgcctgaaagacttcctgtgatattatctataatatggctctactggtaacgaattactagcttttgtatgtctgaaaaagtcttcatataaccttcattctagaaagtatgtgattcaaagggccgggcacagtggttcacgcctgtaatccgagcactttgggaggccgaggcgggtggatcacctgaggtcaggagttcaagaccagcctgaccaataaggtgaaaccctgtctttactaaaaatacaaaaattagctgggcatggtggctcatgcctatagtccctgctacttgggaggctgagacaggagaattgcttgaacccaggaggcagaggttgcagtgagccaagatcacgccactgcacaccagcctgggtgacagagcaagactccatccccctgcaaaaaaaaagaaaaagaaaaagaaaaaagtatgtgattctacattggcaattttttttttttttttttttttgagacagagtctcgctctatcacccaggctggagggcggtggtgccatcttggctcactgcacgctccgcctcccaggttcacaccattctcctgccccagcctcccaagtagctgagattacaggcacccaccaccacacccggctaatttttttgtattttttagtagagatggggtttcaccatgttagccaggatggtctcaatctcctgacctcatgatccgcccacctcggcctcccaaagtgctgggattacaggcatgagccaccgagcctggccactttttttctttaaatgcttttaagatgttcctactatcttcttgtttttaattaattaatttattattattattattattattattattattattattttttttttttttttttttttttttaaagacagggtcttgcgctgatgccgaggctggagtgtgctagtgccatcgtagctcactgcagtctcaaacacctggtctcaagcaatcgtcctgcctcagcctcctgaggaactaggactagaggtatatactaccatgcccagccaattttaaaaattttttgtagaggtggagactcgctatgttgaccaggctcctctcgaactcctggcctcaagcaatcctcctacctctgcctcccgaagtgttgggattacagggattacaagtgtgagccactgtgccagtccccactgtcttctggcttgcatcgtttctaaaagaaacttggtgtcatccttatttttgtttctctacatgttatatgtcctctttatctggttgctttaactttatttattaattttagtttaatttttaattgacaaataataattgtatttttatggggcacaatgtgatgttttggtctatgtttacattgtggaatgtgtaaatcaagctagtgaacatatccaccacctcacacacttaccattttttgtgtgtggtgagaacatgtaaaggctgctccttgaggccaggcccaatcccagcactttgggaggccgaggcgagtggatcacttgaggtcaggagttcaagactagcctggccaacatggtgaaaccccgtccctactaaaaacacaaaaatcagccaggcgcggtggtacacgcctatagtcctagctacttgggaggctgaggcaggagaatcacttgaacccaagaggcagaggctgcagtgagccaaggtcatgctactgcactccagcctgggcaacagagcaagactccatctcaaaaaaaaaaaaaaaagtctattccttgagcaattttgaaatacacaatacatcattgttaattatggtcaccatagtgggtagtagatcactaaatcttattcttcctgtctaactaaaacttttttccttttgaccaacatctccccattccctccctcaacctcagcccctgataaccaccattccactctctactgctatgagtttgacctttttagatttcacatatgagatcacatggtatttgtctttctgtgcctggcttcttttacttagcataataccttccagatttacccatgttgttgcaaatggaatttccttcttttttaaggctgaatagtattcgtgtgtgtgtgtgtgcgcgtgtgtgtgtgtgtgtatcacattttctttatctcttcattcattaatgatcatttaggatgattccacatcaggctactgtgtatagtgctgcagtaaacatggaagtgtagacatctcttcagcatactgcttccaatctctttggatataaacccagaagtgggattgctggatcatatgtagtgctatttttgtttttttgaggaacctccatacttattttgcataatgctattctaattcacaatactaccaacagtggacatgggttcttttttctctacgtgcttgccaaccacttgttatcttttatctttttatatatctggctgcttctaaatttttttctttcttaccaattctgaaccatctgatggtttcttcctttatgctccttgtgcttgaggttcattgagcatctgggatcagtgcacttattgttttcatcaaattcagaagattaggccattatttcttcaaacttttttgtcgttctctgtctacctttgagagctccaattatacatacattaggccacttgaagttgtcatacagttcactaatgctaagttctttttttaagtcttgtttctgtgtttcattttggacactttctattgctacatcttcaaatttactaattttttcttctgcaatatctaatctgctcctaatcctatccagtgtattttccatattagatattgtagttttcataactagaagcatgatttggttctgttttcacccatgtatctatataacatgtccagtctttcactcagcttcttaaacatttagaatatggtcagaataactttttttgctgttttgttttagagacagggtctcactttgttactcaggctggagcgcagtggcatgatcacagctcactgcagccccaacctcctcgtctcaaggaatcctcccacctcagcctcctatgtagctgggaccacaggtacacaccaccacacctggctaatttttaaattttttgaagagacgggtctcactttgttgcccagactggtctcaaactcctgggttcaaacaatcctccagccttggcctcccaacgtgttgggattacaggcatgagccactgtacccagcccagaataactttttaaaaatgtcttgaggccgaggttgggaaataatctgaggtcgggagttcgagaccagcctgaccaacatggagaaaccccgtctctacaaaaaatacaaaattagccaggcacagtggcacatgcctgtaatcccagctacttgggaggctgaggcaggagaattgcttgaacccgggaggcagaggttgtggtgagccgagatcacaccattggactccagcctgggcaacaagagcgaaactccatctcaaaaaaaaaaaaaaaaaaaactcttagccacaatttctatcatctgtgtcacttctgagtccctttctattcagttatttttccccctgtcatgggtcatatttttctgattcttcatgtgtcctgtaattttcttttctttttttttttggagatggagtcttactctctcacccaggctgtagtgcgatggcacaatcttggctcactgcaacctccacctcctgggttcaagtgattctcctgcctcagcctcccaggtagctgggattacaggtgctcaccaccatgcccagataattttttgtatttttagcagagacggggtttcaccatgatggccaagctggttttgaactcttgacctcaagtgatccgcccacctcggcctcccaaagtgctaggattacaggcatgagccaccgtgcctggccagttgttctcattggatgtcatatgttgggaactttattgggtgatggatatttttgatttcctataaatattcttgaactttgttctgggatgcaattaagttacttggaaaatctttgatcctttcaggtcctgtttctcagcttcattagatgggactatcacagtgtttgttttagagataactttgccccactgctgaggcaaaaccactttgagcttcacctgatgccccatgacttcagtgatcttccactgtgggaggcgagagcaggactatatccagctccatgtgggccccaggcagcgttcactatcatcatttcaggttgctactgaagtatccctttttcaggctctcagctggcagagcaaatacatatatgtatacatactaacctatgtctatacaggaatctatcggtatttctgtctgtggccatctgtagctgtatgaagccaaacatgagtgtgtgctgatgtctccagccctcatctgttaccagatggatcgttctagcctcctccacttgcctacctgtcaattcaccattccttgagttcatggttcattttcagtatacctgcacagtggtatcagaactgttaacccacaccctgtgggaaaaaaactccatcagctagagcacagtgtttacagccagatccttttgcctttagtcttacagattccaatcattccaaattattcggtgcagcgcctttccgcacctgcgcccactttttcccctgagattgtttcctacattcgtagcacagttagattgttttgttacattctgcatttcaccctgggatcctccaacctcctaagttatttttgttttatttgcacacattaggttcaatctgaactataaagttctgtgggttttcacaaatgcgtagtgtcatgtatccaccactacattttccttctctctctttcttgctttctcgccttcttgtctcgctctgtcacccaggctggagtgcagtggcacaatctcggctcactacaacctccgtctcctgggttcaagccattctgctgcctcagcttcccgagtagctgggactacaggcacgcaccaccacccctggctaactttttgtatttttacaaaatacaaaagacgatgtttcactatgtgggccaggctggtctcgaactcctgaccttgtgatccacctacctcggcctcccaaagtgttgggattacaggcgtgagccaccacacccggtctctctccttcctttcctttcctctcctttccttttctttctttctctttccctctcctctcttctcctctcctctcctttgatggaggtctcactgtgacacccaggctggagtacagtggcagcataatctcagctcactgtagcctcagcctcccagggctcaggtgatcctcccacctcagcctcccaagtagctgggattacaggtgcacaccgctgagcccagcaaatttttgtattttttgtaaagatagggtttcaccatgttgcccaggctggtctcaaactcctgagctcaagttatctgccagcctcggcctcccaaagtgctgggatgacaggcatgagctaccgtgcccagaccactgttagattttcatatgaatagtttcaccacatcaaaaaaccccatgcttcacctattcaaccctgcctctcccacccccagccagctcagaaatggttctttttaccattgctataattttgccttttccagaacgccatgaatttgaaatcatatagtatgtagccttttcagactgacttctttcatagcaatatgcatttaagagtcatccatgtctttccatggcttgatatctcatttctttttacactgaatgagttcccactgtctgtttgtaccacagtttgtatatctattcacctatctaagggcatcttggttgcttccaatttttggcaattaataaagctggccatgcacagtggctcacacctgtaatcccagcattttgggaggccaaggcgggcagatcacttgaggtcaggagtttgagaccagcctggccaacatggtgaaacgctgtctctactaaaaatacaaaaattagccgggcgtggtaatgggcacctgtaatcccagctacttggaaggctgaggcaggagaatcacttgaacctggaggcagaggttgcagtgagctgagatcgtgccactccactccagcctgggtgacagagtgagactctgtcccaaaaagaaaaagaataaactgctgtatacatgtgtaggttttgtgtggacagaagttttcaaatcagttggacaaatacctaagagtgtgattccatcatacagtaaaactgctttgctttgtcagaaactgccagaatgtcctccaagggggctgtctcatgttgcattcccaccagcaatgaatgggggttcctgttgctccacatcctcaccagatttgatgatgtcagttttgtggattttagtcatcctagtaggtgtgtggtgacaccacattgttgttctcattctcagtgccccgatgacatatcatgctgagcattgtttcatatgcttacttgccatctgtatatcgtccttgctgaagtgactgttcagatgttcagatcttttgcccattttctttctttttttttttttttttccttttgatacggagtcttgctctgtcgccaggctggagtgcagtggcacaatctcagctcactacaacctttgcctcccgggtccaagcgattcccctgcctcagcctcccaagtagctgggactacaggcacgcaccaccatggcaagctaactttttcttttttttttcttttcttttttttttgagatgaagtctcgctctgtcacccaggctggagtgcattggtgcgatcttggctcactgcaagctccgcctcctgggttcacgccattctcctgcctcagcctcccgagtagctgggactacaggcgcccccaccacgcccggctaatttttttgtgtttttagtagagacggagtttcaccgtgttagccaggatggtcttgatgtcctgacctcgtgatccgcttgctccggcctcccaaagtgctgggattacaggcgtgagccaccacgcctagcccccatttttcaattgagttgtttgttttaagacctctttgtatattaccacatgtgtattgaaaatattttctcccagtctgtggcttgtctttaattttcttagcaatgtcttttgcagagcagaaggtttcattagctttcatagattccaacttatattttctctttcatggattgtgcatttggtgttgcccacacagatttttatactgtattctggtgccatttactgagttaacaattgcggaagaactggaagaaaggaagcaaacaaaacgagttctgcgtggcactgtcagtgcgggggcatggggagtcctgcagggtgaggtatgggcggtatggcaaggcgcgggcccatagatgtgcaggtctggagatgtgtgcagcggagatgtgcgggcccgagatgtgcgggtccgatgtgtgggtccggagatgtgcgcgtacccagaggtgcagatcggaaatgtgggggtccggaggaaatgtgcggatcaggagaagtgccagtcccgagatgtgcggatcggagatgtggagggctaggagatgcgtgggtccggagatgcgcagatcaggagatgggcgaatcggagatgcgcgggtccggaaatgtgcagagcggagatgtgtggatcaggagatgttggggggtcaggagatgcgggggtccagagatgtgggggtccggagatgtgcgggtctggagatgtgcagagcagagcaaagatgagctgatcggagatgcccaggtccggggatccacgggtccggagacgcgcgggtccggagatgcgtgggtccagagatgtgcgggtccaaagatgtgcaaatctgaagatgtgtggatgggagatgtgcaggtccggagatgcgcggggcggagatgtgtggatcggagatgctcagatcgaagatgtgggaatgaggagatgtgcggggcgggatgtgtggatgggagacgcgcgggcccggagatatgcggggcggagatgtgcgggtccagggatgtgtgatctgaggtgtgtgggtccggagctcggggtcagctcagcagcagtgagagcgagcatgctggctttgggagcacagcacaatggcagctgtaggagtgcaagagggtgtgacccagaggcagggcccggccccgcatgggtgttctgaggtttatgcctcagcactagaagcctcgtatgcgaaatcacatcctcatagacccggttcagacacaggatagtgatgcctggactattcatccgtctctcctctttttccccagacacgctttcaccagcttcgagcccctcctcggtgacttatcctgtggtccccggcagcgtggacgagtctcccagtggagcattgaacatcgaatgtagaatctgcggggacaaggcctcaggctatcattacggagtccacgcgtgtgaaggctgcaaggtagaggggagctggaacagggcctggtggccgccaccatcaactacttatggtcacttttatagcaaatggcagtcattactgagagattgcagaaagtcccggataagaaactgacttcaggccaggcgcggtatctcatgcctataattccagcactttgggagaccgagatgggtggatcacctgagatcaggagttcgataccagcctggccaacatgatgaaaccctgtctctactaaaaataccaaaaaaaattagccaggcgtggtggtgggcgcctgtaagcccagctactcgagaggcaaagacaggagaattgcttgaacccaggagccagaggttgcagtgagccaagattgcgccactgcactccagcctgggcaacaagagtgagactccatcttaaaaaaaaaagaaagaaaaaaagaaaaagaaaaagaaactgacctcagtgatagattagcctctctttatagcacagaacccctgagagcgtaagccctgttgtgaactgcgtatttgaggaatctagcttgtacgccccttatgagaatctaatacttgatgttccaaggtggaacactttcatcctgaaactatccctccccacccccatctgtggaaaaattgtcttccatgaaaccggtccctggtggcaaaaaggttggggattgctgctttagagagtctaggacaaatggttcctctgtgctttgtaaatacttagagaagtgcattctttaaaagaaaataagtcacattggaccgggtgcagtggctcacgcctataatctcagcactttgggaggccgaggcggctggatcacctgaggtcaggagttcaagaccagcctggccaacatggtgaaaccctgtctctactaaaaatacaaaaattagccaggtgtggtggtgggtgcctgtaatcccagctacttgggaggctgaagcaggagaattgcttgaactcaggaggcggaggttgcagtgagctgagatcgagccatttcactccagcctaggcgacaagagtaaaacttcatctcaaaaaaaaaaaaaagagagaaaagaaaataagccacattaagaacatcacttcattcgaatacaagacagagagctgttaccgttgatctctggagcctccctgaaggccaggtggggcaggtgttctcatgctcctgccagggaaattggccatcagagacacagagtatcttgcttagggtcccacagcccccagcagcagggactggaaccagagactggctgctcctgctccccagcagttccttcctgcacatcaggggcttctccacctgattcaagcgacaggaaccccctgtgcatcttcatcctcctgctggctcagcctgccctaaacagatgtgacctgggccaggagtgcatgaaggcaggccctgttgtcctgcatgccgccagctggactggtggcccttccgtgtttgtcagcgtggtgatgaggagagctcctgtagcagcgtccctttagggttgcacagacgtgctcaagtctggcgccttatgtacgtgatatgtgggagatcatcatctgaatgtttggtttgaatcagaaatcccttctcacggtgcacgctgcaggtgttcactaacttggaaaatgccaccgcctttctggcacaatgtaccatcttggaacaccagcattctgccctgagccaggcctggcctcagaggcctgggccacagggagaacctcacagccaggacactgtggcactctgctgtctagaagcctgtctccccacccttcccattctaaccccatgcgttcctcagcctccccactgtgcaagcctaggtaaggacattatgaagacgtcagcctgcctctcacattcccctgcacactgctgtccctctcccgcgggccaagcagacccactgtggcaaaaatatagaagaatgacttaaaagcaaagagaaaaaagaacccaaagcaaaaatgaactccttcgcatgttttctaaccatatacctttgaaaaagctccttataaagtggccttttccttagggccatgattaattattcatttagttttgttttttatggactatttagtaacattgtttcttgctgggtagagtttaagatgcttttacaaagcaagaaaattgtttacaaacagctggcttccttttattataatttttgtctttgagggagttaatatactcttacaaaaattcttagaaagtctttagtcacaaatatggaaatgtcacaatgctggggatagttacattcatatacattgtaacaaggctgagtaactctttggaaaactataattgtgttttcccaagtcagatgagggcattttgaaatgacttcgaatgctgcctcattttattgtttttcacattaaatgtaacgacatttaaagttctgtatttgtcctaatcattccagacttcttagaagaactatttctttcttttttttttttttttttttgagatggagtctcactctgtcgcgcaggctggagtgcagtggcacaatctcagctcactgcaacctccgcctcctgggttcaagtgattgtcctacctcagcctcctgagtagctgggactacagacttacatcaccatgcccggctaatttttgtatttttagtagagacagggttgcaccatgttggctaggctggtctcgaactcctgacctcaggtgatccacccgcctcagcctcctaaagtgctgggattacaggcatgatcaccatgcctggcctggaataacttttctctaaattttgttcatttaaaaagaaacaataaatgagcaacaaaaaaggtgagtaaagcaagtgcgctggtttctcagtggcccaggtctttaaatccactgtgtattaccctcacagggcttctttcggcgaacgattcgactcaagctggtgtatgacaagtgcgaccgcagctgcaagatccagaaaaagaacagaaacaaatgccagtattgtcgatttcacaagtgcctttctgtcgggatgtcacacaacggtaggtaaggtggccctgcacattttcccagttcgttcctcagttccccttccttgctccaagggaacagatcaagctatggatgaatgtgcttcaacatttcacacccaagtcattttgtaatcagagtggcctaagaaaataaaagtcgcccaggcgcggtggttcacgcctgtaatcccagcactttgggaggctgaggtgggtggatcacctcaggtcaggagtttgagaccagcctggccaatatggtgaaaccccgtctctactaagaatgcaaaaattagctgggtgtggtggcacatgcctgtagtcccagctactcgggaggctgaggcagaagaatcgcttgaacccgggaggcggaggttgcagtgagctgagattgcgccactgcactccagcctgggcgacagagggagattccgtctcacaaaaaaaaaaaaaagaaaaagaaagaaagaaagaaaataaaagtctcccaggtgcggtggttcacacctgtaatcccagcactttggaggccgaggcgggtggatcacttgaggtcaggagtttgagaccagcctggcgaacatggcaaaaccccgtctctaataaaaatacaaaaattagctgggcatggtagtgcacacctgtaatcccagctacttgggaggatgagacaggagaatagcttgaacccgggaggcggaggttgcagtgagctgagatcgcaccactgcactccagcctgggcgacagagtgcgactccgtctcaaaaaaaaagaaaaaaaaagaaaaagtctcaaatagctgagattcagtggtgcattggactcgctgttagaaacttcagtggtaagactttgatacagaatcgaaaaaccaagtggaaggcaccaaaatgacagaatgttcacctcgtccataggaagggtgtaccacctcaaacatctcaccacgttatgaatttccttctagccaatcatttaatagtttcagaacatgctaattgtgatgtgaatgtaagtcgttcataagagttgcatgtctaccttctggaaaaagaagcagttattatataaactcatcccgaagccccgttcacctccttcactcaaaggttgatgatgcacctgatagtggtgtgcaccctactaatgagacgaacgatggtgtcaccttcagcctgcacctgttaacgatggtgtcaccttcagcctgcacctgtttaaacatctacagtgtatggagtttgagtttttcatctctccatagtggaaagccgaatagtaatgaaggatgggtctgaactgcctgtgaattttcattcctggtttaaagtcctgggggagcccctcgtccagccctgtccgcgcagtcatgacctcactgctcatgcctgtgtttccccctccaaaccctagcgattcgttttggacgaatgccaagatctgagaaagcaaaactgaaagcagaaattcttacctgtgaacatgacatagaagattctgaaactgcagatctcaaatctctggccaagagaatctacgaggcctacttgaagaacttcaacatgaacaaggtcaaagcccgggtcatcctctcaggaaaggccagtaacaatccagtaggtgtttgcggctgttctgggttctcttggcaacatggaaccagtgtcgtagaggacgattaaggacacatgtgttgaatgttgagaaaattatatttatcccacagttaagcaaaggacagcgaagatggaaacagttcattctgagactctgagctgtagcttaacaacaactcctttcttcttgcttggagccacctcaaagctcttagcaactaagttattatactggctatgtaattaatacacttaaaaaaaaccttaatagcttaccaagtactaagatgatttcttaggagcattttttcttaaatagagataggttcttgctctgttgcccaggctggaatgcagtggtgcaatcatagttcactgcagccttgaactcctgggctcaagcaatcctcctgcctcagcctcccaaggagctgggactacaggtgtgcaccaccacacctggctatgtttgatgttgttgttgttttgttttgtttttgttttttggtagagatgagatgtttcccaggctggtctcaaactcctggcctcaagtgatcttcccacctcggcctcccaaagcactggcattacaggtgtgagtcatggcacccagcattaactggatttaaaaaaaaaaaaactgaccaggcaagatgggtcatgcctgtaatcctggcactctggggaggccaaggtgggcagattgcttgagtccaggagtttgataccagcctggccaacatggagaaaccccaactctactaaagatacaaaaattagctgagcagggtggcacacacctgtaattccagctactcgggtggcttaggcatgagaattgcttcaacccgggaggcagaggttacagcaagctgagatcatgccactgcactccagcctgggtgacagatcgagaccctatctcaaaaaaaaaatagaataataaaataaatccctactttgaggtgtattagtctgctataaagaaatccctgagacctggtaatttataaagaaaagaggtttaattggctcgtggcccacaaggctgtacaggaagcttctgcttctggggaggcctcagggaatttgactcatagcagaaggtgaagtgggagtaggcgtcttgcatggcaggagcaaaaacaagagacacacacttttcacccatcagatcttgtgagaacgctatcactagagtagcaccaagaggatggtgctaaaccattcatgaaggatcacccccatgatccagtccctcccgccaggcctcacctccaccactggggattacagttcaccatgagatttgggtggggacacagagccaaaccatatcataaggctagaaaaggaaaccacttacttcccactcaaaatgtgctcttggtcctttctcctaaaactactccctccctctcagacaaacatgcctacattctttttccgccttcagtgaaaagacagtgacatcttggggcttagaaagggccacttgtaagccaggcgtggtggctcacgcctgtcatcccagcactttgggaggccaagacaggcggatcacgaggtcaggagatcaagaccatcctggctaacatggtgaaacaccatctccactaaaaatacaaaaaattagccgggcgtggtggcgggcgcctgtagtctcagctacttgggaagctgaggcaggagaatggcgtgaacccaggaggcagagcttgcagtgagccgagatcgtgccactgcacttccagcctgggcgacaaagccagctgtgtctgggcgcggtggctcatgtctgtaatcccagcactttgggaggctgaggtgggtggatcacttgaggtcaggagtttgagaccaccctggccaacatggtgaaaccccatctctattaaaaatacaaaaaattagctgggcatggtagcggttgcctgtaatcccagctacttgggaggctgaggcaggagaattgcttgaacctgggagctggaggttgcagtgagctgagatcgcaccactgcactccagcttgggcaacagagtgagactctgtctcaaaaaaaaaaagaaaggaaaagaaaggaccacttgttatagaaagcctgtcttttaaggtagctctggaccttttcagaggcagccaaattgcccctcatggttcgtcccccacatccccgcctgcctggcctaagtcctccttccccctccccaacagttaaataagtctttgtctccattacaaaacaaatctcagagctaccttcaaagaagagccagccctcagttggtgaatgaagatactttgacattttcctatgagcatggtgaaacaggtttaatttgtattaaatagcttgaagcaatccttattgggaattacaaggtggaattttagtcacaggaaaataaagcatttcacaagctacttactttcatgaacaaaccaaacctcttctttactgagtcctttaattcttcagtgaattctccaattaaataggccgagacattttagaagtttccagcagacacccacactaggcagctccagaggcttgtcccaattagaactttcctggattacgagagtgaaagaaaaggtaacttttagcttcgagtctctatcctggatatgattagtacagcccaaaattgggatggctaaaacttttgtttgccagcttatatttctcccttggatttcagaattgaaagcaggctgggcacagtggctcacactgtaatcccagcactttgggaggctgaggcgggaggatcacttgaggcaatccaagagtttgagaccaggcaacacaaggagacctcgtctctacaaaaaatgattttttaaaaaactagctgggcatggtggcatgtgcctgtggtcccaggtacttgggaagctgagatgggaggatggcttgagcccaggagttcaaaaccaacctgggcaacatggcaagaccacatctctacaaaaaataaaaacattatccaggcatggtggcacatgcctatagtccccgcgacttgggaggttgaggaggatgccttgaggccaggagttcaaggctgcagcgagccacgatcgcgccactgcactccagcctaggcgacaaagcgagactctctaaaaaaaattcgaagcagagttaagttgtctttcttcctaacaacctgcccccaccatggggtgcgaatgggactcctggagtcctcctgcacctccccttggagaccaccaagctctaggaaccccatcaccctcagctgagggtcacatgcagcaactagcaggcgggaatctgtttgcattttggccttaaagaaataaataataggccaggcgcggtggctcatgcctgtaatcccagcactttgggaggctgaggcaggtggatcacctgaggtcaggagttggagaccagcctgaccaatatggtgaaaccccgtctctactaaaaatacaaaaattagctaggcatggtcgtgggcacctgtaatcccaactacccaggaggctgaggcaggagaattgcttgaacctggaaggcagaggttgcagtgagccgagatcacaccactgcactccagcctgggtgacagagcgagactccatctcaaaaaaaaaaaaaaaagagggccaggcgtggttgctcatgcttatgcctgtaatcccagcactgtgggaggcagaggagggcggattacctgagctcaggagttcgagaccagcctgggcaacatggtaaaaccccatctctactaaaatacaaaaaattagccgggcatggcagtgtgcgcctgtagtcccatctattcgggaggctgaggcaggagaatggcgtgaacctgggaggtggaggttgcagggagccgagatcacaccggtgcactccagcctgggtgacagagtgagactccatctcaaaaaaaaaaaaaaagaaagaaatgatagatgaatagtttaggattggggttcacaatttggttttctgtagaaaaagagaaccgggcactcttccgagagtcagatgccctcttccacccacacccacaaagccagagcaccgcaggtaccagttttcaaggcaacctccaaccatcatgtgactctttgtgtttgatcacactgtttgctccaagccagggttgcgtcccaccccatgtccttgtctgcgcacgggacgctggaggcacggccccctcctccctgcctagcctgctgacgggctttccagagctggctccttcaggtgcaggataccctctctgcttagtctgggaaaaggccccgttggcaggatgcccaccaccaggccacactgcctgaatctattggcagagctctggttttgtggccaaggtgggtagtggaagaccatagcctgtgtcccttacacatctcagaaagcaaccccatctgtgggcaagaaatctgttagggagaccaagcagcggcctggaaacaccttgatctctgcccagtggcccacatgcggtcgccgtttcatcagtttccagcctgggtgacctcacagccccagccacgccccacagagcctcaggaaggcacactgacctcagggccggcggctgacttcatttctgtttggggatgagaggcggcacagtaaactgtccaggccagtaaactaatggattcatacgaaccgtaatgaacgtgggctgtgtgctggggaaggcaggctcgcctcctccctgcaggggctgctggggtgaaagcaaccctgaaatgttcaaagccttgatggggaagcacgggggatggatagattttaatttcaaagcagccctctggtttgctataagcgggggactgaatttctctttgcagtggccaatgcctttcttctgtcaagatcagctcgtggccttcagatcagatgacgcaaagccccatggctgagctggaacaggctagaatgctggggggggcctgaaaccggtgggggagttgtgggaggcctagaatcagccaggaggcttgggtcggggttggaaccggccagggtgcacggaggaggctgtgggggcagggggaggccgctgcatggagccgcatagatgccattgcttgaggaaaggtgggctttagctgagggaaggagtgaggggtggatggagaatgtctgtgtccatctggacactgggactgtttgagcccctgagatttcagaaccgtgggccagaaaatggtcagggcccttggtgatggggaagggcgcctctggggaactcactgccccttgatttgagggtaacagggatggaagcagagtcagggggctgagggaggcaataaaaatgggtgcttttcaacagtgtctaaaaacataagatgttgacctgtcaggggttgagaatgtcgtcagaagactttggaggaagcaacagaaaatgagactgaggggcttgggcagagtcagtgccttctgtgtgatgcacgctcatgcacaaatgcacgcacatacccacactcacacatccgtgcacacacgggtacacacacatacacgtgcacccacatgcatgctcacacacatgcacccacagtcacacatccatgcatgcatgtgtacacaaacacacccacacatacacatgcacccacacgtgtacacagatgcacctccacccccatacatgcacatggacacacacatgcacccacacgcacacaagcatccatgctcacatgggtacacactcacacatccatgcatgcacgtgtaaacacacacacccccacacatacacgtgcacccacacatgcacacagacgcacctccacccccacacacgcacacacacacatgcacccacacatggatacacgcacactcacacatgtacccacacctgtgtgtacacacacacatgcatgctcacacacatgcacccaggcacacacaaatccacattcacccatacagtcacacacatgcatacacacacacatacaaacacatgcattcacacagatgcatacacacacacacttacaaactacacatgtgcttatacatgctcacatgcatgtatatgcacacacataccctcaccttatgcacacatgtacccacacacgtacccacacatatacaagcatgcacacatatatatatatatacacatgctcacacgcatacccacactcacatgtgtgcacatatgctcacacacacgtgcacacacatgctcacacacacacttactgttgctcaggcttagctgctttgggcttaagaagcaaactgcaccttccaaaaaatgagtgtggtgttcagttaaacaaccaaataattctttagcactgaatatgtggactttagaaattcaaactataaggtgataataacgttgtcctgctactttttaatctaacaaacatatcagaactgacactcagttcaaatgaagaaagtaggaattgggcgtgccgtgttattttttcaaagattctcctattgctccaaattgttggggattatcttaaagtctttgaatagcttcagttatggaagattttaccctctgagaatagaactgaattttagacaaaccatgagtccattgtagctagactggcatgcaagttgggattaaacagagtaaaacgtcttgtttaaaaaaataagaaaggccggcttgggcaacatagtgagacctcctctatgaaaagttagctgggcatggtggtgtgcgcctgtggttccagccgctcaggaggccgaggcaggaggatggaggtcaagactgcagtggactgtggttgcgccactgtactccagcctgggtgacacagcaagaccccgtctcaaaaaaagaaaacagaaaaaagaaaaaaaaagttgagcaaggagactaatttgtgacatgcagctgaacatggtttttaagaccagttttgaaagaggaattccaacattattcttaacatttcagaagcctgggcataagggtgacctccagggtgccgtgttataacaggactgctcctttcaacagctatgaccttataccatgtcttggggtgttgcctgccgtgtgacagtccaatattatacctactacttaagttttctttagattaaaaaatgtgcttcatattttatgccatttctacaaatgtatagtaaaacataaccaagagagcttattaaataatttcatccaaagcagttctaccagtgcttcacatttattttttatttatttatttatttttgagactgagtctcactctcttgcccaggctggagtgcagtggcgcaatctcagctcactgcaacctccccctcctgggttcaagcgattctcctgcctcagcctcctaagtagctgggattacaggtgccagccaccacacccgactaatttttgtatttttagtagacacgggcttttgccatgttggccgggctggtctcgaaatcctgacctcaggtcatccacctaccttggcctcccaaagtgctggcattgcgggcatgagctactgcgcctggtccacatttaattttttgcaaaaagatgacagctgctaacagagatgaattctcatgagtgatatcattgagcttcgtaggccacatgagtgtgtgccgggaccagtgtggcagcaagcggggcgttctgctctcggcatggagtgattggggaaaatctaggcagcttcctgcctcacgctgtttaaaacctttataatgtgctttatttcatttatttgaaatgactgcctgtcgtgtcagatatattcatagtcaagcttgagtataaaaggcatattccaaagttaaatataagctgctgcatagatttttttgtaaaatgatctcaccaagaatgtttatccataaagtttagcgaatttgcaagtgtgtttttcaacagcatttctctttagctttaataaacattggtttcttcatggtaccactcattttgaattcagtggtctccagttctccctgctaaatgaggcccactttctaaaaccaaagtgataattttataaaaatgaaatgagatatttgttaccacagaagtcctcatttacgagagtacatccccatagaactagtccacggtgagcctcaggggcatgcaagctgtttaacgatgcccccagcctagaaaggcccaggcttgggtgttcatgctccgctgttgccttcttgaaattcataatcatctttgaacaaggggtcccgcagtgtgtggtggctcacgcctgtaatcccaacactctgggaggctgaagcgggtggatcacctgaggtcgggagtttgagaccagcctgaccaacatggtgaaaccccatctctactaaaaatacagaaattaaccaggcgtggttggtgggtgcctgtaatcccagctactcaggaggctgaggcaggagaatcactcaaacctgggaggtggaggttgcagtgagtcgagatcacgccactgcactccagcctgggcaacagagcgagactccgtctcaaaaaagaaaaaccaaggggtcccacatttgcatttttgctctgggtcctgtaaattacgtagccaggcctgcatttgtcctgggagatgctctaccaaaaaacaataaataacaccaagcattctgtaatcaaacactgtaggaacccctgcttatcctagcctcattctcattctggaagactgcacatttatcatgttaaagactcagctagggaggcccaacttcattcaactcagtgtttcttatttttttaaaacagaactcattttttaaaaaaattattggctgggcgtggtggctcacgcctgtaatcccagcactttgggaggctgaggtgggcggatcacgaggtcaggagatcgagaccatcctggctaacacggtgaaaccccgtctctactaaaaatacaaaaaaaaatgagctgggcatggtggcgggcgcctgtagtcccagctactggggaggctgaggcaggagaatggcatgaacccgggaggcggagcttgctgtgagccaagatcacgccactgcactccagcctgggcaacagagcgagactccatctcaaaaaaaaaaaaaaattatttaacacctttatttctgctgaatgtactttagaaagattgagtgatttgaataaagtgacggtggcctaagagtctattttctggaattgagggaatactgccatcgatccttgaaaaatatttatttagttcctcctagaggccgggcacagtggctcacgcatgtaatcctggcctgcactttggaaggctgaggtggacagattgcctgagctcaggagttcaagaccagcctgggtaacaaggtgaaacccgtctctactaaaatacaaaaaattagctgggcgtggtgatgtgtgcttgtaatcccagctactcgggaggctgaggcaggagaattgcttgaactcaggaggcggaggcagaggttgcaatgagctgggattgcaccactgcactccagcctgggcaacagagcaagactctgtctcaaaaaaaaaaaaaaattatctagcccctcctagaaatgttaattccttaaatctgagcttcagctttctgtgaagcagaattatctccaaactttaacaaacaatggtcagaactgtttttaaggtcttggagagagatcattttcagtctttattaatcggacttgagattatttagaaacttggctctgaatattgtattcagaatgttttcactcatttgtgagtaattttttaaatatcccctttcctcagatgcagaatcagggctttttgtccagcattatgttgcaagtcctggttctgttgaaacattccataccatctgtgtgatggttatcggcacctccaccggtgccctgaagacagttttgtgctgtgagtccagaaacaggaaacacttcaggctgtgtgtcagaagcattgtcagtggttgtgttttgcccactggcagggggcattctttaaatcctgggatgcttctgcgctttgggctccactgttccagcagtgattagaaataacgctgtaggccgggcgcggtggctcacccctgtaatcccagcactttgggaggctgaggtgggcagattacctgaggtcaggagtgcgacaccagcctgaccaacatggtgtaaccccgtctctactaaaaatacaaaattagctgggcgtggtggcgcatgcctgtaatcccagctactcagaaggctgaggcgggagaatcgcttgaacctgggaggccgaggttgcagtgagccgagattgtgccattgcactccagcctgggcaacaagagcaaaactctgtctcaaaaaaaaaagaaataacaccttagcccactgcattattgacctgtgtctgcatgagctgtggaccacattataatcagagagatctctcagatgttgtcactttcctgctctacccgcagatgtaaatttcagccaacagcagtgtttgtgctcattttccccggctctcccacacatgtaatcccttctgagcatgttggcttcaaataatatggccagccacctcttccaccacgagatcttcaggaaatggcaggccactgggtttacatgcagatggcatgggagcacacaaggcacggctgtggggagttggcacttgctccagaatatggagcaccgagtgaaggtttcagtttcctgcactgagagaaacaagggcattccgaggcttttccactttatccctaaagagtttcacaacgcttgtttgccgatttctacatagatgccacctttctgagttgtatgtatttacatgccaaatgtattcattgagcagcgttaaataatggtgttcacccctaaagtgcatatactggtaaaattaagaatgatcgtaattaagcctcttgcaatagtcattagttcagagaatatttaagaatattaaaggtgctttgctaatgtcctcgttagttttgttttgacaaaatcagtacttcagtttcttgtttcttttttttttgagacggagtcttactctcgctctgtcgcccagactggagactggagtgcagtggcacgatcttggctcactgcaacgtccacctcccaggttcaagcgattctcctgcctcagcctcccgagtagctggggttacaggcacacactatgcctggctaattttttttttttttttgagacggagtctcgctctgtcacccaggctggagtgcagtggcgcaatgtcggctcactgcaagctctgcctcctgggttcacgccattctcctgcctcagcctcccgagtagctgggactacaggcgcccgccaccacacccagctaatttttttgtatttttagtagagacggggtttcaccatgctggccaggctggtctcgaactcttgacctcaggtaaaccacccacctcagcctcccaaagttctgggattacaggcgtgagccaccatgcccagcccagtacttcagtttcttagcgatgaaatccacccaatgtcaggcgatgactattattattttactgatttatactgtttgttctctattaatgtcttattttccccaaccgattttgaagttgagtaaggactatgttccgcgggtatcttgagtcctctgaggcactgagcttggtgatttggacgcaggagctgctcattagtgagctgatagctgggagcatagcgcatcccacatcacctgacttaccttggtgtcctcctttgtagccttttgtcatacatgatatggagacactgtgtatggctgagaagacgctggtggccaagctggtggccaatggcatccagaacaaggaggcggaggtccgcatctttcactgctgccagtgcacgtcagtggagaccgtcacggagctcacggaattcgccaaggccatcccaggcttcgcaaacttggacctgaacgatcaagtgacattgctaaaatacggagtttatgaggccatattcgccatgctgtcttctgtgatgaacaaagacgggatgctggtagcgtatggaaatgggtttataactcgtgaattcctaaaaagcctaaggaaaccgttctgtgatatcatggaacccaagtttgattttgccatgaagttcaatgcactggaactggatgacagtgatatctccctttttgtggctgctatcatttgctgtggaggtgagtggttgatttaatctgctggtatcatgtcactgacaggctcctgtcttgaaaaatttgacaatgggaaatccagtaccagcctgagctgttccagtggaggggacactcacatggtgggaagacgtctgacccccagtcactgctgagaattcagtgggaattataacaatattgtataatattatagtatatattgttattatctataaatacatatttaatattatgtaaatgtatgacattttaatcataatattagccaggtgtgggggtgcacacctttagtcccagctacttactcagtagactgaggcaaaaggatctcttgagcccaggagttcaggttgcaatgagttatgaatgcaccactgcactctagcctgggcaacagaacaagacctatttctttaaaaaaaaattatatattttgcacaaatatatatatagagaaaaagaggtcggacatgggcctgtaatcccagccctttgggaggctgaggtgggtggatcacttgagcccaggaggttgagaccagcctgggcaacatggcaagaccccgtctctacaaaaaaaaaaatagaaaaaattagtcaagtatggtggcatgtacctgtagtcccagctacttgagaggctgaggtgggaggatcacttaagcccaggagacaaaggttgcagtgagccaaggtcacgccaccacactccagcctgggcgacgaagaatgaccctgtctcaaaaaaaaaaaaaaaaaaaattatacacacacacacacacacacatttcgtttatattatatctaatattataaacagatataatttatatattatgatattcctgtatatattatataatgatgttgtattcatattatagacaatattgtatgaagtgctatacagatgtcagtatagttgctgtcacagttggttatgttgatgaaaagtatatttcctaatgcaaaatataatatcagtcagcagccaagtggcagtgactgcaaggtttgctttgcccgaggaagcagatcccagggaaggccgatctggtcctctctgtggaagctggctctgcagcctccacatttttggctcggtgtcacgttcctttaaatagccccatctcaggtctaggaaggtcatccacctactgcaaactcggctgaccttacccagggttggtggagacagatggggtctcccacactgcctgcagccatactgcgcctgggggattgactcactgtcagcatggagctgactcagccctaccagccgtgcccgttactgtgtggctgggcacaagtcagatgaaggaagtccttgcgctctggcataaagtgtacaaagacaaagcagttatgcataatttgtcctttagtatggtcaggatgtagcattgtgggtaaaatgcagttgcagaactatttatatgtagcatgatcacagttttataaaggaaattataatcctatatcaatcctatgtatatagaaaaatgtccagtgagatatatgttaaacctattatggtgggattaaaattatgaggggggatttctatttttcaaaagattcctccttttttttttttttgagacagagtctccgtctgtcaccctggctggagtgcagtggcacgatctcaggtcactgcaacttccgcctcctgggttcaagtgattcgcctgcctcagcctcctgagtagctgagattacaggaacatgccagcacacctggctaatttttgtatttttagtaaagatggggtttcaccatattggccaggctggtctcaaactcctgaccccgggtgacccacccacctcggcctcccaaagtgctgggattacaggcatgagccactgcacccggcaataattcctctctttagagacttaatagttatagccccagccactctggaggccgaggcaggaggattgcttgagcctaggagttccagtccagcctaagcaacagagcaagaccccatcactaaaacaatacaaaaacaagaattttagaaataaaaacttaataattacatttacaaccaaaaacaatgaagatgtttaaatcctcatcactagcaaccctgttaagaatcatagtaatgactgggtctgtaagggagcaccgcctgctgaacatggctcagggcagtattttctggaccaagaatcaggtctcatgctttgagactgtcccaggatgtctagtgccagctaccccaggcaggtcatctggtgtgaatgttgactcttcctgcaccaagtctcagacctgccccaccctcctccccactctgggtctcctgatcttggctcactgcaatctccgtctcccaggttcaagcgattctcccacctcagcctcccgagtatctgggattacaggcgtgagccaccgtgcctggcctacaaaacctagttctaacacaatcactccttaaatatggtggaacacttgaagcttgatatctagtttggattcaaaagcttcatttcccatattatgcaaaactggtggttgtgatctccagaatgtactgttcctcctactagctctaatttttctccctgacaggtggtcatcaggtaaatcacaagtgaaaaggccgcaccataaggtgtacttagggcactattgccgcctagtagtatgaatatttaggaaagagtactggtcctgtctgtccctacttcacctattgactttggaaaaacctatgtctatcttccagtcaagttgacaatatctaaaggcagctcagtttttttctaagaaaggccacataaaataggcatgtttggttcctgaaactgataagcagttcttgggtgattatcacactcaaacctctctctcttctttcgagactagatcgtcctggccttctaaacgtaggacacattgaaaaaatgcaggagggtattgtacatgtgctcagactccacctgcagagcaaccacccggacgatatctttctcttcccaaaacttcttcaaaaaatggcagacctccggcagctggtgacggagcatgcgcagctggtgcagatcatcaagaagacggagtcggatgctgcgctgcacccgctactgcaggagatctacagggacatgtactgagttccttcagatcagccacaccttttccaggagttctgaagctgacagcactacaaaggagacgggggagcagcacgattttgcacaaatatccaccactttaaccttagagcttggacagtctgagctgtaggtaaccggcatattattccatatctttgttttaaccagtacttctaagagcatagaactcaaatgctgggggtaggtggctaatctcaggactgggaagattacggcgaattatgctcaatggtctgattttaactcacccgatgttaatcaatgcacattgctttagatcacattcgtgatttaccatttaattaactggtaacctcaaaattcgtggcctgtcttcccattcaccccgcttttgactattgtgctcctttataattctgaaaactaatcagcactttttaacaatgtttataatcctataagtctagatgtatccaaaggtgaagtatgtaaaaagcagcaaaatatttatttcaaagacttcacttctgtttcctgaatctaaagaaagacaacatgctgctttttaatcataggatggagaattttaaagaactgtttgggccaggcacagtcgctcatacttgtaatcccagcactttgggaggccgaggcgggtggatcacaaggtcagcagatcgagaccatcctggccaacatggtgaaaccctgtctctactaaaaatacaaaaattagccgggtgtggtggcacatgcctgtaatcccagctactcgggaagctgaggcaggagaattgcttgaaccagggagttggaggttgcagtgagctaagactgcaccactgcactccagcctggtgacagaacgagactctgtcttaaaaacaaacaaacaaaaaaaaaatctgttagataagctatcaaaatgcagctgttgttttgtttttggctcactgttttcgtggttgtaactaatatgtggaaaggcccatttccaggtttgcgtagaagagcccagaaaacagagtctcaagacccccgctctggactgtcataagctagcacccgtggtaagcgggacgagacaagctcccgaagcccgccagcttcctgctccactcagctccgtccagtcaacctgaacccacccagtccagctgtctgtgggaatggtggtgttcttagggacagactgacaccttacttgtcagtgttcctccgggccccatttggcagctcccgtatcttttgttatgttgcttttaaagatatgatgttttattgttttaactcttggtgacagtagatgctctctggagcgcagacgaggcacatgtgtcttcatagcctgggctgggtgggagccagtcaccctgcggatcgagagagggggtagagtcttcttcaaatggcagttttacttcaaatggcagatttcacaagagttggttattttttacaatggtttaggttgttaagtctcctttgtatgtaaggtagttttttcaacatctaaaatttttgttttagccttcaaaaccaacttaccaacctcagtccagctgggaaggcagcgttgattatggtagtttgtcaagaatatatggacctggaaacactttctctctctgtccacctggtag

SEQ ID NO: 24938 - DNA, 4004 bp, Homo Sapiens
gcaagatgctgcccgtgtaccaggaggtgaagcccaacccgctgcaggacgcgaacctctgctcacgcgtgttcttctggtggctcaatcccttgtttaaaattggccataaacggagattagaggaagatgatatgtattcagtgctgccagaagaccgctcacagcaccttggagaggagttgcaagggttctgggataaagaagttttaagagctgagaatgacgcacagaagccttctttaacaagagcaatcataaagtgttactggaaatcttatttagttttgggaatttttacgttaattgaggaaagtgccaaagtaatccagcccatatttttgggaaaaattattaattattttgaaaattatgatcccatggattctgtggctttgaacacagcgtacgcctatgccacggtgctgactttttgcacgctcattttggctatactgcatcacttatatttttatcacgttcagtgtgctgggatgaggttacgagtagccatgtgccatatgatttatcggaaggcacttcgtcttagtaacatggccatggggaagacaaccacaggccagatagtcaatctgctgtccaatgatgtgaacaagtttgatcaggtgacagtgttcttacacttcctgtgggcaggaccactgcaggcgatcgcagtgactgccctactctggatggagataggaatatcgtgccttgctgggatggcagttctaatcattctcctgcccttgcaaagctgttttgggaagttgttctcatcactgaggagtaaaactgcaactttcacggatgccaggatcaggaccatgaatgaagttataactggtataaggataataaaaatgtacgcctgggaaaagtcattttcaaatcttattaccaatttgagaaagaaggagatttccaagattctgagaagttcctgcctcagagggatgaatttggcttcatttttcagtgcaagcaaaatcatcgtgtttgtgaccttcaccacctacgtgctcctcggcagtgtgatcacagccagccgcgtgttcgtggcagtgacgctgtatggggctgtgcggctgacggttaccctcttcttcccctcagccattgagagggtgtcagaggcaatcgtcagcatccgaagaatccagacctttttgctacttgatgagatatcacagcgcaaccgtcagctgccgtcagatggtaaaaagatggtgcatgtgcaggattttactgctttttgggataaggcatcagagaccccaactctacaaggcctttcctttactgtcagacctggcgaattgttagctgtggtcggccccgtgggagcagggaagtcatcactgttaagtgccgtgctcggggaattggccccaagtcacgggctggtcagcgtgcatggaagaattgcctatgtgtctcagcagccctgggtgttctcgggaactctgaggagtaatattttatttgggaagaaatacgaaaaggaacgatatgaaaaagtcataaaggcttgtgctctgaaaaaggatttacagctgttggaggatggtgatctgactgtgataggagatcggggaaccacgctgagtggagggcagaaagcacgggtaaaccttgcaagagcagtgtatcaagatgctgacatctatctcctggacgatcctctcagtgcagtagatgcggaagttagcagacacttgttcgaactgtgtatttgtcaaattttgcatgagaagatcacaattttagtgactcatcagttgcagtacctcaaagctgcaagtcagattctgatattgaaagatggtaaaatggtgcagaaggggacttacactgagttcctaaaatctggtatagattttggctcccttttaaagaaggataatgaggaaagtgaacaacctccagttccaggaactcccacactaaggaatcgtaccttctcagagtcttcggtttggtctcaacaatcttctagaccctccttgaaagatggtgctctggagagccaagatacagagaatgtcccagttacactatcagaggagaaccgttctgaaggaaaagttggttttcaggcctataagaattacttcagagctggtgctcactggattgtcttcattttccttattctcctaaacactgcagctcaggttgcctatgtgcttcaagattggtggctttcatactgggcaaacaaacaaagtatgctaaatgtcactgtaaatggaggaggaaatgtaaccgagaagctagatcttaactggtacttaggaatttattcaggtttaactgtagctaccgttctttttggcatagcaagatctctattggtattctacgtccttgttaactcttcacaaactttgcacaacaaaatgtttgagtcaattctgaaagctccggtattattctttgatagaaatccaataggaagaattttaaatcgtttctccaaagacattggacacttggatgatttgctgccgctgacgtttttagatttcatccagacattgctacaagtggttggtgtggtctctgtggctgtggccgtgattccttggatcgcaatacccttggttccccttggaatcattttcatttttcttcggcgatattttttggaaacgtcaagagatgtgaagcgcctggaatctacaactcggagtccagtgttttcccacttgtcatcttctctccaggggctctggaccatccgggcatacaaagcagaagagaggtgtcaggaactgtttgatgcacaccaggatttacattcagaggcttggttcttgtttttgacaacgtcccgctggttcgccgtccgtctggatgccatctgtgccatgtttgtcatcatcgttgcctttgggtccctgattctggcaaaaactctggatgccgggcaggttggtttggcactgtcctatgccctcacgctcatggggatgtttcagtggtgtgttcgacaaagtgctgaagttgagaatatgatgatctcagtagaaagggtcattgaatacacagaccttgaaaaagaagcaccttgggaatatcagaaacgcccaccaccagcctggccccatgaaggagtgataatctttgacaatgtgaacttcatgtacagtccaggtgggcctctggtactgaagcatctgacagcactcattaaatcacaagaaaaggttggcattgtgggaagaaccggagctggaaaaagttccctcatctcagccctttttagattgtcagaacccgaaggtaaaatttggattgataagatcttgacaactgaaattggacttcacgatttaaggaagaaaatgtcaatcatacctcaggaacctgttttgttcactggaacaatgaggaaaaacctggatccctttaatgagcacacggatgaggaactgtggaatgccttacaagaggtacaacttaaagaaaccattgaagatcttcctggtaaaatggatactgaattagcagaatcaggatccaattttagtgttggacaaagacaactggtgtgccttgccagggcaattctcaggaaaaatcagatattgattattgatgaagcgacggcaaatgtggatccaagaactgatgagttaatacaaaaaaaaatccgggagaaatttgcccactgcaccgtgctaaccattgcacacagattgaacaccattattgacagcgacaagataatggttttagattcaggaagactgaaagaatatgatgagccgtatgttttgctgcaaaataaagagagcctattttacaagatggtgcaacaactgggcaaggcagaagccgctgccctcactgaaacagcaaaacaggtatacttcaaaagaaattatccacatattggtcacactgaccacatggttacaaacacttccaatggacagccctcgaccttaactattttcgagacagcactgtgaatccaaccaaaatgtcaagtc

SEQ ID NO: 24939 - DNA, 3912 bp, Homo Sapiens
accgccttcgccgcggaccttcagctgccgcggtcgctccgagcggcgggccgcagaggttcaagcgattctcctgcttcagcctccggagtagctgggattacaggcacgtgccaacacacccagccaccaaaatgccagaagagatggacaagccactgatcagcctccacctggtggacagcgatagtagccttgccaaggtccccgatgaggcccccaaagtgggcatcctgggtagcggggactttgcccgctccctggccacacgcctggtgggctctggcttcaaagtggtggtggggagccgcaaccccaaacgcacagccaggctgtttccctcagcggcccaagtgactttccaagaggaggcagtgagctccccggaggtcatctttgtggctgtgttccgggagcactactcttcactgtgcagtctcagtgaccagctggcgggcaagatcctggtggatgtgagcaaccctacagagcaagagcaccttcagcatcgtgagtccaatgctgagtacctggcctccctcttccccacttgcacagtggtcaaggccttcaatgtcatctctgcctggaccctgcaggctggcccaagggatggtaacaggcaggtgcccatctgcggtgaccagccagaagccaagcgtgctgtctcggagatggcgctcgccatgggcttcatgcccgtggacatgggatccctggcgtcagcctgggaggtggaggccatgcccctgcgcctcctcccggcctggaaggtgcccaccctgctggccctggggctcttcgtctgcttctatgcctacaacttcgtccgggacgttctgcagccctatgtgcaggaaagccagaacaagttcttcaagctgcccgtgtccgtggtcaacaccacactgccgtgcgtggcctacgtgctgctgtcactcgtgtacttgcccggcgtgctggcggctgccctgcagctgcggcgcggcaccaagtaccagcgcttccccgactggctggaccactggctacagcaccgcaagcagatcgggctgctcagcttcttctgcgccgccctgcacgccctctacagcttctgcttgccgctgcgccgcgcccaccgctacgacctggtcaacctggcagtcaagcaggtcttggccaacaagagccacctctgggtggaggaggaggtctggcggatggagatctacctctccctgggagtgctggccctcggcacgttgtccctgctggccgtgacctcactgccgtccattgcaaactcgctcaactggagggagttcagcttcgttcagtcctcactgggctttgtggccctcgtgctgagcacactgcacacgctcacctacggctggacccgcgccttcgaggagagccgctacaagttctacctgcctcccaccttcacgctcacgctgctggtgccctgcgtcgtcatcctggccaaagccctgtttctcctgccctgcatcagccgcagactcgccaggatccggagaggctgggagagggagagcaccatcaagttcacgctgcccacagaccacgccctggccgagaagacgagccacgtatgaggtgcctgccctgggctctggaccccgggcacacgagggacggtgccctgagcccgttaggttttcttttcttggtggtgcaaagtggtataactgtgtgcaaataggaggtttgaggtccaaattcctgggactcaaatgtatgcagtactattcagaatgatatacacacatatgtgtatatgtatttacatatattccacatatataacaggatttgcaattatacatagctagctaaaaagttgggtctctgagatttcaacttgtagatttaaaaacaagtgccgtacgttaagagaagagcagatcatgctattgtgacatttgcagagatatacacacactttttgtacagaagaggcttgtgctgtggtgggttcgatttatccctgcccaccccatccccacaacttcccttttgctacttccccaaggctcttgcagagctagggctctgaaggggagggaaggcaacggctctgcccagagccatccctggagcatgtgagcagcggctggtctcttccctccacctggggcagcagcaggaggcctgggggggaggaaaatcaggcagtcggcctggagtctgtgcctggtcctttgcccggtggtgggaggatggagggattgggctgaagctgctccacctcatccttgctgagtgggggagacattttccctgaaagtcagaagtcaccatagagcctgcaaatggatcctcctgtgagagtgacgtcacctcctttccagagccattagtgagcctggcttgggaacaagtgtaatttccttccctcctttaacctggcgatgagcgtcctttaaaccactgtgccttctcaccctttccatcttcagtttgaacgactcccaggaaggcctagagcagaccctttagaaatcagcccaagggggagagcaagagaaaacactctagggagtaaagctccccgggcgtcagagttgagccctgcctgggctgaaggactgtcttcacgaagtcagtcctgaggaaaaatattggggactccaaatgtcctctggcagaggacccagaaaaccacactggctccaacttcctcctcatggggcattacacttcaaaacagtggggagcaacttttccaccaaagctacaaacctaaaatgctgctgccccaaagcacaagagggaagagcaccgccggggccacaggacgtctgtcctccagtcacaggccatccttgctgctccctactgactctagcttacttcccctgtgaagaaacaggtgttctcggctgagcccccaaccctctgcagaaccaggttgatctgccacagaaaaagcatctttgaagacaaagagggtgaggtcttcatgagtctcctgggcccaaagccatcttctgatggaaggaagagagtagggccagtgaaggctgcccagagagaatgtcacagatgaggctgcccctgccccctccccgccagggaggtttcatgagctcatgtctatgcagcacataagggttcttcagtgaaaagcaggagaagagcccactgcaaggatagctcattaggcacatgaccgatgcagggaaggccatgccggggaagctcttcctgcaggtattttccatctgctgtgccaaggctgagcggcagaaacttgtctcataaattggcactgatggagcatcagctgtggcccacagagagccttgctgagaagggggcaggtaaagcagagattttagcattgccttggcataacaagggcccatcgattccctactaatgagaggcagggagagcatgggcaatggagacccaccaatgatccccaaccccggtgggtactggctgcctgccctgggccagggaatggctccttataccaaagatgctggcacatagcagaacccagtgcacgtcctccccttcccacccacctctggctgaaggtgctcaagagggaagcaattataaggtgggtggcaggagggaacaggtgccacctgctggacaatcacacgaaaggcaggcgggctgtgtactgggccctgactgtgcgtccactgctgtcttccctacctcaccaggctactggcagcagcatcccgagagcacatcatctccacagcctggtaaattccatgtgcctctgggtacaaaagtgcctcaacgacatgctctggaaatcccaaatgccacagtctgaggttgatatctaaaatctatgccttcaaaagagtctctgttttttttttttaacctggtagacggtataaaagcagtgcaaataaacacctaaccttctgc

SEQ ID NO: 24940 - DNA, 3099 bp, Homo Sapiens
aggaccatactcaactggggtttgatctccactttgccctgcggtggcccctctggtagctatgtggatcctgggcagattgtccatgttgctgggcctccgttgcttcactgtatgacgtctgcctctcagggatgcaggaagattcaattaggtaggagtggatggtcccccagcacggggcttagctcttagtaactaggcattctggcaatggcagccatcaataggagagactattgattgttgagtgaatataagtggcataatccaccaagtggagattctgagtgaatgtggccactttggacccaagactgctgcccctctctgtcctctcataggactattatttattgccagtgctgaccagcctttgttggctaccatgatcattacctgcactccgagtgttttaacagaattttctgatgcctctggcctcacctgctgccttttagccaagaggggtgtgtgtgtatgtgtgtgtgtgtgtgtgtgtgtgtgttgggtgtgtgttgggtagcagggttcttggaaggtctggtttagccataatgttgatcataaagagaaaacaagaaaataaatgcaaattaaatagttcggtgagcctttgttatttcgccacatccagtaagttctatcagttgaatgttgtctgaattacttaaaaagttctcagttgtaaacaggtaagagcacccagtggaggccatggagctaggcttagagctttgccaccagccttcagttccatagccatgaacctgggagggcaaggaatcaccctagaggtgaaggccattcatcggtgctaacccaaggtctctgaaaatgagttttagttactctattatctaagtatctttcttactgatatgtaacttacctggctgaacaattacattttagagctccaaataaattttcagcctattatgtcattgtccaattacaagcctcattgtaatagccatgttaaaaacaataaagccggtgaaattgatttcagtgtatttcaaattaacctaatatattcgaaatattatgtatgtataaaaattattgagcttttttcttttttccactaagtctttgagagctagtgtgtatgtgtggatttgtactagccactggttgagagctctgtagccacacatggcaagtgggtaccatattgcttagcccaggcctagtagaagattaagactcagtcagaggaagtaaggcagatccgtgcttggaatcagttcctcttgaagaagtgcacagccaagcaacacacaaagcagaaatattttgagctctgtattcaaagcaggaagatctgggaccatgtaagggggtttggtcttcagttctccctttgatcccttccctgggtgtgtgctttcttacagcctggagagtggaagggaagagagggggcttcctggactcctttcctgtctctagaaatgacccctgcagctgtcctgaagctctcaggttaagctgattgtgtccagagcagacaggaggcggcccactgccccactgtacccacccaagcactcacctaagctggccatggaaatgtgaatgaaaagcctgacccaggccctcttgccctgctaacccagcaaggaggctctgaccagccagccagcaagtgactttttctgtgacatctaagtggaattcagtgaggaatcagcattattattcaatcactgaaacagcatatcccattgtgatactgagaaatgctttcctcttgagacctttgggaggacagccatttaaacaagaattccctgcattcacttttgaattacctgttagctgtagaactcagccaggatcaagtcttgatgccaccaatgatgagtttagtgtacttaatcttttgcctctttgactttttttttttcttttttaagatgaatgatttcggaatcaagaatatggaccaggtagcccctgtggctaacagttacagagggacactcaaggtgagtgggcaagtcttaatttttttttttaattggaaaactcgatctctaggaggaaagaaaaaaaaggcctgggtcccagaaaactggttgtagccctagcttcttaatttattggccatgtgactatagactatttgcttacttgctctggtcctcagttttctggtctgcagaatgggtatcttgatgtgtgttgttcttctcctccacgatatgaaaccaaaggcctttatagcttgttttctgaggctccttccaggtgaaaatcctataactcccaataaaacagctggagaggctgtctctactgccttttctgtctacccaggagtttccttggttgatgggaagctgtttaagaactgaaatgagagagaagaggcagacagacccaaccgctacagctcctatcagaaagggcagcgcccgtggaattgtaggtagcctgttactggctcagagaacaagcaggcctacttatgttaaaccaaaaaccagatgaaaaatgaaagcgccctctctgctgcataaacattttatgtagcttctatcatcattccttttgggaacattctttagtagcacaaactggtaatctcccacttgtcttctccaaatatgacagcaagatttgattgttttcagtattatgtagtaaacatgtttcagaagcatgattttaaaattggcctcctcaaagtttagcgtcttgcataatgatgatgtacgtctctggcatattacattttcctttgtatatcattattgaggttatttgtctgatatgacccaaagaggcaaaactcagcacagtcctttctgcagtattctaaaggtcatcaaacttcagcctagtgagtctgcttgtttgatttggccggacattttaagcatggcagaagtggtacaagaaatcatggtattaagttgaaaccacaccccttagaaaaatccttctattaattcaaataatttgacgatgcttatgcggtttctgaaaagaagcagtcgttgctgaaattgatgtgttgaaataggaagcacagatttgtattgtcttttggcttcctggctttaaaaaaaaaaaaaaaaaaaaaaa

SEQ ID NO: 24941 - DNA, 1547 bp, Homo Sapiens
ctgaagcccggggtcagcaggcgctgcgggcgcagctccggtgcaagcgaggacacgacacatgcagtggcttctggactgcgcgatgactggacgcaagtaacttctaggtctgcagacaagaggaagagaagatgaaggaagactgtctgccgagttctcacgtgcccatcagtgacagcaagtccattcagaagtcggagctcttaggcctgctggaagaagggactctgatcatcgaggggctcctcaacattgcctgggggctgaggcggcccatccggctgcagatgcaggatgaccgggagcaggtgcacctcccctccacctcatggatgcccagacggcctagctgccctctgggctgctggtctcttctccttggcctgagctccctttctctgccggcagccatctcagccctgcagttgtctgttttcagaaaggagccatcgccccagaacgggaacatcacagcccaggggccaagcattcagccagtgcacaaggctgagagttccacagacagctcggggcccctggaggaggcagaggaggccccccagctgatgcggaccaagagcgacgccagttgcatgagccagaggaggcccaagtgccgcgcccccggtgaggcccagcgcatccggcgacaccggttctctatcaacggccacttctacaatcataagacctccgtgtttactccagcctatggatccgtgaccaatgtgagggtcaacagcaccatgacaaccctgcaggtgctcaccctgctgctgaacaaatttagggtggaagatggccccagtgagttcgcactctacatcgttcacgagtctggggagcggacaaaattaaaagactgcgagtacccgctgatttccagaatcctgcatgggccatgtgagaagatcgccaggatcttcctgatggaagctgacttgggcgtggaagtcccccatgaagtcgctcagtacattaagtttgaaatgccggtgctggacagttttgttgaaaaattaaaagaagaggaagaaagagaaataatcaaactgaccatgaagttccaagccctgcgtctgacgatgctgcagcgcctggagcagctggtggaggccaagtaactggccaacacctgcctcttccaaagtccccagcagtggcaggtgtacactgagccctggttgctggccccggccggtcacattgactgatggccaccgcctgacgaatcgagtgcctgtgtgtctacctctctgaagcctgagcaccatgattcccacagccagctcttggctccaagatgagcacccacaggaagccgacccaggcctgaggggccaggaacttgctgggtcagatctgtgtggccagccctgtccacaccatgcctctcctgcactggagagcagtgctggcccagcccctgcggcttaggcttcatctgcttgcacattgcctgtcccagagcccctgtgggtccacaagcccctgtcctcttccttcatatgagattcttgtctgccctcatatcacgctgcccc

SEQ ID NO: 24942 - DNA, 4672 bp, Homo Sapiens
tcctctgaccgagcgagggctccccgtctgcggcgcggtcaggaccccgcactttcggcccggctcggggttctcggagtccgtcccaaggccgggccgcaccaccgctggggggcagcgaagcgagcctagaggagaaaaggcggtccccgccgagtgcacgccgggggcggggcacggcacgaaggctccgtggtcggacttctgggctgttcggaggccctggcccacctggagggccctggaagagtttccagcgcttcccgaggtaggcgtgagaagctcgacgcggaccacatctccctcatgcaccgcccgcacgtcccaggatgcgctgcgattaaggtactgccgcgcctcgtgtgcaaggacagacttccggggtcgagaactacaacttccgacttgcatcactgcggtggcgctaaacagcgtcagcgaggcggtgcccgacgatttccctgtcttccagttccgctccctgggatcagcggcgagaagcggggcggagtctgaggcccgagccaagatggcggctgcgaagccaaccctcacggactcgctctcgttctgcctcgcgcagctcgcggcggcggccggggaggctctgggtggggaaaaggacccagcgaccaacgagacacccctgagccgcgcgctcctagccctccgcacgcgccacatcaaggcagcggggggaatcgagcgcttccgggcacgcggcgggctccgccccctactcgcgctgctacggcgagcggctgcagcgggttccgccccgtcccaggcaggccccggctccgccccctcgtcggccgcgtcgggagcttctagccccgcccccgcgtcgggccccgccccctccgctgtgtcgtcgtctagtcctacgccgccagtgcgcctgcgcaagacgctggacttggcgctcagcatcctagccgattgctgtacggaaggggcgtgccggaccgaagtgcgcagactcggaggcatactccctttggtgaccattcttcagtgcatgaagacagacagcatccagaaccgaacggcccgtgccctggggaacttagccatggaacctgagagctgtggggacatccactgtgctggtgctgttcccctgcttgtggagagcctgacagcctgccaggactcgcagtgcctacagagcgtggtgcgtgccctccgtaacctggcagactcaccccagcaccgcctggccttggcacagcagggagcagtgcgtccgctggccgagctcctggccactgccccagatgctgcactgaccttagccctcgtccgtgccctcctggaactcagccgaggctgctcccgggcctgtgctgagcagctaagtctgggtgggggattgggcccactcgtcagcctggcttcccaccccaagcgggcagtacgcgagggaaccattctgatcctcgccaacctgtgtgcccagggcctgattcggcctgcactgggcaatgctggtggcgtggaggtgctggtagatgagctccggcagcgccgggatcctaatggagctagcccaacctcccagcagcccctggtgcgggctgtgtgcctcctatgtcgtgaggccatcaaccgggcccgactgcgggatgctggtggcttggatctactgatgggcctgctgcgggaccctcgtgcaagcgcatggcaccctcgtattgtggctgcccttgtggggtttctgtatgacactggggccctgggccggctgcaggctctgggacttgtgcctctcctggctgggcagctgtgtggtgaggctggtgaggaggaagaagagggaagagaagctgcttcctgggactttcctgaggagaggacccctgagcgggcacagggtggaagcttccggagcctcaggtcgtggctgatctccgagggctatgccacaggccctgatgacatctcccccgactggtctcctgagcagtgtccgccggagcccatggagccggccagccccgccccgaccccgacctcgctgcgggcaccacgcacccaacgcactccgggccgcagccccgccgccgccatcgaggagccttggggacgcgaagggccagccctgctgctgctgtcgcgcttttcccaggcccctgacccaagtggggcacttgtgaccggcccggcgctgtacggcctgctgacctatgtgaccggcgcaccgggcccgcccagcccacgtgcactgcgcattctgtcacgcctcacctgcaaccctgcctgcctcgaggccttcgtgcgcagctatggcgcggcgctgctgcgggcctggctggtgctgggggtggcgcctgacgattggccggcaccacgtgcccggcccactctccacagccggcaccgagagctgggtgagttcccatacccacccgtctccttgcccccatgtgagtccccatcctcccccatggcttccatgggcccagaacctcaccttcccactcacctgtcctccccagcccgtcctccagacaacctgtcaccagagtggggtggggagcagggcgttccagtccctccatgggcccacaggcagagttctgctgtgtcctctgccctagccctgggacccagataccctaactctagatgcagccccgcgcccaggatctgggctggtctgtgcttctttcctggctctgccattggttcagcactgtcctgactgctccccaccagcacgctgacctgtgaaccccagcctcaccatcacccccagcactgccagggactgccctgtctgctgtgccctgaccacaggctgcttcatggcgttactgctagaccaaggagcccttctgctggccctgtccgggcataacagaaggctcgcactcttgtcttctggtcacacctcactatgtcccctcagctcctatctctgtatggcctggtttttcccaggttatgattatagagcgaggattattacaatattgggataaagagtaattactacaaactaatgattaatgatattcatatatctctaagatctatatctggtataactattcttgttttatattgtattatactggaacagctcgtgtcctccgtctcttgcctcggcgcctgggtggcttgccgcccacacttcaggggcccagacttacaccctgactgtcccaccttctgtccttgtcctggacctcaggttcccagcgtcccgagcccagcactgtctcttcagtgccctgatttctcacccagaggtttcaccctccttcatctcacgggcccagagccctgtctcactcaccccacctgtcttagaccccagttcccagcctgacaagctttccactcacaggggagaggctactgcagaacctgacggttcaggctgagtcgccctttggggttggggccctgacgcacctgctgctctctgggagccctgaggaccgagtggcctgcgcgctgaccctgcccttcatctgccggtgagtgggaagtgggtgccttgcggggttgggggaggagtgctgtgtttcccaggcccgttgcccaccttttgaaaggccctctcttccctgtaggaagccctctctgtggcgccggctgcttctggagcagggtggtctccggctcctccttgcggcgctgacccggccggccccacacccgctcttcctcttctttgccgcggactccctttcctgcctccaagacctggtgtctcccactgtgagcccagctgtcccacaggcagtccccatggacctagactcaccttccccttgcctctatgaacctctgctgggcccagcccctgtcccagctcccgacctgcacttcctgctggactcaggcctccagctccctgcccagcgagcggcctcagccaccgcctcccctttcttccgggccctgctgtcaggcagctttgcagaagcccagatggacctggtgcccctgcgaggtctgtcgcctggtgcagcctggcctgtcctgcatcatttgcatggttgtcgggggtgtggggctgccctggggcccgtgcccccaccaggccagcccctgctgggttcagaggccgaggaggcactggaggctgctggccgtttcctactgcctgggctggaggaggagctggaagaggccgtgggccgcatccacctgggaccccagggtggcccggagtcagtgggtgaggtgttccgcctgggccggccccggctggctgcccactgtgcccgctggacactggggtcagagcagtgcccgaggaagcggggtctggccctggtggggcttgtggaggcagcaggtgaagaggcagggcccctgacggaggctttgctggctgtggtgatggggattgagttgggggcaagggtccctgcctagactgttgacgtcccctgggaaggggacccaaggatgaattggctgtgaaggatcctccctgagactggcaagggaggaggctgagcagaaggagtcatcatggaggagcggtgagaacatggaaccggactccaagatgacgatctaaagacccgggagcgagaagccaaggccaggttctgggtgtagggcccagagaagcagaacagcccagagccccaggtgcctggcctggcctagacctctggaattgagattaaacaatttggagttggat

SEQ ID NO: 24943 - DNA, 1337 bp, Homo Sapiens
gctgcataaggactgcccggggctgcgcgccgggaacctcgcggggctggcgggcgccgcaccccctccctggccgcctgcgccccggggaggccgcccgcgcgcgacgggaccggcagcatgagcagcggctacagcagcctggaggaggacgccgaggacttcttcttcaccgccaggacctccttcttcaggagagcgccccagggcaagccccgctccggccaacaagatgttgagaaagagaaggaaacccacagttacctcagcaaagaggagatcaaagagaaagttcataaatacaacttagcagtcacagacaagttgaagatgaccttgaattcaaatgggatttacactggcttcattaaagtacagatggaactctgcaaacctccacagacttctccaaattctggaaaactctctcccagtagcaatggctgtatgaatacacttcatatcagcagcacaaacactgtcggggaagtgatcgaggccctgctcaaaaagtttctcgtgactgagagccctgccaagtttgcactttataagcgttgtcacagggaagaccaagtctacgcctgcaagctctcagaccgggaacatccactctacctgcgtttggtagcagggcccagaacagacacacttagttttgttcttcgtgaacatgaaattggagagtgggaagccttcagccttccagaactacagaatttcttgcgcatcttggacaaggaagaagatgaacagctgcagaacctgaagaggcgctacacagcctacaggcagaagctggaagaagccctccgtgaggtgtggaagcctgattaaagcggggctccctgcccgtgaggcccggtgcaggaccgatgtacaaaacagcagcaagtgcctctcttctcagagggctgctgtcttgccccactatgctagggtcttcgcctttctatctgtagattttgttccccaaacctggtcacacagcatcctgcaccttagcgtcccatgtaagggactctgcaagcttgttgttcagcaccgcagtgttacctcttggcaagctgtgaacctgtcgcctcatcaggagcattcgagggtgcttggaagcatgaactctgggggtgtttttttttttggttattttaattatgtgatgatgctgttaagcttacagatatgcagttgattttttaaaaagcttaactaggaatctttctgaatacttgtcctattttgaaactacctgtctggttttttgtttggttttgttttctttttttaatgtcagaggaatctatccatgtgaatcgaaaggcacaggaatctaggaa

SEQ ID NO: 24944 - DNA, 2068 bp, Homo Sapiens
agggattacagcgacaagcatagggctactttcaaatttgaatcaacagatgaagataaaagaaagaaactctgtgaaggcatatttaaagtccttataaaggacatcccaacaacatgtcaagtgtcctgcctggaagtactccgcattctctccagagacaaaaaggttttagttcctgtgacaactaaggaaaatatgcagatactgctgcgactagccaagctaaatgagttagatgattctttggagaaagtatcagagttcccagttattgtggagtcattaaaatgtctgtgtaatatagtgttcaacagtcagatggcacagcagctcagcctggaacttaatcttgctgcaaagctctgtaacctcctgagaaagtgcaaggaccggaaatttatcaatgacattaagtgctttgacttgcgcttgctcttccttctgtcacttttgcacaccgacatcaggtcacaattgcgctatgagctccagggactaccgctgctaacgcagatcttggaaagtgcctttaccatcaagtggaccgatgagtatgaatcggccatagaccataatggacctcctctctcacctcaggagacagactgtgccattgaggccctcaaagctctcttcaatgtgacggtagacagttggaaggtgcataaagagagtgattctcatcagttccgtgtaatggcagctgtccttcgtcattgtttactaatcgtaggtccaactgaagacaaaacagaagagctacacagcaatgcagtcaaccttttaagcaatgttccagtctcttgtttggatgttctcatttgtccgttaacccatgaagaaacagcccaagaggcaacgactctagatgaactgcccagtaataaaacagctgagaaagaaacagttttgaaaaacaataccatggtatacaatggtatgaatatggaggccattcatgttttactgaattttatggagaagagaatagacaagggaagcagctatagagagggtctaactccagttctcagcttattaaccgaatgttcccgagcccatcgaaacatccgaaaatttctcaaagatcaggttttaccaccgttgagggatgtgacaaatcgacctgaagttggctcaactgtgagaaataagctggtgcgcctcatgacacatgttgaccttggagtcaagcaaattgctgctgaattcctttttgtcctttgcaaagagagagtggatagtctgctgaaatacactggctatgggaatgctgcaggactgttggcggccaggggcctcttggctggaggaagaggagataattggtactcagaggatgaggacacagacactgaagaatacaaaaatgcaaaaccaaacattaatcttatcactggtcatttagaggaaccaatgccaaaccccatagatgaaatgacagaagaacaaaaagaatatgaagccatgaaacttgtcaacatgcttgataaactttccaggtattgtattcccatccattttttgcttggtttctaaaaatggtctatttctttgtctctctcactgagagttaccatagaacagcaactctggaaatccatgttgattggaatagggtggcccaggcagcagtagttcagatagctcttggctaccatggtttttctacatgtgccgcttctggatgtgcattcctaaatatttaaactgtcaaagctaagatagtaactaccagagcactgtaataattaaccaactaacctccctgtgttcaaaaagatgctgtgatgtagattcagtgattttgctgctgcttgtatttttgttttagcctgttttagtttttgtttcaaatcatgatgcttttattttttcatttttgatgtgtaagtttgcaattacgcctttttgggttgctgctgaaaccaagaattgtaaaatgtcatgcacccaataagaaaaagtgaaaagaaatagctcacatgaaggattttctgaaaacagggacttgtattaattaggagttctaaaaaaaaaaaaaaaaaaaaaaaaaaaaaaaaaa

SEQ ID NO: 24945 - DNA, 5895 bp, Homo Sapiens
atgccggccctggagacctacggtgcacagccacccatcgagctgttgcgccagtggatggaccacggcggctggtacgaccgcaagatcattggtgccttcaagaacctagtggacatcaactttgtctgtgccatgggccccccgggtggaggcaggaacaccgtcaccccgcggctgatgcgtcacttcaactacctgtctttcgctgagatggacgaggtcagcaagaaacgcatcttctccaccatcctgggcaactggttggatggactccttggagaaaaaagctaccgggagcgtgtgcctggggccccccacattgcccacttcacggagccccttgtggaagccaccatcatggtgtatgcaaccatcacctcccagctgctgcccactccagccaagtcccactacaccttcaacctgagggacctctccaaggtcttccaaggcatgctcatggctgacccggccaaggtcgaggaccaagtgcagctgctgcgactgtggtatcacgagaactgccgcgtgttccgggaccgactggtgaatgaggaggaccgcagctggttcgaccagctcctcaagcgctgcatggagcagtgggaggtgaccttcaacaaggtctgccccttccagcccattctttacggggacttcatgtcaccaggctccgatgtcaagtcctacgagctcatcaccagtgagagtaagatgatgcaggtgatagaggagtacatagaggactacaaccagatcaacacggccaagctgaagctggtcctcttcatggacgccatgagccacatctgtcgcatcagccgcaccctacgccaggcgctgggcaatgcactcctgctgggcgtgggtggcagcggccgcagctccctcacaaggctcgcctcgcacatggccgagtacgagtgcttccagattgaactatccaagaactacggcatgtccgagtggcgagatgatgtgaagaaggtcctgctcaaggcgggcctacagaacctacccatcaccttcctcttctcagacacccagatcaagaacgaatccttcctggaagatatcaacaacgtcctaaactctggtgacattcccaatctgtatactgcggacgagcaggaccagatcgtcagcaccatgcggccctatatccaggagcagggcctacagcccaccaaggccaacctcatggctgcttacacagggcgtgtgcgcagcaacatccacatggtgctgtgcatgagccccatcggagaggtcttccgagctcgtctgaggcagtttccctccctggtcaactgctgtaccatcgactggtttaacgagtggccggcagaagccctgaagtctgtggccaccgtgttcctcaatgagatcccagaactggaatcctcccaggaagaaatccaaggactgatccaggtctgtgtgtacatccaccagtcggtgtccaagaagtgcatcgagtacctggcagagctgacccgccacaactatgtgacccccaagagctacttggagctgcttcatattttctccatcctcatcgggcagaagaaactggagctgaaaactgccaagaaccgcatgaagagcggcctcgacaagctgctgcgcacttctgaggatgtagccaagatgcaggaggacctggagagtatgcaccccctgctggaggaggctgccaaggacaccatgctcaccatggagcagatcaaggtggatacggccatcgccgaggagacccggaattcagtgcagacagaggagatcaaagccaatgagaaggccaagaaggcacaagctattgctgacgatgcccagaaggacctggacgaggcgttgccagccctggatgcggctctggccagcctgcgcaacctcaacaagaacgatgtgaccgaggtacgtgccatgcagcggccacccccgggtgtgaaactggtcatagaagctgtgtgcattatgaaaggcatcaagcccaagaaggtgcctggagaaaagccaggcaccaaggtggatgactactgggagcctggcaaggggctgctgcaggacccgggccacttccttgagagcctcttcaagtttgacaaggacaacattggggatgtggtgatcaaagccatccagccgtacatcgataatgaagagttccagccagccaccattgccaaggtgtccaaggcttgcacctccatctgccagtgggtgcgcgccatgcacaagtaccactttgtggccaaggccgtggagcccaagcggcaagccctgctggaggcccaggatgacctgggggtgacacagaggatcctggatgaggcaaaacagcgccttcgtgaggtggaggacggcatcgccacaatgcaggctaagtaccgggaatgcattaccaagaaggaggagctggagctgaagtgtgagcagtgtgagcagcggctgggccgagctggcaaggtgcgcaccctcctcctgcaaggcctgcaagcgggcccggcccagacaggggccagaaaggaccagggcgccggtgggtcctggggtggctgtccacaccccctccctggcaacccaggtgccacagtgggtagggccagccccaggcccctagcccagcctcccagagcccaccccacggggctgcccctccagctcatcaacgggctgtcggatgagaaggtgcgctggcaggagacggtggagaacctgcagtacatgctcaacaacatctccggcgatgtcctggtggccgctggctttgtggcctacctgggccccttcacgggccagtaccgcacggtgctctacgacagctgggtcaagcagctcaggagccacaatgtcccacacacctccgagcccacgctaatcgggacgctggggaaccctgtgaagatccgatcgtggcagatcgctggcctccccaacgacacactgtcagtggagaacggggtcatcaaccagttttcccagcgctggacccacttcattgaccctcagagccaggccaacaaatggatcaagaacatggagaaggacaatgggctggatgtgttcaagttgagtgaccgcgacttcctgcgcagcatggagaacgccatccgctttggcaagccatgtctcctggagaacgtgggcgaggagctagacccagccctggagccagtgctgctcaagcagacgtacaagcagcagggaaacacggtgctgaagctgggggacacggtgatcccctaccatgaggacttcaggatgtacatcaccaccaagctgcccaacccacactacacgcccgagatctccaccaaactcaccctcatcaacttcaccctgtcgcccagtggcctagaggaccagctactgggccaggtagtggcagaggagcgacccgacctggaggaggccaagaaccagctgattatcagtaatgccaagatgcgccaggagctgaaggacattgaggaccagatcctgtaccggctcagctcctccgagggcaaccctgtagatgacatggaactcatcaaggtgctggaagcctccaagatgaaggctgctgagatccaggccaaagtcaggattgcagagcagacggagaaggacatcgacctgacgcgcatggagtacatacccgtggccatccgcacccagatcctcttcttctgtgtgtccgacctggccaacgtggaccccatgtaccagtactcccttgagtggtttctcaacatcttcctctcgggcatcgccaactcagagagagcagacaacctgaagaagcgcatctccaacatcaaccgctacctgacctacagcctctacagcaacgtctgccgcagcctctttgagaagcacaagctgatgtttgccttcctgctgtgtgttcgcatcatgatgaacgagggcaaaatcaaccagagtgagtggcgatacctcctgtctgggggctccatctcgatcatgactgagaatccggcaccggactggctgtcagaccgggcttggcgagacatcctagcactctcgaacctgccaaccttttcctccttctcttccgacttcgtgaagcacctctcagaattccgggtcatcttcgacagccttgagccccaccgggagcctttgcctggcatctgggaccagtacctagaccagttccagaagctgctagtactccgctgcctgcgtggggacaaggttaccaacgccatgcaggactttgtggccaccaacctggagccacgcttcattgaaccccagacagccaatctgtcagtggtgttcaaagactccaactccaccacacccctcatctttgtgctgtcacccggcacagaccctgctgccgacctctacaagtttgccgaagaaatgaagttctccaaaaagctctctgccatctccctgggccaggggcagggccctcgggcagaagccatgatgcgcagctccatagagaggggcaaatgggtcttcttccagaactgccacctggcaccaagctggatgccagccctagaacgcctcatcgagcacatcaaccccgacaaggtacacagggacttccgcctctggctcaccagcctgcccagcaacaagttcccagtgtccatcctgcagaacggctccaagatgaccattgagccgccacgcggtgtcagggccaacctgctgaagtcctatagtagccttggtgaagacttcctcaactcctgccacaaggtgatggagttcaagtctctgctgctgtctctgtgcttgttccatgggaacgccctggagcgccgtaagtttgggcccctgggcttcaacatcccctatgagttcacggatggagatctgcgcatctgcatcagccagctcaagatgttcctggacgaatatgatgacatcccctacaaggtcctcaagtacacggcaggggagatcaattacgggggccgtgtcactgatgactgggaccggcgctgcatcatgaacatcttggaggacttctacaaccctgacgtgctctcccctgagcacagctacagcgcctcgggcatctaccaccagatcccgcctacctacgacctccacggctacctctcctacatcaagagcctcccactcaatgatatgcctgagatctttggcctgcatgacaatgccaacatcacctttgcccagaacgagacgttcgccctcctgggcaccatcatccagctgcaacccaaatcatcttctgcaggcagccagggccgggaggagatagtggaggacgtcacccaaaacattctgctcaaggtgcctgagcctatcaacttgcaatgggtgatggccaagtacccagtgctgtatgaggaatcaatgaacacagtactagtacaagaggtcattaggtacaatcggctgctgcaggtgatcacacagacactgcaagacctactcaaggcactcaaggggctggtagtgatgtcctctcagctggagctgatggctgccagcctgtacaacaatactgtgcctgagctctggagtgccaaggcctacccatcgctcaagcctctgtcatcatgggtcatggacctgctgcaacgcctggactttctgcaggcctggatccaagatggcatcccagctgtcttctggatcagtggattcttcttcccccaggctttcttaacaggcactctgcagaattttgcccgcaaatttgtcatctccattgacaccatctcctttgatttcaaggtgcccgctgggatccagaggccttccagctggctgagtctcagcccaaggagctgtacacagagatggccgttatctggctcttgccaacacccaaccgcaaggcccaggaccaggacttttacctgtgccccatctacaagacactga
